United States Patent Application Publication US 2026/0265736 A1, published September 10, 2026 (application 19/163,974).

The application's sequence listing, which the Patent Office published only in electronic form, follows.

SEQUENCE LISTING (29845 sequences)

SEQ ID NO: 1 - protein, 2133 aa, synthetic construct
MPAAKRVKLDGGDKKYSIGLDIGTNSVGWAVITDEYKVPSKKFKVLGNTDRHSIKKNLIGALLFDSGETAEATRLKRTARRRYTRRKNRICYLQEIFSNEMAKVDDSFFHRLEESFLVEEDKKHERHPIFGNIVDEVAYHEKYPTIYHLRKKLVDSTDKADLRLIYLALAHMIKFRGHFLIEGDLNPDNSDVDKLFIQLVQTYNQLFEENPINASGVDAKAILSARLSKSRRLENLIAQLPGEKKNGLFGNLIALSLGLTPNFKSNFDLAEDAKLQLSKDTYDDDLDNLLAQIGDQYADLFLAAKNLSDAILLSDILRVNTEITKAPLSASMIKRYDEHHQDLTLLKALVRQQLPEKYKEIFFDQSKNGYAGYIDGGASQEEFYKFIKPILEKMDGTEELLVKLNREDLLRKQRTFDNGSIPHQIHLGELHAILRRQEDFYPFLKDNREKIEKILTFRIPYYVGPLARGNSRFAWMTRKSEETITPWNFEEVVDKGASAQSFIERMTNFDKNLPNEKVLPKHSLLYEYFTVYNELTKVKYVTEGMRKPAFLSGEQKKAIVDLLFKTNRKVTVKQLKEDYFKKIECFDSVEISGVEDRFNASLGTYHDLLKIIKDKDFLDNEENEDILEDIVLTLTLFEDREMIEERLKTYAHLFDDKVMKQLKRRRYTGWGRLSRKLINGIRDKQSGKTILDFLKSDGFANRNFMQLIHDDSLTFKEDIQKAQVSGQGDSLHEHIANLAGSPAIKKGILQTVKVVDELVKVMGRHKPENIVIEMARENQTTQKGQKNSRERMKRIEEGIKELGSQILKEHPVENTQLQNEKLYLYYLQNGRDMYVDQELDINRLSDYDVDHIVPQSFLKDDSIDNKVLTRSDKARGKSDNVPSEEVVKKMKNYWRQLLNAKLITQRKFDNLTKAERGGLSELDKAGFIKRQLVETRQITKHVAQILDSRMNTKYDENDKLIREVKVITLKSKLVSDFRKDFQFYKVREINNYHHAHDAYLNAVVGTALIKKYPKLESEFVYGDYKVYDVRKMIAKSEQEIGKATAKYFFYSNIMNFFKTEITLANGEIRKRPLIETNGETGEIVWDKGRDFATVRKVLSMPQVNIVKKTEVQTGGFSKESILPKRNSDKLIARKKDWDPKKYGGFDSPTVAYSVLVVAKVEKGKSKKLKSVKELLGITIMERSSFEKNPIDFLEAKGYKEVKKDLIIKLPKYSLFELENGRKRMLASAGELQKGNELALPSKYVNFLYLASHYEKLKGSPEDNEQKQLFVEQHKHYLDEIIEQISEFSKRVILADANLDKVLSAYNKHRDKPIREQAENIIHLFTLTNLGAPAAFKYFDTTIDRKRYTSTKEVLDATLIHQSITGLYETRIDLSQLGGDGGAEAAAKEAAAKEAAAKEAAAKALEAEAAAKEAAAKEAAAKEAAAKAGGTAPLEEEYRLFLEAPIQNVTLLEQWKREIPKVWAEINPPGLASTQAPIHVQLLSTALPVRVRQYPITLEAKRSLRETIRKFRAAGILRPVHSPWNTPLLPVRKSGTSEYRMVQDLREVNKRVETIHPTVPNPYTLLSLLPPDRIWYSVLDLKDAFFCIPLAPESQLIFAFEWADAEEGESGQLTWTRLPQGFKNSPTLFDEALNRDLQGFRLDHPSVSLLQYVDDLLIAADTQAACLSATRDLLMTLAELGYRVSGKKAQLCQEEVTYLGFKIHKGSRSLSNSRTQAILQIPVPKTKRQVREFLGTIGYCRLWIPGFAELAQPLYAATRGGNDPLVWGEKEEEAFQSLKLALTQPPALALPSLDKPFQLFVEETSGAAKGVLTQALGPWKRPVAYLSKRLDPVAAGWPRCLRAIAAAALLTREASKLTFGQDIEITSSHNLESLLRSPPDKWLTNARITQYQVLLLDPPRVRFKQTAALNPATLLPETDDTLPIHHCLDTLDSLTSTRPDLTDQPLAQAEATLFTDGSSYIRDGKRYAGAAVVTLDSVIWAEPLPIGTSAQKAELIALTKALEWSKDKSVNIYTDSRYAFATLHVHGMIYRERGLLTAGGKAIKNAPEILALLTAVWLPKRVAVMHCKGHQKDDAPTSTGNRRADEVAREVAIRPLSTQATISAGKRTADGSEFEKRTADGSEFESPKKKAKVE

SEQ ID NO: 2 - protein, 2112 aa, synthetic construct
MPAAKRVKLDGGDKKYSIGLDIGTNSVGWAVITDEYKVPSKKFKVLGNTDRHSIKKNLIGALLFDSGETAEATRLKRTARRRYTRRKNRICYLQEIFSNEMAKVDDSFFHRLEESFLVEEDKKHERHPIFGNIVDEVAYHEKYPTIYHLRKKLVDSTDKADLRLIYLALAHMIKFRGHFLIEGDLNPDNSDVDKLFIQLVQTYNQLFEENPINASGVDAKAILSARLSKSRRLENLIAQLPGEKKNGLFGNLIALSLGLTPNFKSNFDLAEDAKLQLSKDTYDDDLDNLLAQIGDQYADLFLAAKNLSDAILLSDILRVNTEITKAPLSASMIKRYDEHHQDLTLLKALVRQQLPEKYKEIFFDQSKNGYAGYIDGGASQEEFYKFIKPILEKMDGTEELLVKLNREDLLRKQRTFDNGSIPHQIHLGELHAILRRQEDFYPFLKDNREKIEKILTFRIPYYVGPLARGNSRFAWMTRKSEETITPWNFEEVVDKGASAQSFIERMTNFDKNLPNEKVLPKHSLLYEYFTVYNELTKVKYVTEGMRKPAFLSGEQKKAIVDLLFKTNRKVTVKQLKEDYFKKIECFDSVEISGVEDRFNASLGTYHDLLKIIKDKDFLDNEENEDILEDIVLTLTLFEDREMIEERLKTYAHLFDDKVMKQLKRRRYTGWGRLSRKLINGIRDKQSGKTILDFLKSDGFANRNFMQLIHDDSLTFKEDIQKAQVSGQGDSLHEHIANLAGSPAIKKGILQTVKVVDELVKVMGRHKPENIVIEMARENQTTQKGQKNSRERMKRIEEGIKELGSQILKEHPVENTQLQNEKLYLYYLQNGRDMYVDQELDINRLSDYDVDHIVPQSFLKDDSIDNKVLTRSDKARGKSDNVPSEEVVKKMKNYWRQLLNAKLITQRKFDNLTKAERGGLSELDKAGFIKRQLVETRQITKHVAQILDSRMNTKYDENDKLIREVKVITLKSKLVSDFRKDFQFYKVREINNYHHAHDAYLNAVVGTALIKKYPKLESEFVYGDYKVYDVRKMIAKSEQEIGKATAKYFFYSNIMNFFKTEITLANGEIRKRPLIETNGETGEIVWDKGRDFATVRKVLSMPQVNIVKKTEVQTGGFSKESILPKRNSDKLIARKKDWDPKKYGGFDSPTVAYSVLVVAKVEKGKSKKLKSVKELLGITIMERSSFEKNPIDFLEAKGYKEVKKDLIIKLPKYSLFELENGRKRMLASAGELQKGNELALPSKYVNFLYLASHYEKLKGSPEDNEQKQLFVEQHKHYLDEIIEQISEFSKRVILADANLDKVLSAYNKHRDKPIREQAENIIHLFTLTNLGAPAAFKYFDTTIDRKRYTSTKEVLDATLIHQSITGLYETRIDLSQLGGDGGGGGGSGGGGSGGGGSGGGGSGGGGSGGTAPLEEEYRLFLEAPIQNVTLLEQWKREIPKVWAEINPPGLASTQAPIHVQLLSTALPVRVRQYPITLEAKRSLRETIRKFRAAGILRPVHSPWNTPLLPVRKSGTSEYRMVQDLREVNKRVETIHPTVPNPYTLLSLLPPDRIWYSVLDLKDAFFCIPLAPESQLIFAFEWADAEEGESGQLTWTRLPQGFKNSPTLFDEALNRDLQGFRLDHPSVSLLQYVDDLLIAADTQAACLSATRDLLMTLAELGYRVSGKKAQLCQEEVTYLGFKIHKGSRSLSNSRTQAILQIPVPKTKRQVREFLGTIGYCRLWIPGFAELAQPLYAATRGGNDPLVWGEKEEEAFQSLKLALTQPPALALPSLDKPFQLFVEETSGAAKGVLTQALGPWKRPVAYLSKRLDPVAAGWPRCLRAIAAAALLTREASKLTFGQDIEITSSHNLESLLRSPPDKWLTNARITQYQVLLLDPPRVRFKQTAALNPATLLPETDDTLPIHHCLDTLDSLTSTRPDLTDQPLAQAEATLFTDGSSYIRDGKRYAGAAVVTLDSVIWAEPLPIGTSAQKAELIALTKALEWSKDKSVNIYTDSRYAFATLHVHGMIYRERGLLTAGGKAIKNAPEILALLTAVWLPKRVAVMHCKGHQKDDAPTSTGNRRADEVAREVAIRPLSTQATISAGKRTADGSEFEKRTADGSEFESPKKKAKVE

SEQ ID NO: 3 - protein, 2098 aa, synthetic construct
MPAAKRVKLDGGDKKYSIGLDIGTNSVGWAVITDEYKVPSKKFKVLGNTDRHSIKKNLIGALLFDSGETAEATRLKRTARRRYTRRKNRICYLQEIFSNEMAKVDDSFFHRLEESFLVEEDKKHERHPIFGNIVDEVAYHEKYPTIYHLRKKLVDSTDKADLRLIYLALAHMIKFRGHFLIEGDLNPDNSDVDKLFIQLVQTYNQLFEENPINASGVDAKAILSARLSKSRRLENLIAQLPGEKKNGLFGNLIALSLGLTPNFKSNFDLAEDAKLQLSKDTYDDDLDNLLAQIGDQYADLFLAAKNLSDAILLSDILRVNTEITKAPLSASMIKRYDEHHQDLTLLKALVRQQLPEKYKEIFFDQSKNGYAGYIDGGASQEEFYKFIKPILEKMDGTEELLVKLNREDLLRKQRTFDNGSIPHQIHLGELHAILRRQEDFYPFLKDNREKIEKILTFRIPYYVGPLARGNSRFAWMTRKSEETITPWNFEEVVDKGASAQSFIERMTNFDKNLPNEKVLPKHSLLYEYFTVYNELTKVKYVTEGMRKPAFLSGEQKKAIVDLLFKTNRKVTVKQLKEDYFKKIECFDSVEISGVEDRFNASLGTYHDLLKIIKDKDFLDNEENEDILEDIVLTLTLFEDREMIEERLKTYAHLFDDKVMKQLKRRRYTGWGRLSRKLINGIRDKQSGKTILDFLKSDGFANRNFMQLIHDDSLTFKEDIQKAQVSGQGDSLHEHIANLAGSPAIKKGILQTVKVVDELVKVMGRHKPENIVIEMARENQTTQKGQKNSRERMKRIEEGIKELGSQILKEHPVENTQLQNEKLYLYYLQNGRDMYVDQELDINRLSDYDVDHIVPQSFLKDDSIDNKVLTRSDKARGKSDNVPSEEVVKKMKNYWRQLLNAKLITQRKFDNLTKAERGGLSELDKAGFIKRQLVETRQITKHVAQILDSRMNTKYDENDKLIREVKVITLKSKLVSDFRKDFQFYKVREINNYHHAHDAYLNAVVGTALIKKYPKLESEFVYGDYKVYDVRKMIAKSEQEIGKATAKYFFYSNIMNFFKTEITLANGEIRKRPLIETNGETGEIVWDKGRDFATVRKVLSMPQVNIVKKTEVQTGGFSKESILPKRNSDKLIARKKDWDPKKYGGFDSPTVAYSVLVVAKVEKGKSKKLKSVKELLGITIMERSSFEKNPIDFLEAKGYKEVKKDLIIKLPKYSLFELENGRKRMLASAGELQKGNELALPSKYVNFLYLASHYEKLKGSPEDNEQKQLFVEQHKHYLDEIIEQISEFSKRVILADANLDKVLSAYNKHRDKPIREQAENIIHLFTLTNLGAPAAFKYFDTTIDRKRYTSTKEVLDATLIHQSITGLYETRIDLSQLGGDGGPAPEAAAKGGGGGTAPLEEEYRLFLEAPIQNVTLLEQWKREIPKVWAEINPPGLASTQAPIHVQLLSTALPVRVRQYPITLEAKRSLRETIRKFRAAGILRPVHSPWNTPLLPVRKSGTSEYRMVQDLREVNKRVETIHPTVPNPYTLLSLLPPDRIWYSVLDLKDAFFCIPLAPESQLIFAFEWADAEEGESGQLTWTRLPQGFKNSPTLFDEALNRDLQGFRLDHPSVSLLQYVDDLLIAADTQAACLSATRDLLMTLAELGYRVSGKKAQLCQEEVTYLGFKIHKGSRSLSNSRTQAILQIPVPKTKRQVREFLGTIGYCRLWIPGFAELAQPLYAATRGGNDPLVWGEKEEEAFQSLKLALTQPPALALPSLDKPFQLFVEETSGAAKGVLTQALGPWKRPVAYLSKRLDPVAAGWPRCLRAIAAAALLTREASKLTFGQDIEITSSHNLESLLRSPPDKWLTNARITQYQVLLLDPPRVRFKQTAALNPATLLPETDDTLPIHHCLDTLDSLTSTRPDLTDQPLAQAEATLFTDGSSYIRDGKRYAGAAVVTLDSVIWAEPLPIGTSAQKAELIALTKALEWSKDKSVNIYTDSRYAFATLHVHGMIYRERGLLTAGGKAIKNAPEILALLTAVWLPKRVAVMHCKGHQKDDAPTSTGNRRADEVAREVAIRPLSTQATISAGKRTADGSEFEKRTADGSEFESPKKKAKVE

SEQ ID NO: 4 - protein, 2090 aa, synthetic construct
MPAAKRVKLDGGDKKYSIGLDIGTNSVGWAVITDEYKVPSKKFKVLGNTDRHSIKKNLIGALLFDSGETAEATRLKRTARRRYTRRKNRICYLQEIFSNEMAKVDDSFFHRLEESFLVEEDKKHERHPIFGNIVDEVAYHEKYPTIYHLRKKLVDSTDKADLRLIYLALAHMIKFRGHFLIEGDLNPDNSDVDKLFIQLVQTYNQLFEENPINASGVDAKAILSARLSKSRRLENLIAQLPGEKKNGLFGNLIALSLGLTPNFKSNFDLAEDAKLQLSKDTYDDDLDNLLAQIGDQYADLFLAAKNLSDAILLSDILRVNTEITKAPLSASMIKRYDEHHQDLTLLKALVRQQLPEKYKEIFFDQSKNGYAGYIDGGASQEEFYKFIKPILEKMDGTEELLVKLNREDLLRKQRTFDNGSIPHQIHLGELHAILRRQEDFYPFLKDNREKIEKILTFRIPYYVGPLARGNSRFAWMTRKSEETITPWNFEEVVDKGASAQSFIERMTNFDKNLPNEKVLPKHSLLYEYFTVYNELTKVKYVTEGMRKPAFLSGEQKKAIVDLLFKTNRKVTVKQLKEDYFKKIECFDSVEISGVEDRFNASLGTYHDLLKIIKDKDFLDNEENEDILEDIVLTLTLFEDREMIEERLKTYAHLFDDKVMKQLKRRRYTGWGRLSRKLINGIRDKQSGKTILDFLKSDGFANRNFMQLIHDDSLTFKEDIQKAQVSGQGDSLHEHIANLAGSPAIKKGILQTVKVVDELVKVMGRHKPENIVIEMARENQTTQKGQKNSRERMKRIEEGIKELGSQILKEHPVENTQLQNEKLYLYYLQNGRDMYVDQELDINRLSDYDVDHIVPQSFLKDDSIDNKVLTRSDKARGKSDNVPSEEVVKKMKNYWRQLLNAKLITQRKFDNLTKAERGGLSELDKAGFIKRQLVETRQITKHVAQILDSRMNTKYDENDKLIREVKVITLKSKLVSDFRKDFQFYKVREINNYHHAHDAYLNAVVGTALIKKYPKLESEFVYGDYKVYDVRKMIAKSEQEIGKATAKYFFYSNIMNFFKTEITLANGEIRKRPLIETNGETGEIVWDKGRDFATVRKVLSMPQVNIVKKTEVQTGGFSKESILPKRNSDKLIARKKDWDPKKYGGFDSPTVAYSVLVVAKVEKGKSKKLKSVKELLGITIMERSSFEKNPIDFLEAKGYKEVKKDLIIKLPKYSLFELENGRKRMLASAGELQKGNELALPSKYVNFLYLASHYEKLKGSPEDNEQKQLFVEQHKHYLDEIIEQISEFSKRVILADANLDKVLSAYNKHRDKPIREQAENIIHLFTLTNLGAPAAFKYFDTTIDRKRYTSTKEVLDATLIHQSITGLYETRIDLSQLGGDGGGGGGGTAPLEEEYRLFLEAPIQNVTLLEQWKREIPKVWAEINPPGLASTQAPIHVQLLSTALPVRVRQYPITLEAKRSLRETIRKFRAAGILRPVHSPWNTPLLPVRKSGTSEYRMVQDLREVNKRVETIHPTVPNPYTLLSLLPPDRIWYSVLDLKDAFFCIPLAPESQLIFAFEWADAEEGESGQLTWTRLPQGFKNSPTLFDEALNRDLQGFRLDHPSVSLLQYVDDLLIAADTQAACLSATRDLLMTLAELGYRVSGKKAQLCQEEVTYLGFKIHKGSRSLSNSRTQAILQIPVPKTKRQVREFLGTIGYCRLWIPGFAELAQPLYAATRGGNDPLVWGEKEEEAFQSLKLALTQPPALALPSLDKPFQLFVEETSGAAKGVLTQALGPWKRPVAYLSKRLDPVAAGWPRCLRAIAAAALLTREASKLTFGQDIEITSSHNLESLLRSPPDKWLTNARITQYQVLLLDPPRVRFKQTAALNPATLLPETDDTLPIHHCLDTLDSLTSTRPDLTDQPLAQAEATLFTDGSSYIRDGKRYAGAAVVTLDSVIWAEPLPIGTSAQKAELIALTKALEWSKDKSVNIYTDSRYAFATLHVHGMIYRERGLLTAGGKAIKNAPEILALLTAVWLPKRVAVMHCKGHQKDDAPTSTGNRRADEVAREVAIRPLSTQATISAGKRTADGSEFEKRTADGSEFESPKKKAKVE

SEQ ID NO: 5 - protein, 2098 aa, synthetic construct
MPAAKRVKLDGGDKKYSIGLDIGTNSVGWAVITDEYKVPSKKFKVLGNTDRHSIKKNLIGALLFDSGETAEATRLKRTARRRYTRRKNRICYLQEIFSNEMAKVDDSFFHRLEESFLVEEDKKHERHPIFGNIVDEVAYHEKYPTIYHLRKKLVDSTDKADLRLIYLALAHMIKFRGHFLIEGDLNPDNSDVDKLFIQLVQTYNQLFEENPINASGVDAKAILSARLSKSRRLENLIAQLPGEKKNGLFGNLIALSLGLTPNFKSNFDLAEDAKLQLSKDTYDDDLDNLLAQIGDQYADLFLAAKNLSDAILLSDILRVNTEITKAPLSASMIKRYDEHHQDLTLLKALVRQQLPEKYKEIFFDQSKNGYAGYIDGGASQEEFYKFIKPILEKMDGTEELLVKLNREDLLRKQRTFDNGSIPHQIHLGELHAILRRQEDFYPFLKDNREKIEKILTFRIPYYVGPLARGNSRFAWMTRKSEETITPWNFEEVVDKGASAQSFIERMTNFDKNLPNEKVLPKHSLLYEYFTVYNELTKVKYVTEGMRKPAFLSGEQKKAIVDLLFKTNRKVTVKQLKEDYFKKIECFDSVEISGVEDRFNASLGTYHDLLKIIKDKDFLDNEENEDILEDIVLTLTLFEDREMIEERLKTYAHLFDDKVMKQLKRRRYTGWGRLSRKLINGIRDKQSGKTILDFLKSDGFANRNFMQLIHDDSLTFKEDIQKAQVSGQGDSLHEHIANLAGSPAIKKGILQTVKVVDELVKVMGRHKPENIVIEMARENQTTQKGQKNSRERMKRIEEGIKELGSQILKEHPVENTQLQNEKLYLYYLQNGRDMYVDQELDINRLSDYDVDHIVPQSFLKDDSIDNKVLTRSDKARGKSDNVPSEEVVKKMKNYWRQLLNAKLITQRKFDNLTKAERGGLSELDKAGFIKRQLVETRQITKHVAQILDSRMNTKYDENDKLIREVKVITLKSKLVSDFRKDFQFYKVREINNYHHAHDAYLNAVVGTALIKKYPKLESEFVYGDYKVYDVRKMIAKSEQEIGKATAKYFFYSNIMNFFKTEITLANGEIRKRPLIETNGETGEIVWDKGRDFATVRKVLSMPQVNIVKKTEVQTGGFSKESILPKRNSDKLIARKKDWDPKKYGGFDSPTVAYSVLVVAKVEKGKSKKLKSVKELLGITIMERSSFEKNPIDFLEAKGYKEVKKDLIIKLPKYSLFELENGRKRMLASAGELQKGNELALPSKYVNFLYLASHYEKLKGSPEDNEQKQLFVEQHKHYLDEIIEQISEFSKRVILADANLDKVLSAYNKHRDKPIREQAENIIHLFTLTNLGAPAAFKYFDTTIDRKRYTSTKEVLDATLIHQSITGLYETRIDLSQLGGDGGGGGGSSEAAAKGGTAPLEEEYRLFLEAPIQNVTLLEQWKREIPKVWAEINPPGLASTQAPIHVQLLSTALPVRVRQYPITLEAKRSLRETIRKFRAAGILRPVHSPWNTPLLPVRKSGTSEYRMVQDLREVNKRVETIHPTVPNPYTLLSLLPPDRIWYSVLDLKDAFFCIPLAPESQLIFAFEWADAEEGESGQLTWTRLPQGFKNSPTLFDEALNRDLQGFRLDHPSVSLLQYVDDLLIAADTQAACLSATRDLLMTLAELGYRVSGKKAQLCQEEVTYLGFKIHKGSRSLSNSRTQAILQIPVPKTKRQVREFLGTIGYCRLWIPGFAELAQPLYAATRGGNDPLVWGEKEEEAFQSLKLALTQPPALALPSLDKPFQLFVEETSGAAKGVLTQALGPWKRPVAYLSKRLDPVAAGWPRCLRAIAAAALLTREASKLTFGQDIEITSSHNLESLLRSPPDKWLTNARITQYQVLLLDPPRVRFKQTAALNPATLLPETDDTLPIHHCLDTLDSLTSTRPDLTDQPLAQAEATLFTDGSSYIRDGKRYAGAAVVTLDSVIWAEPLPIGTSAQKAELIALTKALEWSKDKSVNIYTDSRYAFATLHVHGMIYRERGLLTAGGKAIKNAPEILALLTAVWLPKRVAVMHCKGHQKDDAPTSTGNRRADEVAREVAIRPLSTQATISAGKRTADGSEFEKRTADGSEFESPKKKAKVE

SEQ ID NO: 6 - protein, 2098 aa, synthetic construct
MPAAKRVKLDGGDKKYSIGLDIGTNSVGWAVITDEYKVPSKKFKVLGNTDRHSIKKNLIGALLFDSGETAEATRLKRTARRRYTRRKNRICYLQEIFSNEMAKVDDSFFHRLEESFLVEEDKKHERHPIFGNIVDEVAYHEKYPTIYHLRKKLVDSTDKADLRLIYLALAHMIKFRGHFLIEGDLNPDNSDVDKLFIQLVQTYNQLFEENPINASGVDAKAILSARLSKSRRLENLIAQLPGEKKNGLFGNLIALSLGLTPNFKSNFDLAEDAKLQLSKDTYDDDLDNLLAQIGDQYADLFLAAKNLSDAILLSDILRVNTEITKAPLSASMIKRYDEHHQDLTLLKALVRQQLPEKYKEIFFDQSKNGYAGYIDGGASQEEFYKFIKPILEKMDGTEELLVKLNREDLLRKQRTFDNGSIPHQIHLGELHAILRRQEDFYPFLKDNREKIEKILTFRIPYYVGPLARGNSRFAWMTRKSEETITPWNFEEVVDKGASAQSFIERMTNFDKNLPNEKVLPKHSLLYEYFTVYNELTKVKYVTEGMRKPAFLSGEQKKAIVDLLFKTNRKVTVKQLKEDYFKKIECFDSVEISGVEDRFNASLGTYHDLLKIIKDKDFLDNEENEDILEDIVLTLTLFEDREMIEERLKTYAHLFDDKVMKQLKRRRYTGWGRLSRKLINGIRDKQSGKTILDFLKSDGFANRNFMQLIHDDSLTFKEDIQKAQVSGQGDSLHEHIANLAGSPAIKKGILQTVKVVDELVKVMGRHKPENIVIEMARENQTTQKGQKNSRERMKRIEEGIKELGSQILKEHPVENTQLQNEKLYLYYLQNGRDMYVDQELDINRLSDYDVDHIVPQSFLKDDSIDNKVLTRSDKARGKSDNVPSEEVVKKMKNYWRQLLNAKLITQRKFDNLTKAERGGLSELDKAGFIKRQLVETRQITKHVAQILDSRMNTKYDENDKLIREVKVITLKSKLVSDFRKDFQFYKVREINNYHHAHDAYLNAVVGTALIKKYPKLESEFVYGDYKVYDVRKMIAKSEQEIGKATAKYFFYSNIMNFFKTEITLANGEIRKRPLIETNGETGEIVWDKGRDFATVRKVLSMPQVNIVKKTEVQTGGFSKESILPKRNSDKLIARKKDWDPKKYGGFDSPTVAYSVLVVAKVEKGKSKKLKSVKELLGITIMERSSFEKNPIDFLEAKGYKEVKKDLIIKLPKYSLFELENGRKRMLASAGELQKGNELALPSKYVNFLYLASHYEKLKGSPEDNEQKQLFVEQHKHYLDEIIEQISEFSKRVILADANLDKVLSAYNKHRDKPIREQAENIIHLFTLTNLGAPAAFKYFDTTIDRKRYTSTKEVLDATLIHQSITGLYETRIDLSQLGGDGGGGSEAAAKGGGGGTAPLEEEYRLFLEAPIQNVTLLEQWKREIPKVWAEINPPGLASTQAPIHVQLLSTALPVRVRQYPITLEAKRSLRETIRKFRAAGILRPVHSPWNTPLLPVRKSGTSEYRMVQDLREVNKRVETIHPTVPNPYTLLSLLPPDRIWYSVLDLKDAFFCIPLAPESQLIFAFEWADAEEGESGQLTWTRLPQGFKNSPTLFDEALNRDLQGFRLDHPSVSLLQYVDDLLIAADTQAACLSATRDLLMTLAELGYRVSGKKAQLCQEEVTYLGFKIHKGSRSLSNSRTQAILQIPVPKTKRQVREFLGTIGYCRLWIPGFAELAQPLYAATRGGNDPLVWGEKEEEAFQSLKLALTQPPALALPSLDKPFQLFVEETSGAAKGVLTQALGPWKRPVAYLSKRLDPVAAGWPRCLRAIAAAALLTREASKLTFGQDIEITSSHNLESLLRSPPDKWLTNARITQYQVLLLDPPRVRFKQTAALNPATLLPETDDTLPIHHCLDTLDSLTSTRPDLTDQPLAQAEATLFTDGSSYIRDGKRYAGAAVVTLDSVIWAEPLPIGTSAQKAELIALTKALEWSKDKSVNIYTDSRYAFATLHVHGMIYRERGLLTAGGKAIKNAPEILALLTAVWLPKRVAVMHCKGHQKDDAPTSTGNRRADEVAREVAIRPLSTQATISAGKRTADGSEFEKRTADGSEFESPKKKAKVE

SEQ ID NO: 7 - protein, 2093 aa, synthetic construct
MPAAKRVKLDGGDKKYSIGLDIGTNSVGWAVITDEYKVPSKKFKVLGNTDRHSIKKNLIGALLFDSGETAEATRLKRTARRRYTRRKNRICYLQEIFSNEMAKVDDSFFHRLEESFLVEEDKKHERHPIFGNIVDEVAYHEKYPTIYHLRKKLVDSTDKADLRLIYLALAHMIKFRGHFLIEGDLNPDNSDVDKLFIQLVQTYNQLFEENPINASGVDAKAILSARLSKSRRLENLIAQLPGEKKNGLFGNLIALSLGLTPNFKSNFDLAEDAKLQLSKDTYDDDLDNLLAQIGDQYADLFLAAKNLSDAILLSDILRVNTEITKAPLSASMIKRYDEHHQDLTLLKALVRQQLPEKYKEIFFDQSKNGYAGYIDGGASQEEFYKFIKPILEKMDGTEELLVKLNREDLLRKQRTFDNGSIPHQIHLGELHAILRRQEDFYPFLKDNREKIEKILTFRIPYYVGPLARGNSRFAWMTRKSEETITPWNFEEVVDKGASAQSFIERMTNFDKNLPNEKVLPKHSLLYEYFTVYNELTKVKYVTEGMRKPAFLSGEQKKAIVDLLFKTNRKVTVKQLKEDYFKKIECFDSVEISGVEDRFNASLGTYHDLLKIIKDKDFLDNEENEDILEDIVLTLTLFEDREMIEERLKTYAHLFDDKVMKQLKRRRYTGWGRLSRKLINGIRDKQSGKTILDFLKSDGFANRNFMQLIHDDSLTFKEDIQKAQVSGQGDSLHEHIANLAGSPAIKKGILQTVKVVDELVKVMGRHKPENIVIEMARENQTTQKGQKNSRERMKRIEEGIKELGSQILKEHPVENTQLQNEKLYLYYLQNGRDMYVDQELDINRLSDYDVDHIVPQSFLKDDSIDNKVLTRSDKARGKSDNVPSEEVVKKMKNYWRQLLNAKLITQRKFDNLTKAERGGLSELDKAGFIKRQLVETRQITKHVAQILDSRMNTKYDENDKLIREVKVITLKSKLVSDFRKDFQFYKVREINNYHHAHDAYLNAVVGTALIKKYPKLESEFVYGDYKVYDVRKMIAKSEQEIGKATAKYFFYSNIMNFFKTEITLANGEIRKRPLIETNGETGEIVWDKGRDFATVRKVLSMPQVNIVKKTEVQTGGFSKESILPKRNSDKLIARKKDWDPKKYGGFDSPTVAYSVLVVAKVEKGKSKKLKSVKELLGITIMERSSFEKNPIDFLEAKGYKEVKKDLIIKLPKYSLFELENGRKRMLASAGELQKGNELALPSKYVNFLYLASHYEKLKGSPEDNEQKQLFVEQHKHYLDEIIEQISEFSKRVILADANLDKVLSAYNKHRDKPIREQAENIIHLFTLTNLGAPAAFKYFDTTIDRKRYTSTKEVLDATLIHQSITGLYETRIDLSQLGGDGGGGSGSSGGTAPLEEEYRLFLEAPIQNVTLLEQWKREIPKVWAEINPPGLASTQAPIHVQLLSTALPVRVRQYPITLEAKRSLRETIRKFRAAGILRPVHSPWNTPLLPVRKSGTSEYRMVQDLREVNKRVETIHPTVPNPYTLLSLLPPDRIWYSVLDLKDAFFCIPLAPESQLIFAFEWADAEEGESGQLTWTRLPQGFKNSPTLFDEALNRDLQGFRLDHPSVSLLQYVDDLLIAADTQAACLSATRDLLMTLAELGYRVSGKKAQLCQEEVTYLGFKIHKGSRSLSNSRTQAILQIPVPKTKRQVREFLGTIGYCRLWIPGFAELAQPLYAATRGGNDPLVWGEKEEEAFQSLKLALTQPPALALPSLDKPFQLFVEETSGAAKGVLTQALGPWKRPVAYLSKRLDPVAAGWPRCLRAIAAAALLTREASKLTFGQDIEITSSHNLESLLRSPPDKWLTNARITQYQVLLLDPPRVRFKQTAALNPATLLPETDDTLPIHHCLDTLDSLTSTRPDLTDQPLAQAEATLFTDGSSYIRDGKRYAGAAVVTLDSVIWAEPLPIGTSAQKAELIALTKALEWSKDKSVNIYTDSRYAFATLHVHGMIYRERGLLTAGGKAIKNAPEILALLTAVWLPKRVAVMHCKGHQKDDAPTSTGNRRADEVAREVAIRPLSTQATISAGKRTADGSEFEKRTADGSEFESPKKKAKVE

SEQ ID NO: 8 - protein, 2093 aa, synthetic construct
MPAAKRVKLDGGDKKYSIGLDIGTNSVGWAVITDEYKVPSKKFKVLGNTDRHSIKKNLIGALLFDSGETAEATRLKRTARRRYTRRKNRICYLQEIFSNEMAKVDDSFFHRLEESFLVEEDKKHERHPIFGNIVDEVAYHEKYPTIYHLRKKLVDSTDKADLRLIYLALAHMIKFRGHFLIEGDLNPDNSDVDKLFIQLVQTYNQLFEENPINASGVDAKAILSARLSKSRRLENLIAQLPGEKKNGLFGNLIALSLGLTPNFKSNFDLAEDAKLQLSKDTYDDDLDNLLAQIGDQYADLFLAAKNLSDAILLSDILRVNTEITKAPLSASMIKRYDEHHQDLTLLKALVRQQLPEKYKEIFFDQSKNGYAGYIDGGASQEEFYKFIKPILEKMDGTEELLVKLNREDLLRKQRTFDNGSIPHQIHLGELHAILRRQEDFYPFLKDNREKIEKILTFRIPYYVGPLARGNSRFAWMTRKSEETITPWNFEEVVDKGASAQSFIERMTNFDKNLPNEKVLPKHSLLYEYFTVYNELTKVKYVTEGMRKPAFLSGEQKKAIVDLLFKTNRKVTVKQLKEDYFKKIECFDSVEISGVEDRFNASLGTYHDLLKIIKDKDFLDNEENEDILEDIVLTLTLFEDREMIEERLKTYAHLFDDKVMKQLKRRRYTGWGRLSRKLINGIRDKQSGKTILDFLKSDGFANRNFMQLIHDDSLTFKEDIQKAQVSGQGDSLHEHIANLAGSPAIKKGILQTVKVVDELVKVMGRHKPENIVIEMARENQTTQKGQKNSRERMKRIEEGIKELGSQILKEHPVENTQLQNEKLYLYYLQNGRDMYVDQELDINRLSDYDVDHIVPQSFLKDDSIDNKVLTRSDKARGKSDNVPSEEVVKKMKNYWRQLLNAKLITQRKFDNLTKAERGGLSELDKAGFIKRQLVETRQITKHVAQILDSRMNTKYDENDKLIREVKVITLKSKLVSDFRKDFQFYKVREINNYHHAHDAYLNAVVGTALIKKYPKLESEFVYGDYKVYDVRKMIAKSEQEIGKATAKYFFYSNIMNFFKTEITLANGEIRKRPLIETNGETGEIVWDKGRDFATVRKVLSMPQVNIVKKTEVQTGGFSKESILPKRNSDKLIARKKDWDPKKYGGFDSPTVAYSVLVVAKVEKGKSKKLKSVKELLGITIMERSSFEKNPIDFLEAKGYKEVKKDLIIKLPKYSLFELENGRKRMLASAGELQKGNELALPSKYVNFLYLASHYEKLKGSPEDNEQKQLFVEQHKHYLDEIIEQISEFSKRVILADANLDKVLSAYNKHRDKPIREQAENIIHLFTLTNLGAPAAFKYFDTTIDRKRYTSTKEVLDATLIHQSITGLYETRIDLSQLGGDGGGGSPAPGGTAPLEEEYRLFLEAPIQNVTLLEQWKREIPKVWAEINPPGLASTQAPIHVQLLSTALPVRVRQYPITLEAKRSLRETIRKFRAAGILRPVHSPWNTPLLPVRKSGTSEYRMVQDLREVNKRVETIHPTVPNPYTLLSLLPPDRIWYSVLDLKDAFFCIPLAPESQLIFAFEWADAEEGESGQLTWTRLPQGFKNSPTLFDEALNRDLQGFRLDHPSVSLLQYVDDLLIAADTQAACLSATRDLLMTLAELGYRVSGKKAQLCQEEVTYLGFKIHKGSRSLSNSRTQAILQIPVPKTKRQVREFLGTIGYCRLWIPGFAELAQPLYAATRGGNDPLVWGEKEEEAFQSLKLALTQPPALALPSLDKPFQLFVEETSGAAKGVLTQALGPWKRPVAYLSKRLDPVAAGWPRCLRAIAAAALLTREASKLTFGQDIEITSSHNLESLLRSPPDKWLTNARITQYQVLLLDPPRVRFKQTAALNPATLLPETDDTLPIHHCLDTLDSLTSTRPDLTDQPLAQAEATLFTDGSSYIRDGKRYAGAAVVTLDSVIWAEPLPIGTSAQKAELIALTKALEWSKDKSVNIYTDSRYAFATLHVHGMIYRERGLLTAGGKAIKNAPEILALLTAVWLPKRVAVMHCKGHQKDDAPTSTGNRRADEVAREVAIRPLSTQATISAGKRTADGSEFEKRTADGSEFESPKKKAKVE

SEQ ID NO: 9 - protein, 2097 aa, synthetic construct
MPAAKRVKLDGGDKKYSIGLDIGTNSVGWAVITDEYKVPSKKFKVLGNTDRHSIKKNLIGALLFDSGETAEATRLKRTARRRYTRRKNRICYLQEIFSNEMAKVDDSFFHRLEESFLVEEDKKHERHPIFGNIVDEVAYHEKYPTIYHLRKKLVDSTDKADLRLIYLALAHMIKFRGHFLIEGDLNPDNSDVDKLFIQLVQTYNQLFEENPINASGVDAKAILSARLSKSRRLENLIAQLPGEKKNGLFGNLIALSLGLTPNFKSNFDLAEDAKLQLSKDTYDDDLDNLLAQIGDQYADLFLAAKNLSDAILLSDILRVNTEITKAPLSASMIKRYDEHHQDLTLLKALVRQQLPEKYKEIFFDQSKNGYAGYIDGGASQEEFYKFIKPILEKMDGTEELLVKLNREDLLRKQRTFDNGSIPHQIHLGELHAILRRQEDFYPFLKDNREKIEKILTFRIPYYVGPLARGNSRFAWMTRKSEETITPWNFEEVVDKGASAQSFIERMTNFDKNLPNEKVLPKHSLLYEYFTVYNELTKVKYVTEGMRKPAFLSGEQKKAIVDLLFKTNRKVTVKQLKEDYFKKIECFDSVEISGVEDRFNASLGTYHDLLKIIKDKDFLDNEENEDILEDIVLTLTLFEDREMIEERLKTYAHLFDDKVMKQLKRRRYTGWGRLSRKLINGIRDKQSGKTILDFLKSDGFANRNFMQLIHDDSLTFKEDIQKAQVSGQGDSLHEHIANLAGSPAIKKGILQTVKVVDELVKVMGRHKPENIVIEMARENQTTQKGQKNSRERMKRIEEGIKELGSQILKEHPVENTQLQNEKLYLYYLQNGRDMYVDQELDINRLSDYDVDHIVPQSFLKDDSIDNKVLTRSDKARGKSDNVPSEEVVKKMKNYWRQLLNAKLITQRKFDNLTKAERGGLSELDKAGFIKRQLVETRQITKHVAQILDSRMNTKYDENDKLIREVKVITLKSKLVSDFRKDFQFYKVREINNYHHAHDAYLNAVVGTALIKKYPKLESEFVYGDYKVYDVRKMIAKSEQEIGKATAKYFFYSNIMNFFKTEITLANGEIRKRPLIETNGETGEIVWDKGRDFATVRKVLSMPQVNIVKKTEVQTGGFSKESILPKRNSDKLIARKKDWDPKKYGGFDSPTVAYSVLVVAKVEKGKSKKLKSVKELLGITIMERSSFEKNPIDFLEAKGYKEVKKDLIIKLPKYSLFELENGRKRMLASAGELQKGNELALPSKYVNFLYLASHYEKLKGSPEDNEQKQLFVEQHKHYLDEIIEQISEFSKRVILADANLDKVLSAYNKHRDKPIREQAENIIHLFTLTNLGAPAAFKYFDTTIDRKRYTSTKEVLDATLIHQSITGLYETRIDLSQLGGDGGGGGGSGGGGSGGTAPLEEEYRLFLEAPIQNVTLLEQWKREIPKVWAEINPPGLASTQAPIHVQLLSTALPVRVRQYPITLEAKRSLRETIRKFRAAGILRPVHSPWNTPLLPVRKSGTSEYRMVQDLREVNKRVETIHPTVPNPYTLLSLLPPDRIWYSVLDLKDAFFCIPLAPESQLIFAFEWADAEEGESGQLTWTRLPQGFKNSPTLFDEALNRDLQGFRLDHPSVSLLQYVDDLLIAADTQAACLSATRDLLMTLAELGYRVSGKKAQLCQEEVTYLGFKIHKGSRSLSNSRTQAILQIPVPKTKRQVREFLGTIGYCRLWIPGFAELAQPLYAATRGGNDPLVWGEKEEEAFQSLKLALTQPPALALPSLDKPFQLFVEETSGAAKGVLTQALGPWKRPVAYLSKRLDPVAAGWPRCLRAIAAAALLTREASKLTFGQDIEITSSHNLESLLRSPPDKWLTNARITQYQVLLLDPPRVRFKQTAALNPATLLPETDDTLPIHHCLDTLDSLTSTRPDLTDQPLAQAEATLFTDGSSYIRDGKRYAGAAVVTLDSVIWAEPLPIGTSAQKAELIALTKALEWSKDKSVNIYTDSRYAFATLHVHGMIYRERGLLTAGGKAIKNAPEILALLTAVWLPKRVAVMHCKGHQKDDAPTSTGNRRADEVAREVAIRPLSTQATISAGKRTADGSEFEKRTADGSEFESPKKKAKVE

SEQ ID NO: 10 - protein, 2097 aa, synthetic construct
MPAAKRVKLDGGDKKYSIGLDIGTNSVGWAVITDEYKVPSKKFKVLGNTDRHSIKKNLIGALLFDSGETAEATRLKRTARRRYTRRKNRICYLQEIFSNEMAKVDDSFFHRLEESFLVEEDKKHERHPIFGNIVDEVAYHEKYPTIYHLRKKLVDSTDKADLRLIYLALAHMIKFRGHFLIEGDLNPDNSDVDKLFIQLVQTYNQLFEENPINASGVDAKAILSARLSKSRRLENLIAQLPGEKKNGLFGNLIALSLGLTPNFKSNFDLAEDAKLQLSKDTYDDDLDNLLAQIGDQYADLFLAAKNLSDAILLSDILRVNTEITKAPLSASMIKRYDEHHQDLTLLKALVRQQLPEKYKEIFFDQSKNGYAGYIDGGASQEEFYKFIKPILEKMDGTEELLVKLNREDLLRKQRTFDNGSIPHQIHLGELHAILRRQEDFYPFLKDNREKIEKILTFRIPYYVGPLARGNSRFAWMTRKSEETITPWNFEEVVDKGASAQSFIERMTNFDKNLPNEKVLPKHSLLYEYFTVYNELTKVKYVTEGMRKPAFLSGEQKKAIVDLLFKTNRKVTVKQLKEDYFKKIECFDSVEISGVEDRFNASLGTYHDLLKIIKDKDFLDNEENEDILEDIVLTLTLFEDREMIEERLKTYAHLFDDKVMKQLKRRRYTGWGRLSRKLINGIRDKQSGKTILDFLKSDGFANRNFMQLIHDDSLTFKEDIQKAQVSGQGDSLHEHIANLAGSPAIKKGILQTVKVVDELVKVMGRHKPENIVIEMARENQTTQKGQKNSRERMKRIEEGIKELGSQILKEHPVENTQLQNEKLYLYYLQNGRDMYVDQELDINRLSDYDVDHIVPQSFLKDDSIDNKVLTRSDKARGKSDNVPSEEVVKKMKNYWRQLLNAKLITQRKFDNLTKAERGGLSELDKAGFIKRQLVETRQITKHVAQILDSRMNTKYDENDKLIREVKVITLKSKLVSDFRKDFQFYKVREINNYHHAHDAYLNAVVGTALIKKYPKLESEFVYGDYKVYDVRKMIAKSEQEIGKATAKYFFYSNIMNFFKTEITLANGEIRKRPLIETNGETGEIVWDKGRDFATVRKVLSMPQVNIVKKTEVQTGGFSKESILPKRNSDKLIARKKDWDPKKYGGFDSPTVAYSVLVVAKVEKGKSKKLKSVKELLGITIMERSSFEKNPIDFLEAKGYKEVKKDLIIKLPKYSLFELENGRKRMLASAGELQKGNELALPSKYVNFLYLASHYEKLKGSPEDNEQKQLFVEQHKHYLDEIIEQISEFSKRVILADANLDKVLSAYNKHRDKPIREQAENIIHLFTLTNLGAPAAFKYFDTTIDRKRYTSTKEVLDATLIHQSITGLYETRIDLSQLGGDGGEAAAKEAAAKGGTAPLEEEYRLFLEAPIQNVTLLEQWKREIPKVWAEINPPGLASTQAPIHVQLLSTALPVRVRQYPITLEAKRSLRETIRKFRAAGILRPVHSPWNTPLLPVRKSGTSEYRMVQDLREVNKRVETIHPTVPNPYTLLSLLPPDRIWYSVLDLKDAFFCIPLAPESQLIFAFEWADAEEGESGQLTWTRLPQGFKNSPTLFDEALNRDLQGFRLDHPSVSLLQYVDDLLIAADTQAACLSATRDLLMTLAELGYRVSGKKAQLCQEEVTYLGFKIHKGSRSLSNSRTQAILQIPVPKTKRQVREFLGTIGYCRLWIPGFAELAQPLYAATRGGNDPLVWGEKEEEAFQSLKLALTQPPALALPSLDKPFQLFVEETSGAAKGVLTQALGPWKRPVAYLSKRLDPVAAGWPRCLRAIAAAALLTREASKLTFGQDIEITSSHNLESLLRSPPDKWLTNARITQYQVLLLDPPRVRFKQTAALNPATLLPETDDTLPIHHCLDTLDSLTSTRPDLTDQPLAQAEATLFTDGSSYIRDGKRYAGAAVVTLDSVIWAEPLPIGTSAQKAELIALTKALEWSKDKSVNIYTDSRYAFATLHVHGMIYRERGLLTAGGKAIKNAPEILALLTAVWLPKRVAVMHCKGHQKDDAPTSTGNRRADEVAREVAIRPLSTQATISAGKRTADGSEFEKRTADGSEFESPKKKAKVE

SEQ ID NO: 11 - protein, 2098 aa, synthetic construct
MPAAKRVKLDGGDKKYSIGLDIGTNSVGWAVITDEYKVPSKKFKVLGNTDRHSIKKNLIGALLFDSGETAEATRLKRTARRRYTRRKNRICYLQEIFSNEMAKVDDSFFHRLEESFLVEEDKKHERHPIFGNIVDEVAYHEKYPTIYHLRKKLVDSTDKADLRLIYLALAHMIKFRGHFLIEGDLNPDNSDVDKLFIQLVQTYNQLFEENPINASGVDAKAILSARLSKSRRLENLIAQLPGEKKNGLFGNLIALSLGLTPNFKSNFDLAEDAKLQLSKDTYDDDLDNLLAQIGDQYADLFLAAKNLSDAILLSDILRVNTEITKAPLSASMIKRYDEHHQDLTLLKALVRQQLPEKYKEIFFDQSKNGYAGYIDGGASQEEFYKFIKPILEKMDGTEELLVKLNREDLLRKQRTFDNGSIPHQIHLGELHAILRRQEDFYPFLKDNREKIEKILTFRIPYYVGPLARGNSRFAWMTRKSEETITPWNFEEVVDKGASAQSFIERMTNFDKNLPNEKVLPKHSLLYEYFTVYNELTKVKYVTEGMRKPAFLSGEQKKAIVDLLFKTNRKVTVKQLKEDYFKKIECFDSVEISGVEDRFNASLGTYHDLLKIIKDKDFLDNEENEDILEDIVLTLTLFEDREMIEERLKTYAHLFDDKVMKQLKRRRYTGWGRLSRKLINGIRDKQSGKTILDFLKSDGFANRNFMQLIHDDSLTFKEDIQKAQVSGQGDSLHEHIANLAGSPAIKKGILQTVKVVDELVKVMGRHKPENIVIEMARENQTTQKGQKNSRERMKRIEEGIKELGSQILKEHPVENTQLQNEKLYLYYLQNGRDMYVDQELDINRLSDYDVDHIVPQSFLKDDSIDNKVLTRSDKARGKSDNVPSEEVVKKMKNYWRQLLNAKLITQRKFDNLTKAERGGLSELDKAGFIKRQLVETRQITKHVAQILDSRMNTKYDENDKLIREVKVITLKSKLVSDFRKDFQFYKVREINNYHHAHDAYLNAVVGTALIKKYPKLESEFVYGDYKVYDVRKMIAKSEQEIGKATAKYFFYSNIMNFFKTEITLANGEIRKRPLIETNGETGEIVWDKGRDFATVRKVLSMPQVNIVKKTEVQTGGFSKESILPKRNSDKLIARKKDWDPKKYGGFDSPTVAYSVLVVAKVEKGKSKKLKSVKELLGITIMERSSFEKNPIDFLEAKGYKEVKKDLIIKLPKYSLFELENGRKRMLASAGELQKGNELALPSKYVNFLYLASHYEKLKGSPEDNEQKQLFVEQHKHYLDEIIEQISEFSKRVILADANLDKVLSAYNKHRDKPIREQAENIIHLFTLTNLGAPAAFKYFDTTIDRKRYTSTKEVLDATLIHQSITGLYETRIDLSQLGGDGGGGSEAAAKPAPGGTAPLEEEYRLFLEAPIQNVTLLEQWKREIPKVWAEINPPGLASTQAPIHVQLLSTALPVRVRQYPITLEAKRSLRETIRKFRAAGILRPVHSPWNTPLLPVRKSGTSEYRMVQDLREVNKRVETIHPTVPNPYTLLSLLPPDRIWYSVLDLKDAFFCIPLAPESQLIFAFEWADAEEGESGQLTWTRLPQGFKNSPTLFDEALNRDLQGFRLDHPSVSLLQYVDDLLIAADTQAACLSATRDLLMTLAELGYRVSGKKAQLCQEEVTYLGFKIHKGSRSLSNSRTQAILQIPVPKTKRQVREFLGTIGYCRLWIPGFAELAQPLYAATRGGNDPLVWGEKEEEAFQSLKLALTQPPALALPSLDKPFQLFVEETSGAAKGVLTQALGPWKRPVAYLSKRLDPVAAGWPRCLRAIAAAALLTREASKLTFGQDIEITSSHNLESLLRSPPDKWLTNARITQYQVLLLDPPRVRFKQTAALNPATLLPETDDTLPIHHCLDTLDSLTSTRPDLTDQPLAQAEATLFTDGSSYIRDGKRYAGAAVVTLDSVIWAEPLPIGTSAQKAELIALTKALEWSKDKSVNIYTDSRYAFATLHVHGMIYRERGLLTAGGKAIKNAPEILALLTAVWLPKRVAVMHCKGHQKDDAPTSTGNRRADEVAREVAIRPLSTQATISAGKRTADGSEFEKRTADGSEFESPKKKAKVE

SEQ ID NO: 12 - protein, 2093 aa, synthetic construct
MPAAKRVKLDGGDKKYSIGLDIGTNSVGWAVITDEYKVPSKKFKVLGNTDRHSIKKNLIGALLFDSGETAEATRLKRTARRRYTRRKNRICYLQEIFSNEMAKVDDSFFHRLEESFLVEEDKKHERHPIFGNIVDEVAYHEKYPTIYHLRKKLVDSTDKADLRLIYLALAHMIKFRGHFLIEGDLNPDNSDVDKLFIQLVQTYNQLFEENPINASGVDAKAILSARLSKSRRLENLIAQLPGEKKNGLFGNLIALSLGLTPNFKSNFDLAEDAKLQLSKDTYDDDLDNLLAQIGDQYADLFLAAKNLSDAILLSDILRVNTEITKAPLSASMIKRYDEHHQDLTLLKALVRQQLPEKYKEIFFDQSKNGYAGYIDGGASQEEFYKFIKPILEKMDGTEELLVKLNREDLLRKQRTFDNGSIPHQIHLGELHAILRRQEDFYPFLKDNREKIEKILTFRIPYYVGPLARGNSRFAWMTRKSEETITPWNFEEVVDKGASAQSFIERMTNFDKNLPNEKVLPKHSLLYEYFTVYNELTKVKYVTEGMRKPAFLSGEQKKAIVDLLFKTNRKVTVKQLKEDYFKKIECFDSVEISGVEDRFNASLGTYHDLLKIIKDKDFLDNEENEDILEDIVLTLTLFEDREMIEERLKTYAHLFDDKVMKQLKRRRYTGWGRLSRKLINGIRDKQSGKTILDFLKSDGFANRNFMQLIHDDSLTFKEDIQKAQVSGQGDSLHEHIANLAGSPAIKKGILQTVKVVDELVKVMGRHKPENIVIEMARENQTTQKGQKNSRERMKRIEEGIKELGSQILKEHPVENTQLQNEKLYLYYLQNGRDMYVDQELDINRLSDYDVDHIVPQSFLKDDSIDNKVLTRSDKARGKSDNVPSEEVVKKMKNYWRQLLNAKLITQRKFDNLTKAERGGLSELDKAGFIKRQLVETRQITKHVAQILDSRMNTKYDENDKLIREVKVITLKSKLVSDFRKDFQFYKVREINNYHHAHDAYLNAVVGTALIKKYPKLESEFVYGDYKVYDVRKMIAKSEQEIGKATAKYFFYSNIMNFFKTEITLANGEIRKRPLIETNGETGEIVWDKGRDFATVRKVLSMPQVNIVKKTEVQTGGFSKESILPKRNSDKLIARKKDWDPKKYGGFDSPTVAYSVLVVAKVEKGKSKKLKSVKELLGITIMERSSFEKNPIDFLEAKGYKEVKKDLIIKLPKYSLFELENGRKRMLASAGELQKGNELALPSKYVNFLYLASHYEKLKGSPEDNEQKQLFVEQHKHYLDEIIEQISEFSKRVILADANLDKVLSAYNKHRDKPIREQAENIIHLFTLTNLGAPAAFKYFDTTIDRKRYTSTKEVLDATLIHQSITGLYETRIDLSQLGGDGGGGSGGGGGTAPLEEEYRLFLEAPIQNVTLLEQWKREIPKVWAEINPPGLASTQAPIHVQLLSTALPVRVRQYPITLEAKRSLRETIRKFRAAGILRPVHSPWNTPLLPVRKSGTSEYRMVQDLREVNKRVETIHPTVPNPYTLLSLLPPDRIWYSVLDLKDAFFCIPLAPESQLIFAFEWADAEEGESGQLTWTRLPQGFKNSPTLFDEALNRDLQGFRLDHPSVSLLQYVDDLLIAADTQAACLSATRDLLMTLAELGYRVSGKKAQLCQEEVTYLGFKIHKGSRSLSNSRTQAILQIPVPKTKRQVREFLGTIGYCRLWIPGFAELAQPLYAATRGGNDPLVWGEKEEEAFQSLKLALTQPPALALPSLDKPFQLFVEETSGAAKGVLTQALGPWKRPVAYLSKRLDPVAAGWPRCLRAIAAAALLTREASKLTFGQDIEITSSHNLESLLRSPPDKWLTNARITQYQVLLLDPPRVRFKQTAALNPATLLPETDDTLPIHHCLDTLDSLTSTRPDLTDQPLAQAEATLFTDGSSYIRDGKRYAGAAVVTLDSVIWAEPLPIGTSAQKAELIALTKALEWSKDKSVNIYTDSRYAFATLHVHGMIYRERGLLTAGGKAIKNAPEILALLTAVWLPKRVAVMHCKGHQKDDAPTSTGNRRADEVAREVAIRPLSTQATISAGKRTADGSEFEKRTADGSEFESPKKKAKVE

SEQ ID NO: 13 - protein, 2103 aa, synthetic construct
MPAAKRVKLDGGDKKYSIGLDIGTNSVGWAVITDEYKVPSKKFKVLGNTDRHSIKKNLIGALLFDSGETAEATRLKRTARRRYTRRKNRICYLQEIFSNEMAKVDDSFFHRLEESFLVEEDKKHERHPIFGNIVDEVAYHEKYPTIYHLRKKLVDSTDKADLRLIYLALAHMIKFRGHFLIEGDLNPDNSDVDKLFIQLVQTYNQLFEENPINASGVDAKAILSARLSKSRRLENLIAQLPGEKKNGLFGNLIALSLGLTPNFKSNFDLAEDAKLQLSKDTYDDDLDNLLAQIGDQYADLFLAAKNLSDAILLSDILRVNTEITKAPLSASMIKRYDEHHQDLTLLKALVRQQLPEKYKEIFFDQSKNGYAGYIDGGASQEEFYKFIKPILEKMDGTEELLVKLNREDLLRKQRTFDNGSIPHQIHLGELHAILRRQEDFYPFLKDNREKIEKILTFRIPYYVGPLARGNSRFAWMTRKSEETITPWNFEEVVDKGASAQSFIERMTNFDKNLPNEKVLPKHSLLYEYFTVYNELTKVKYVTEGMRKPAFLSGEQKKAIVDLLFKTNRKVTVKQLKEDYFKKIECFDSVEISGVEDRFNASLGTYHDLLKIIKDKDFLDNEENEDILEDIVLTLTLFEDREMIEERLKTYAHLFDDKVMKQLKRRRYTGWGRLSRKLINGIRDKQSGKTILDFLKSDGFANRNFMQLIHDDSLTFKEDIQKAQVSGQGDSLHEHIANLAGSPAIKKGILQTVKVVDELVKVMGRHKPENIVIEMARENQTTQKGQKNSRERMKRIEEGIKELGSQILKEHPVENTQLQNEKLYLYYLQNGRDMYVDQELDINRLSDYDVDHIVPQSFLKDDSIDNKVLTRSDKARGKSDNVPSEEVVKKMKNYWRQLLNAKLITQRKFDNLTKAERGGLSELDKAGFIKRQLVETRQITKHVAQILDSRMNTKYDENDKLIREVKVITLKSKLVSDFRKDFQFYKVREINNYHHAHDAYLNAVVGTALIKKYPKLESEFVYGDYKVYDVRKMIAKSEQEIGKATAKYFFYSNIMNFFKTEITLANGEIRKRPLIETNGETGEIVWDKGRDFATVRKVLSMPQVNIVKKTEVQTGGFSKESILPKRNSDKLIARKKDWDPKKYGGFDSPTVAYSVLVVAKVEKGKSKKLKSVKELLGITIMERSSFEKNPIDFLEAKGYKEVKKDLIIKLPKYSLFELENGRKRMLASAGELQKGNELALPSKYVNFLYLASHYEKLKGSPEDNEQKQLFVEQHKHYLDEIIEQISEFSKRVILADANLDKVLSAYNKHRDKPIREQAENIIHLFTLTNLGAPAAFKYFDTTIDRKRYTSTKEVLDATLIHQSITGLYETRIDLSQLGGDGGSGSETPGTSESATPESGGTAPLEEEYRLFLEAPIQNVTLLEQWKREIPKVWAEINPPGLASTQAPIHVQLLSTALPVRVRQYPITLEAKRSLRETIRKFRAAGILRPVHSPWNTPLLPVRKSGTSEYRMVQDLREVNKRVETIHPTVPNPYTLLSLLPPDRIWYSVLDLKDAFFCIPLAPESQLIFAFEWADAEEGESGQLTWTRLPQGFKNSPTLFDEALNRDLQGFRLDHPSVSLLQYVDDLLIAADTQAACLSATRDLLMTLAELGYRVSGKKAQLCQEEVTYLGFKIHKGSRSLSNSRTQAILQIPVPKTKRQVREFLGTIGYCRLWIPGFAELAQPLYAATRGGNDPLVWGEKEEEAFQSLKLALTQPPALALPSLDKPFQLFVEETSGAAKGVLTQALGPWKRPVAYLSKRLDPVAAGWPRCLRAIAAAALLTREASKLTFGQDIEITSSHNLESLLRSPPDKWLTNARITQYQVLLLDPPRVRFKQTAALNPATLLPETDDTLPIHHCLDTLDSLTSTRPDLTDQPLAQAEATLFTDGSSYIRDGKRYAGAAVVTLDSVIWAEPLPIGTSAQKAELIALTKALEWSKDKSVNIYTDSRYAFATLHVHGMIYRERGLLTAGGKAIKNAPEILALLTAVWLPKRVAVMHCKGHQKDDAPTSTGNRRADEVAREVAIRPLSTQATISAGKRTADGSEFEKRTADGSEFESPKKKAKVE

SEQ ID NO: 14 - protein, 2099 aa, synthetic construct
MPAAKRVKLDGGDKKYSIGLDIGTNSVGWAVITDEYKVPSKKFKVLGNTDRHSIKKNLIGALLFDSGETAEATRLKRTARRRYTRRKNRICYLQEIFSNEMAKVDDSFFHRLEESFLVEEDKKHERHPIFGNIVDEVAYHEKYPTIYHLRKKLVDSTDKADLRLIYLALAHMIKFRGHFLIEGDLNPDNSDVDKLFIQLVQTYNQLFEENPINASGVDAKAILSARLSKSRRLENLIAQLPGEKKNGLFGNLIALSLGLTPNFKSNFDLAEDAKLQLSKDTYDDDLDNLLAQIGDQYADLFLAAKNLSDAILLSDILRVNTEITKAPLSASMIKRYDEHHQDLTLLKALVRQQLPEKYKEIFFDQSKNGYAGYIDGGASQEEFYKFIKPILEKMDGTEELLVKLNREDLLRKQRTFDNGSIPHQIHLGELHAILRRQEDFYPFLKDNREKIEKILTFRIPYYVGPLARGNSRFAWMTRKSEETITPWNFEEVVDKGASAQSFIERMTNFDKNLPNEKVLPKHSLLYEYFTVYNELTKVKYVTEGMRKPAFLSGEQKKAIVDLLFKTNRKVTVKQLKEDYFKKIECFDSVEISGVEDRFNASLGTYHDLLKIIKDKDFLDNEENEDILEDIVLTLTLFEDREMIEERLKTYAHLFDDKVMKQLKRRRYTGWGRLSRKLINGIRDKQSGKTILDFLKSDGFANRNFMQLIHDDSLTFKEDIQKAQVSGQGDSLHEHIANLAGSPAIKKGILQTVKVVDELVKVMGRHKPENIVIEMARENQTTQKGQKNSRERMKRIEEGIKELGSQILKEHPVENTQLQNEKLYLYYLQNGRDMYVDQELDINRLSDYDVDHIVPQSFLKDDSIDNKVLTRSDKARGKSDNVPSEEVVKKMKNYWRQLLNAKLITQRKFDNLTKAERGGLSELDKAGFIKRQLVETRQITKHVAQILDSRMNTKYDENDKLIREVKVITLKSKLVSDFRKDFQFYKVREINNYHHAHDAYLNAVVGTALIKKYPKLESEFVYGDYKVYDVRKMIAKSEQEIGKATAKYFFYSNIMNFFKTEITLANGEIRKRPLIETNGETGEIVWDKGRDFATVRKVLSMPQVNIVKKTEVQTGGFSKESILPKRNSDKLIARKKDWDPKKYGGFDSPTVAYSVLVVAKVEKGKSKKLKSVKELLGITIMERSSFEKNPIDFLEAKGYKEVKKDLIIKLPKYSLFELENGRKRMLASAGELQKGNELALPSKYVNFLYLASHYEKLKGSPEDNEQKQLFVEQHKHYLDEIIEQISEFSKRVILADANLDKVLSAYNKHRDKPIREQAENIIHLFTLTNLGAPAAFKYFDTTIDRKRYTSTKEVLDATLIHQSITGLYETRIDLSQLGGDGGGSAGSAAGSGEFGGTAPLEEEYRLFLEAPIQNVTLLEQWKREIPKVWAEINPPGLASTQAPIHVQLLSTALPVRVRQYPITLEAKRSLRETIRKFRAAGILRPVHSPWNTPLLPVRKSGTSEYRMVQDLREVNKRVETIHPTVPNPYTLLSLLPPDRIWYSVLDLKDAFFCIPLAPESQLIFAFEWADAEEGESGQLTWTRLPQGFKNSPTLFDEALNRDLQGFRLDHPSVSLLQYVDDLLIAADTQAACLSATRDLLMTLAELGYRVSGKKAQLCQEEVTYLGFKIHKGSRSLSNSRTQAILQIPVPKTKRQVREFLGTIGYCRLWIPGFAELAQPLYAATRGGNDPLVWGEKEEEAFQSLKLALTQPPALALPSLDKPFQLFVEETSGAAKGVLTQALGPWKRPVAYLSKRLDPVAAGWPRCLRAIAAAALLTREASKLTFGQDIEITSSHNLESLLRSPPDKWLTNARITQYQVLLLDPPRVRFKQTAALNPATLLPETDDTLPIHHCLDTLDSLTSTRPDLTDQPLAQAEATLFTDGSSYIRDGKRYAGAAVVTLDSVIWAEPLPIGTSAQKAELIALTKALEWSKDKSVNIYTDSRYAFATLHVHGMIYRERGLLTAGGKAIKNAPEILALLTAVWLPKRVAVMHCKGHQKDDAPTSTGNRRADEVAREVAIRPLSTQATISAGKRTADGSEFEKRTADGSEFESPKKKAKVE

SEQ ID NO: 15 - protein, 2096 aa, synthetic construct
MPAAKRVKLDGGDKKYSIGLDIGTNSVGWAVITDEYKVPSKKFKVLGNTDRHSIKKNLIGALLFDSGETAEATRLKRTARRRYTRRKNRICYLQEIFSNEMAKVDDSFFHRLEESFLVEEDKKHERHPIFGNIVDEVAYHEKYPTIYHLRKKLVDSTDKADLRLIYLALAHMIKFRGHFLIEGDLNPDNSDVDKLFIQLVQTYNQLFEENPINASGVDAKAILSARLSKSRRLENLIAQLPGEKKNGLFGNLIALSLGLTPNFKSNFDLAEDAKLQLSKDTYDDDLDNLLAQIGDQYADLFLAAKNLSDAILLSDILRVNTEITKAPLSASMIKRYDEHHQDLTLLKALVRQQLPEKYKEIFFDQSKNGYAGYIDGGASQEEFYKFIKPILEKMDGTEELLVKLNREDLLRKQRTFDNGSIPHQIHLGELHAILRRQEDFYPFLKDNREKIEKILTFRIPYYVGPLARGNSRFAWMTRKSEETITPWNFEEVVDKGASAQSFIERMTNFDKNLPNEKVLPKHSLLYEYFTVYNELTKVKYVTEGMRKPAFLSGEQKKAIVDLLFKTNRKVTVKQLKEDYFKKIECFDSVEISGVEDRFNASLGTYHDLLKIIKDKDFLDNEENEDILEDIVLTLTLFEDREMIEERLKTYAHLFDDKVMKQLKRRRYTGWGRLSRKLINGIRDKQSGKTILDFLKSDGFANRNFMQLIHDDSLTFKEDIQKAQVSGQGDSLHEHIANLAGSPAIKKGILQTVKVVDELVKVMGRHKPENIVIEMARENQTTQKGQKNSRERMKRIEEGIKELGSQILKEHPVENTQLQNEKLYLYYLQNGRDMYVDQELDINRLSDYDVDHIVPQSFLKDDSIDNKVLTRSDKARGKSDNVPSEEVVKKMKNYWRQLLNAKLITQRKFDNLTKAERGGLSELDKAGFIKRQLVETRQITKHVAQILDSRMNTKYDENDKLIREVKVITLKSKLVSDFRKDFQFYKVREINNYHHAHDAYLNAVVGTALIKKYPKLESEFVYGDYKVYDVRKMIAKSEQEIGKATAKYFFYSNIMNFFKTEITLANGEIRKRPLIETNGETGEIVWDKGRDFATVRKVLSMPQVNIVKKTEVQTGGFSKESILPKRNSDKLIARKKDWDPKKYGGFDSPTVAYSVLVVAKVEKGKSKKLKSVKELLGITIMERSSFEKNPIDFLEAKGYKEVKKDLIIKLPKYSLFELENGRKRMLASAGELQKGNELALPSKYVNFLYLASHYEKLKGSPEDNEQKQLFVEQHKHYLDEIIEQISEFSKRVILADANLDKVLSAYNKHRDKPIREQAENIIHLFTLTNLGAPAAFKYFDTTIDRKRYTSTKEVLDATLIHQSITGLYETRIDLSQLGGDGGGGGPAPGGSGGTAPLEEEYRLFLEAPIQNVTLLEQWKREIPKVWAEINPPGLASTQAPIHVQLLSTALPVRVRQYPITLEAKRSLRETIRKFRAAGILRPVHSPWNTPLLPVRKSGTSEYRMVQDLREVNKRVETIHPTVPNPYTLLSLLPPDRIWYSVLDLKDAFFCIPLAPESQLIFAFEWADAEEGESGQLTWTRLPQGFKNSPTLFDEALNRDLQGFRLDHPSVSLLQYVDDLLIAADTQAACLSATRDLLMTLAELGYRVSGKKAQLCQEEVTYLGFKIHKGSRSLSNSRTQAILQIPVPKTKRQVREFLGTIGYCRLWIPGFAELAQPLYAATRGGNDPLVWGEKEEEAFQSLKLALTQPPALALPSLDKPFQLFVEETSGAAKGVLTQALGPWKRPVAYLSKRLDPVAAGWPRCLRAIAAAALLTREASKLTFGQDIEITSSHNLESLLRSPPDKWLTNARITQYQVLLLDPPRVRFKQTAALNPATLLPETDDTLPIHHCLDTLDSLTSTRPDLTDQPLAQAEATLFTDGSSYIRDGKRYAGAAVVTLDSVIWAEPLPIGTSAQKAELIALTKALEWSKDKSVNIYTDSRYAFATLHVHGMIYRERGLLTAGGKAIKNAPEILALLTAVWLPKRVAVMHCKGHQKDDAPTSTGNRRADEVAREVAIRPLSTQATISAGKRTADGSEFEKRTADGSEFESPKKKAKVE

SEQ ID NO: 16 - protein, 2098 aa, synthetic construct
MPAAKRVKLDGGDKKYSIGLDIGTNSVGWAVITDEYKVPSKKFKVLGNTDRHSIKKNLIGALLFDSGETAEATRLKRTARRRYTRRKNRICYLQEIFSNEMAKVDDSFFHRLEESFLVEEDKKHERHPIFGNIVDEVAYHEKYPTIYHLRKKLVDSTDKADLRLIYLALAHMIKFRGHFLIEGDLNPDNSDVDKLFIQLVQTYNQLFEENPINASGVDAKAILSARLSKSRRLENLIAQLPGEKKNGLFGNLIALSLGLTPNFKSNFDLAEDAKLQLSKDTYDDDLDNLLAQIGDQYADLFLAAKNLSDAILLSDILRVNTEITKAPLSASMIKRYDEHHQDLTLLKALVRQQLPEKYKEIFFDQSKNGYAGYIDGGASQEEFYKFIKPILEKMDGTEELLVKLNREDLLRKQRTFDNGSIPHQIHLGELHAILRRQEDFYPFLKDNREKIEKILTFRIPYYVGPLARGNSRFAWMTRKSEETITPWNFEEVVDKGASAQSFIERMTNFDKNLPNEKVLPKHSLLYEYFTVYNELTKVKYVTEGMRKPAFLSGEQKKAIVDLLFKTNRKVTVKQLKEDYFKKIECFDSVEISGVEDRFNASLGTYHDLLKIIKDKDFLDNEENEDILEDIVLTLTLFEDREMIEERLKTYAHLFDDKVMKQLKRRRYTGWGRLSRKLINGIRDKQSGKTILDFLKSDGFANRNFMQLIHDDSLTFKEDIQKAQVSGQGDSLHEHIANLAGSPAIKKGILQTVKVVDELVKVMGRHKPENIVIEMARENQTTQKGQKNSRERMKRIEEGIKELGSQILKEHPVENTQLQNEKLYLYYLQNGRDMYVDQELDINRLSDYDVDHIVPQSFLKDDSIDNKVLTRSDKARGKSDNVPSEEVVKKMKNYWRQLLNAKLITQRKFDNLTKAERGGLSELDKAGFIKRQLVETRQITKHVAQILDSRMNTKYDENDKLIREVKVITLKSKLVSDFRKDFQFYKVREINNYHHAHDAYLNAVVGTALIKKYPKLESEFVYGDYKVYDVRKMIAKSEQEIGKATAKYFFYSNIMNFFKTEITLANGEIRKRPLIETNGETGEIVWDKGRDFATVRKVLSMPQVNIVKKTEVQTGGFSKESILPKRNSDKLIARKKDWDPKKYGGFDSPTVAYSVLVVAKVEKGKSKKLKSVKELLGITIMERSSFEKNPIDFLEAKGYKEVKKDLIIKLPKYSLFELENGRKRMLASAGELQKGNELALPSKYVNFLYLASHYEKLKGSPEDNEQKQLFVEQHKHYLDEIIEQISEFSKRVILADANLDKVLSAYNKHRDKPIREQAENIIHLFTLTNLGAPAAFKYFDTTIDRKRYTSTKEVLDATLIHQSITGLYETRIDLSQLGGDGGGSSGGGEAAAKGGTAPLEEEYRLFLEAPIQNVTLLEQWKREIPKVWAEINPPGLASTQAPIHVQLLSTALPVRVRQYPITLEAKRSLRETIRKFRAAGILRPVHSPWNTPLLPVRKSGTSEYRMVQDLREVNKRVETIHPTVPNPYTLLSLLPPDRIWYSVLDLKDAFFCIPLAPESQLIFAFEWADAEEGESGQLTWTRLPQGFKNSPTLFDEALNRDLQGFRLDHPSVSLLQYVDDLLIAADTQAACLSATRDLLMTLAELGYRVSGKKAQLCQEEVTYLGFKIHKGSRSLSNSRTQAILQIPVPKTKRQVREFLGTIGYCRLWIPGFAELAQPLYAATRGGNDPLVWGEKEEEAFQSLKLALTQPPALALPSLDKPFQLFVEETSGAAKGVLTQALGPWKRPVAYLSKRLDPVAAGWPRCLRAIAAAALLTREASKLTFGQDIEITSSHNLESLLRSPPDKWLTNARITQYQVLLLDPPRVRFKQTAALNPATLLPETDDTLPIHHCLDTLDSLTSTRPDLTDQPLAQAEATLFTDGSSYIRDGKRYAGAAVVTLDSVIWAEPLPIGTSAQKAELIALTKALEWSKDKSVNIYTDSRYAFATLHVHGMIYRERGLLTAGGKAIKNAPEILALLTAVWLPKRVAVMHCKGHQKDDAPTSTGNRRADEVAREVAIRPLSTQATISAGKRTADGSEFEKRTADGSEFESPKKKAKVE

SEQ ID NO: 17 - protein, 1998 aa, synthetic construct
MPAAKRVKLDGGDKKYSIGLDIGTNSVGWAVITDEYKVPSKKFKVLGNTDRHSIKKNLIGALLFDSGETAEATRLKRTARRRYTRRKNRICYLQEIFSNEMAKVDDSFFHRLEESFLVEEDKKHERHPIFGNIVDEVAYHEKYPTIYHLRKKLVDSTDKADLRLIYLALAHMIKFRGHFLIEGDLNPDNSDVDKLFIQLVQTYNQLFEENPINASGVDAKAILSARLSKSRRLENLIAQLPGEKKNGLFGNLIALSLGLTPNFKSNFDLAEDAKLQLSKDTYDDDLDNLLAQIGDQYADLFLAAKNLSDAILLSDILRVNTEITKAPLSASMIKRYDEHHQDLTLLKALVRQQLPEKYKEIFFDQSKNGYAGYIDGGASQEEFYKFIKPILEKMDGTEELLVKLNREDLLRKQRTFDNGSIPHQIHLGELHAILRRQEDFYPFLKDNREKIEKILTFRIPYYVGPLARGNSRFAWMTRKSEETITPWNFEEVVDKGASAQSFIERMTNFDKNLPNEKVLPKHSLLYEYFTVYNELTKVKYVTEGMRKPAFLSGEQKKAIVDLLFKTNRKVTVKQLKEDYFKKIECFDSVEISGVEDRFNASLGTYHDLLKIIKDKDFLDNEENEDILEDIVLTLTLFEDREMIEERLKTYAHLFDDKVMKQLKRRRYTGWGRLSRKLINGIRDKQSGKTILDFLKSDGFANRNFMQLIHDDSLTFKEDIQKAQVSGQGDSLHEHIANLAGSPAIKKGILQTVKVVDELVKVMGRHKPENIVIEMARENQTTQKGQKNSRERMKRIEEGIKELGSQILKEHPVENTQLQNEKLYLYYLQNGRDMYVDQELDINRLSDYDVDHIVPQSFLKDDSIDNKVLTRSDKARGKSDNVPSEEVVKKMKNYWRQLLNAKLITQRKFDNLTKAERGGLSELDKAGFIKRQLVETRQITKHVAQILDSRMNTKYDENDKLIREVKVITLKSKLVSDFRKDFQFYKVREINNYHHAHDAYLNAVVGTALIKKYPKLESEFVYGDYKVYDVRKMIAKSEQEIGKATAKYFFYSNIMNFFKTEITLANGEIRKRPLIETNGETGEIVWDKGRDFATVRKVLSMPQVNIVKKTEVQTGGFSKESILPKRNSDKLIARKKDWDPKKYGGFDSPTVAYSVLVVAKVEKGKSKKLKSVKELLGITIMERSSFEKNPIDFLEAKGYKEVKKDLIIKLPKYSLFELENGRKRMLASAGELQKGNELALPSKYVNFLYLASHYEKLKGSPEDNEQKQLFVEQHKHYLDEIIEQISEFSKRVILADANLDKVLSAYNKHRDKPIREQAENIIHLFTLTNLGAPAAFKYFDTTIDRKRYTSTKEVLDATLIHQSITGLYETRIDLSQLGGDGGPAPEAAAKGGGVLDTPPSHIGLEHLPPPPEVPQFPLNLERLQALQDLVHRSLEAGYISPWDGPGNNPVFPVRKPNGAWRFVHDLRATNALTKPIPALSPGPPDLTAIPTHPPHIICLDLKDAFFQIPVEDRFRFYLSFTLPSPGGLQPHRRFAWRVLPQGFINSPALFERALQEPLRQVSAAFSQSLLVSYMDDILYASPTEEQRSQCYQALAARLRDLGFQVASEKTSQTPSPVPFLGQMVHEQIVTYQSLPTLQISSPISLHQLQAVLGDLQWVSRGTPTTRRPLQLLYSSLKRHHDPRAIIQLSPEQLQGIAELRQALSHNARSRYNEQEPLLAYVHLTRAGSTLVLFQKGAQFPLAYFQTPLTDNQASPWGLLLLLGCQYLQTQALSSYAKPILKYYHNLPKTSLDNWIQSSEDPRVQELLQLWPQISSQGIQPPGPWKTLITRAEVFLTPQFSPDPIPAALCLFSDGATGRGAYCLWKDHLLDFQAVPAPESAQKGELAGLLAGLAAAPPEPVNIWVDSKYLYSLLRTLVLGAWLQPDPVPSYALLYKSLLRHPAIVVGHVRSHSSASHPIASLNNYVDQLAGKRTADGSEFEKRTADGSEFESPKKKAKVE

SEQ ID NO: 18 - protein, 2116 aa, synthetic construct
MPAAKRVKLDGGDKKYSIGLDIGTNSVGWAVITDEYKVPSKKFKVLGNTDRHSIKKNLIGALLFDSGETAEATRLKRTARRRYTRRKNRICYLQEIFSNEMAKVDDSFFHRLEESFLVEEDKKHERHPIFGNIVDEVAYHEKYPTIYHLRKKLVDSTDKADLRLIYLALAHMIKFRGHFLIEGDLNPDNSDVDKLFIQLVQTYNQLFEENPINASGVDAKAILSARLSKSRRLENLIAQLPGEKKNGLFGNLIALSLGLTPNFKSNFDLAEDAKLQLSKDTYDDDLDNLLAQIGDQYADLFLAAKNLSDAILLSDILRVNTEITKAPLSASMIKRYDEHHQDLTLLKALVRQQLPEKYKEIFFDQSKNGYAGYIDGGASQEEFYKFIKPILEKMDGTEELLVKLNREDLLRKQRTFDNGSIPHQIHLGELHAILRRQEDFYPFLKDNREKIEKILTFRIPYYVGPLARGNSRFAWMTRKSEETITPWNFEEVVDKGASAQSFIERMTNFDKNLPNEKVLPKHSLLYEYFTVYNELTKVKYVTEGMRKPAFLSGEQKKAIVDLLFKTNRKVTVKQLKEDYFKKIECFDSVEISGVEDRFNASLGTYHDLLKIIKDKDFLDNEENEDILEDIVLTLTLFEDREMIEERLKTYAHLFDDKVMKQLKRRRYTGWGRLSRKLINGIRDKQSGKTILDFLKSDGFANRNFMQLIHDDSLTFKEDIQKAQVSGQGDSLHEHIANLAGSPAIKKGILQTVKVVDELVKVMGRHKPENIVIEMARENQTTQKGQKNSRERMKRIEEGIKELGSQILKEHPVENTQLQNEKLYLYYLQNGRDMYVDQELDINRLSDYDVDHIVPQSFLKDDSIDNKVLTRSDKARGKSDNVPSEEVVKKMKNYWRQLLNAKLITQRKFDNLTKAERGGLSELDKAGFIKRQLVETRQITKHVAQILDSRMNTKYDENDKLIREVKVITLKSKLVSDFRKDFQFYKVREINNYHHAHDAYLNAVVGTALIKKYPKLESEFVYGDYKVYDVRKMIAKSEQEIGKATAKYFFYSNIMNFFKTEITLANGEIRKRPLIETNGETGEIVWDKGRDFATVRKVLSMPQVNIVKKTEVQTGGFSKESILPKRNSDKLIARKKDWDPKKYGGFDSPTVAYSVLVVAKVEKGKSKKLKSVKELLGITIMERSSFEKNPIDFLEAKGYKEVKKDLIIKLPKYSLFELENGRKRMLASAGELQKGNELALPSKYVNFLYLASHYEKLKGSPEDNEQKQLFVEQHKHYLDEIIEQISEFSKRVILADANLDKVLSAYNKHRDKPIREQAENIIHLFTLTNLGAPAAFKYFDTTIDRKRYTSTKEVLDATLIHQSITGLYETRIDLSQLGGDGGEAAAKPAPGGGGGWVQEISDSRPMLHIYLNGRRFLGLLNTGADKTCIAGRDWPANWPIHQTESSLQGLGMACGVARSSQPLRWQHEDKSGIIHPFVIPTLPFTLWGRDIMKDIKVRLMTDSPDDSQDLMIGAIESNLFADQISWKSDQPVWLNQWPLKQEKLQALQQLVTEQLQLGHLEESNSPWNTPVFVIKKKSGKWRLLQDLRAVNATMHDMGALQPGLPSPVAPPKGWEIIIIDLQDCFFNIKLHPEDCKRFAFSVPSPNFKRPYQRFQWKVLPQGMKNSPTLCQKFVDKAILTVRDKYQDSYIVHYMDDILLAHPSRSIVDEILTSMIQALNKHGLVVSTEKIQKYDNLKYLGTHIQGDSVSYQKLQIRTDKLRTLNDFQKLLGNINWIRPFLKLTTGELKPLFEILNPDSNPISTRKLTPEACKALQLMNERLSTARVKRLDLSQPWSLCILKTEYTPTACLWQDGVVEWIHLPHISPKVITPYDIFCTQLIIKGRHRSKELFSKDPDYIVVPYTKVQFDLLLQEKEDWPISLLGFLGEVHFHLPKDPLLTFTLQTAIIFPHMTSTTPLEKGIVIFTDGSANGRSVTYIQGREPIIKENTQNTAQQAEIVAVITAFEEVSQPFNLYTDSKYVTGLFPEIETATLSPRTKIYTELKHLQRLIHKRQEKFYIGHIRGHTGLPGPLAQGNAYADSLTRILTAGKRTADGSEFEKRTADGSEFESPKKKAKVE

SEQ ID NO: 19 - protein, 2114 aa, synthetic construct
MPAAKRVKLDGGDKKYSIGLDIGTNSVGWAVITDEYKVPSKKFKVLGNTDRHSIKKNLIGALLFDSGETAEATRLKRTARRRYTRRKNRICYLQEIFSNEMAKVDDSFFHRLEESFLVEEDKKHERHPIFGNIVDEVAYHEKYPTIYHLRKKLVDSTDKADLRLIYLALAHMIKFRGHFLIEGDLNPDNSDVDKLFIQLVQTYNQLFEENPINASGVDAKAILSARLSKSRRLENLIAQLPGEKKNGLFGNLIALSLGLTPNFKSNFDLAEDAKLQLSKDTYDDDLDNLLAQIGDQYADLFLAAKNLSDAILLSDILRVNTEITKAPLSASMIKRYDEHHQDLTLLKALVRQQLPEKYKEIFFDQSKNGYAGYIDGGASQEEFYKFIKPILEKMDGTEELLVKLNREDLLRKQRTFDNGSIPHQIHLGELHAILRRQEDFYPFLKDNREKIEKILTFRIPYYVGPLARGNSRFAWMTRKSEETITPWNFEEVVDKGASAQSFIERMTNFDKNLPNEKVLPKHSLLYEYFTVYNELTKVKYVTEGMRKPAFLSGEQKKAIVDLLFKTNRKVTVKQLKEDYFKKIECFDSVEISGVEDRFNASLGTYHDLLKIIKDKDFLDNEENEDILEDIVLTLTLFEDREMIEERLKTYAHLFDDKVMKQLKRRRYTGWGRLSRKLINGIRDKQSGKTILDFLKSDGFANRNFMQLIHDDSLTFKEDIQKAQVSGQGDSLHEHIANLAGSPAIKKGILQTVKVVDELVKVMGRHKPENIVIEMARENQTTQKGQKNSRERMKRIEEGIKELGSQILKEHPVENTQLQNEKLYLYYLQNGRDMYVDQELDINRLSDYDVDHIVPQSFLKDDSIDNKVLTRSDKARGKSDNVPSEEVVKKMKNYWRQLLNAKLITQRKFDNLTKAERGGLSELDKAGFIKRQLVETRQITKHVAQILDSRMNTKYDENDKLIREVKVITLKSKLVSDFRKDFQFYKVREINNYHHAHDAYLNAVVGTALIKKYPKLESEFVYGDYKVYDVRKMIAKSEQEIGKATAKYFFYSNIMNFFKTEITLANGEIRKRPLIETNGETGEIVWDKGRDFATVRKVLSMPQVNIVKKTEVQTGGFSKESILPKRNSDKLIARKKDWDPKKYGGFDSPTVAYSVLVVAKVEKGKSKKLKSVKELLGITIMERSSFEKNPIDFLEAKGYKEVKKDLIIKLPKYSLFELENGRKRMLASAGELQKGNELALPSKYVNFLYLASHYEKLKGSPEDNEQKQLFVEQHKHYLDEIIEQISEFSKRVILADANLDKVLSAYNKHRDKPIREQAENIIHLFTLTNLGAPAAFKYFDTTIDRKRYTSTKEVLDATLIHQSITGLYETRIDLSQLGGDGGPAPGGGGGSGGWVQEISDSRPMLHIYLNGRRFLGLLNTGADKTCIAGRDWPANWPIHQTESSLQGLGMACGVARSSQPLRWQHEDKSGIIHPFVIPTLPFTLWGRDIMKDIKVRLMTDSPDDSQDLMIGAIESNLFADQISWKSDQPVWLNQWPLKQEKLQALQQLVTEQLQLGHLEESNSPWNTPVFVIKKKSGKWRLLQDLRAVNATMHDMGALQPGLPSPVAPPKGWEIIIIDLQDCFFNIKLHPEDCKRFAFSVPSPNFKRPYQRFQWKVLPQGMKNSPTLCQKFVDKAILTVRDKYQDSYIVHYMDDILLAHPSRSIVDEILTSMIQALNKHGLVVSTEKIQKYDNLKYLGTHIQGDSVSYQKLQIRTDKLRTLNDFQKLLGNINWIRPFLKLTTGELKPLFEILNPDSNPISTRKLTPEACKALQLMNERLSTARVKRLDLSQPWSLCILKTEYTPTACLWQDGVVEWIHLPHISPKVITPYDIFCTQLIIKGRHRSKELFSKDPDYIVVPYTKVQFDLLLQEKEDWPISLLGFLGEVHFHLPKDPLLTFTLQTAIIFPHMTSTTPLEKGIVIFTDGSANGRSVTYIQGREPIIKENTQNTAQQAEIVAVITAFEEVSQPFNLYTDSKYVTGLFPEIETATLSPRTKIYTELKHLQRLIHKRQEKFYIGHIRGHTGLPGPLAQGNAYADSLTRILTAGKRTADGSEFEKRTADGSEFESPKKKAKVE

SEQ ID NO: 20 - protein, 2114 aa, synthetic construct
MPAAKRVKLDGGDKKYSIGLDIGTNSVGWAVITDEYKVPSKKFKVLGNTDRHSIKKNLIGALLFDSGETAEATRLKRTARRRYTRRKNRICYLQEIFSNEMAKVDDSFFHRLEESFLVEEDKKHERHPIFGNIVDEVAYHEKYPTIYHLRKKLVDSTDKADLRLIYLALAHMIKFRGHFLIEGDLNPDNSDVDKLFIQLVQTYNQLFEENPINASGVDAKAILSARLSKSRRLENLIAQLPGEKKNGLFGNLIALSLGLTPNFKSNFDLAEDAKLQLSKDTYDDDLDNLLAQIGDQYADLFLAAKNLSDAILLSDILRVNTEITKAPLSASMIKRYDEHHQDLTLLKALVRQQLPEKYKEIFFDQSKNGYAGYIDGGASQEEFYKFIKPILEKMDGTEELLVKLNREDLLRKQRTFDNGSIPHQIHLGELHAILRRQEDFYPFLKDNREKIEKILTFRIPYYVGPLARGNSRFAWMTRKSEETITPWNFEEVVDKGASAQSFIERMTNFDKNLPNEKVLPKHSLLYEYFTVYNELTKVKYVTEGMRKPAFLSGEQKKAIVDLLFKTNRKVTVKQLKEDYFKKIECFDSVEISGVEDRFNASLGTYHDLLKIIKDKDFLDNEENEDILEDIVLTLTLFEDREMIEERLKTYAHLFDDKVMKQLKRRRYTGWGRLSRKLINGIRDKQSGKTILDFLKSDGFANRNFMQLIHDDSLTFKEDIQKAQVSGQGDSLHEHIANLAGSPAIKKGILQTVKVVDELVKVMGRHKPENIVIEMARENQTTQKGQKNSRERMKRIEEGIKELGSQILKEHPVENTQLQNEKLYLYYLQNGRDMYVDQELDINRLSDYDVDHIVPQSFLKDDSIDNKVLTRSDKARGKSDNVPSEEVVKKMKNYWRQLLNAKLITQRKFDNLTKAERGGLSELDKAGFIKRQLVETRQITKHVAQILDSRMNTKYDENDKLIREVKVITLKSKLVSDFRKDFQFYKVREINNYHHAHDAYLNAVVGTALIKKYPKLESEFVYGDYKVYDVRKMIAKSEQEIGKATAKYFFYSNIMNFFKTEITLANGEIRKRPLIETNGETGEIVWDKGRDFATVRKVLSMPQVNIVKKTEVQTGGFSKESILPKRNSDKLIARKKDWDPKKYGGFDSPTVAYSVLVVAKVEKGKSKKLKSVKELLGITIMERSSFEKNPIDFLEAKGYKEVKKDLIIKLPKYSLFELENGRKRMLASAGELQKGNELALPSKYVNFLYLASHYEKLKGSPEDNEQKQLFVEQHKHYLDEIIEQISEFSKRVILADANLDKVLSAYNKHRDKPIREQAENIIHLFTLTNLGAPAAFKYFDTTIDRKRYTSTKEVLDATLIHQSITGLYETRIDLSQLGGDGGGGSGSSGGGGGWVQEISDSRPMLHIYLNGRRFLGLLNTGADKTCIAGRDWPANWPIHQTESSLQGLGMACGVARSSQPLRWQHEDKSGIIHPFVIPTLPFTLWGRDIMKDIKVRLMTDSPDDSQDLMIGAIESNLFADQISWKSDQPVWLNQWPLKQEKLQALQQLVTEQLQLGHLEESNSPWNTPVFVIKKKSGKWRLLQDLRAVNATMHDMGALQPGLPSPVAPPKGWEIIIIDLQDCFFNIKLHPEDCKRFAFSVPSPNFKRPYQRFQWKVLPQGMKNSPTLCQKFVDKAILTVRDKYQDSYIVHYMDDILLAHPSRSIVDEILTSMIQALNKHGLVVSTEKIQKYDNLKYLGTHIQGDSVSYQKLQIRTDKLRTLNDFQKLLGNINWIRPFLKLTTGELKPLFEILNPDSNPISTRKLTPEACKALQLMNERLSTARVKRLDLSQPWSLCILKTEYTPTACLWQDGVVEWIHLPHISPKVITPYDIFCTQLIIKGRHRSKELFSKDPDYIVVPYTKVQFDLLLQEKEDWPISLLGFLGEVHFHLPKDPLLTFTLQTAIIFPHMTSTTPLEKGIVIFTDGSANGRSVTYIQGREPIIKENTQNTAQQAEIVAVITAFEEVSQPFNLYTDSKYVTGLFPEIETATLSPRTKIYTELKHLQRLIHKRQEKFYIGHIRGHTGLPGPLAQGNAYADSLTRILTAGKRTADGSEFEKRTADGSEFESPKKKAKVE

SEQ ID NO: 21 - protein, 2116 aa, synthetic construct
MPAAKRVKLDGGDKKYSIGLDIGTNSVGWAVITDEYKVPSKKFKVLGNTDRHSIKKNLIGALLFDSGETAEATRLKRTARRRYTRRKNRICYLQEIFSNEMAKVDDSFFHRLEESFLVEEDKKHERHPIFGNIVDEVAYHEKYPTIYHLRKKLVDSTDKADLRLIYLALAHMIKFRGHFLIEGDLNPDNSDVDKLFIQLVQTYNQLFEENPINASGVDAKAILSARLSKSRRLENLIAQLPGEKKNGLFGNLIALSLGLTPNFKSNFDLAEDAKLQLSKDTYDDDLDNLLAQIGDQYADLFLAAKNLSDAILLSDILRVNTEITKAPLSASMIKRYDEHHQDLTLLKALVRQQLPEKYKEIFFDQSKNGYAGYIDGGASQEEFYKFIKPILEKMDGTEELLVKLNREDLLRKQRTFDNGSIPHQIHLGELHAILRRQEDFYPFLKDNREKIEKILTFRIPYYVGPLARGNSRFAWMTRKSEETITPWNFEEVVDKGASAQSFIERMTNFDKNLPNEKVLPKHSLLYEYFTVYNELTKVKYVTEGMRKPAFLSGEQKKAIVDLLFKTNRKVTVKQLKEDYFKKIECFDSVEISGVEDRFNASLGTYHDLLKIIKDKDFLDNEENEDILEDIVLTLTLFEDREMIEERLKTYAHLFDDKVMKQLKRRRYTGWGRLSRKLINGIRDKQSGKTILDFLKSDGFANRNFMQLIHDDSLTFKEDIQKAQVSGQGDSLHEHIANLAGSPAIKKGILQTVKVVDELVKVMGRHKPENIVIEMARENQTTQKGQKNSRERMKRIEEGIKELGSQILKEHPVENTQLQNEKLYLYYLQNGRDMYVDQELDINRLSDYDVDHIVPQSFLKDDSIDNKVLTRSDKARGKSDNVPSEEVVKKMKNYWRQLLNAKLITQRKFDNLTKAERGGLSELDKAGFIKRQLVETRQITKHVAQILDSRMNTKYDENDKLIREVKVITLKSKLVSDFRKDFQFYKVREINNYHHAHDAYLNAVVGTALIKKYPKLESEFVYGDYKVYDVRKMIAKSEQEIGKATAKYFFYSNIMNFFKTEITLANGEIRKRPLIETNGETGEIVWDKGRDFATVRKVLSMPQVNIVKKTEVQTGGFSKESILPKRNSDKLIARKKDWDPKKYGGFDSPTVAYSVLVVAKVEKGKSKKLKSVKELLGITIMERSSFEKNPIDFLEAKGYKEVKKDLIIKLPKYSLFELENGRKRMLASAGELQKGNELALPSKYVNFLYLASHYEKLKGSPEDNEQKQLFVEQHKHYLDEIIEQISEFSKRVILADANLDKVLSAYNKHRDKPIREQAENIIHLFTLTNLGAPAAFKYFDTTIDRKRYTSTKEVLDATLIHQSITGLYETRIDLSQLGGDGGPAPGGSEAAAKGGVQEISDSRPMLHIYLNGRRFLGLLDTGADKTCIAGRDWPANWPIHQTESSLQGLGMACGVARSSQPLRWQHEDKSGIIHPFVIPTLPFTLWGRDIMKDIKVRLMTDSPDDSQDLMIGAIESNLFADQISWKSDQPVWLNQWPLKQEKLQALQQLVTEQLQLGHLEESNSPWNTPVFVIKKKSGKWRLLQDLRAVNATMHDMGALQPGLPSPPAVPKGWEIIIIDLQDCFFNIKLHPEDCKRFAFSVPSPNFKRPYQRFQWKVLPQGMKNSPTLCQKFVDKAILTVRDKYQDSYIVHYMDDILLAHPSRSIVDEILTSMIQALNKHGLVVSTEKIQKYDNLKYLGTHIQGDSVSYQKLQIRTDKLRTLNDFQKLLGNINWIRPFLKLTTGELKPLFEILNPDSNPISTRKLTPEACKALQLMNERLSTARVKRLDLSQPWSLCILKTEYTPTACLWQDGVVEWIHLPHISPKVITPYDIFCTQLIIKGRHRSKELFSKDPDYIVVPYTKVQFDLLLQEKEDWPISLLGFLGEVHFHLPKDPLLTFTLQTAIIFPHMTSTTPLEKGIVIFTDGSANGRSVTYIQGREPIIKENTQNTAQQAEIVAVITAFEEVSQPFNLYTDSKYVTGLFPEIETATLSPRTKIYTELKHLQRLIHKRQEKFYIGHIRGHTGLPGPLAQGNAYADSLTRILTAAGKRTADGSEFEKRTADGSEFESPKKKAKVE

SEQ ID NO: 22 - protein, 2116 aa, synthetic construct
MPAAKRVKLDGGDKKYSIGLDIGTNSVGWAVITDEYKVPSKKFKVLGNTDRHSIKKNLIGALLFDSGETAEATRLKRTARRRYTRRKNRICYLQEIFSNEMAKVDDSFFHRLEESFLVEEDKKHERHPIFGNIVDEVAYHEKYPTIYHLRKKLVDSTDKADLRLIYLALAHMIKFRGHFLIEGDLNPDNSDVDKLFIQLVQTYNQLFEENPINASGVDAKAILSARLSKSRRLENLIAQLPGEKKNGLFGNLIALSLGLTPNFKSNFDLAEDAKLQLSKDTYDDDLDNLLAQIGDQYADLFLAAKNLSDAILLSDILRVNTEITKAPLSASMIKRYDEHHQDLTLLKALVRQQLPEKYKEIFFDQSKNGYAGYIDGGASQEEFYKFIKPILEKMDGTEELLVKLNREDLLRKQRTFDNGSIPHQIHLGELHAILRRQEDFYPFLKDNREKIEKILTFRIPYYVGPLARGNSRFAWMTRKSEETITPWNFEEVVDKGASAQSFIERMTNFDKNLPNEKVLPKHSLLYEYFTVYNELTKVKYVTEGMRKPAFLSGEQKKAIVDLLFKTNRKVTVKQLKEDYFKKIECFDSVEISGVEDRFNASLGTYHDLLKIIKDKDFLDNEENEDILEDIVLTLTLFEDREMIEERLKTYAHLFDDKVMKQLKRRRYTGWGRLSRKLINGIRDKQSGKTILDFLKSDGFANRNFMQLIHDDSLTFKEDIQKAQVSGQGDSLHEHIANLAGSPAIKKGILQTVKVVDELVKVMGRHKPENIVIEMARENQTTQKGQKNSRERMKRIEEGIKELGSQILKEHPVENTQLQNEKLYLYYLQNGRDMYVDQELDINRLSDYDVDHIVPQSFLKDDSIDNKVLTRSDKARGKSDNVPSEEVVKKMKNYWRQLLNAKLITQRKFDNLTKAERGGLSELDKAGFIKRQLVETRQITKHVAQILDSRMNTKYDENDKLIREVKVITLKSKLVSDFRKDFQFYKVREINNYHHAHDAYLNAVVGTALIKKYPKLESEFVYGDYKVYDVRKMIAKSEQEIGKATAKYFFYSNIMNFFKTEITLANGEIRKRPLIETNGETGEIVWDKGRDFATVRKVLSMPQVNIVKKTEVQTGGFSKESILPKRNSDKLIARKKDWDPKKYGGFDSPTVAYSVLVVAKVEKGKSKKLKSVKELLGITIMERSSFEKNPIDFLEAKGYKEVKKDLIIKLPKYSLFELENGRKRMLASAGELQKGNELALPSKYVNFLYLASHYEKLKGSPEDNEQKQLFVEQHKHYLDEIIEQISEFSKRVILADANLDKVLSAYNKHRDKPIREQAENIIHLFTLTNLGAPAAFKYFDTTIDRKRYTSTKEVLDATLIHQSITGLYETRIDLSQLGGDGGGGSEAAAKGGGGGVQEISDSRPMLHIYLNGRRFLGLLDTGADKTCIAGRDWPANWPIHQTESSLQGLGMACGVARSSQPLRWQHEDKSGIIHPFVIPTLPFTLWGRDIMKDIKVRLMTDSPDDSQDLMIGAIESNLFADQISWKSDQPVWLNQWPLKQEKLQALQQLVTEQLQLGHLEESNSPWNTPVFVIKKKSGKWRLLQDLRAVNATMHDMGALQPGLPSPPAVPKGWEIIIIDLQDCFFNIKLHPEDCKRFAFSVPSPNFKRPYQRFQWKVLPQGMKNSPTLCQKFVDKAILTVRDKYQDSYIVHYMDDILLAHPSRSIVDEILTSMIQALNKHGLVVSTEKIQKYDNLKYLGTHIQGDSVSYQKLQIRTDKLRTLNDFQKLLGNINWIRPFLKLTTGELKPLFEILNPDSNPISTRKLTPEACKALQLMNERLSTARVKRLDLSQPWSLCILKTEYTPTACLWQDGVVEWIHLPHISPKVITPYDIFCTQLIIKGRHRSKELFSKDPDYIVVPYTKVQFDLLLQEKEDWPISLLGFLGEVHFHLPKDPLLTFTLQTAIIFPHMTSTTPLEKGIVIFTDGSANGRSVTYIQGREPIIKENTQNTAQQAEIVAVITAFEEVSQPFNLYTDSKYVTGLFPEIETATLSPRTKIYTELKHLQRLIHKRQEKFYIGHIRGHTGLPGPLAQGNAYADSLTRILTAAGKRTADGSEFEKRTADGSEFESPKKKAKVE

SEQ ID NO: 23 - protein, 2116 aa, synthetic construct
MPAAKRVKLDGGDKKYSIGLDIGTNSVGWAVITDEYKVPSKKFKVLGNTDRHSIKKNLIGALLFDSGETAEATRLKRTARRRYTRRKNRICYLQEIFSNEMAKVDDSFFHRLEESFLVEEDKKHERHPIFGNIVDEVAYHEKYPTIYHLRKKLVDSTDKADLRLIYLALAHMIKFRGHFLIEGDLNPDNSDVDKLFIQLVQTYNQLFEENPINASGVDAKAILSARLSKSRRLENLIAQLPGEKKNGLFGNLIALSLGLTPNFKSNFDLAEDAKLQLSKDTYDDDLDNLLAQIGDQYADLFLAAKNLSDAILLSDILRVNTEITKAPLSASMIKRYDEHHQDLTLLKALVRQQLPEKYKEIFFDQSKNGYAGYIDGGASQEEFYKFIKPILEKMDGTEELLVKLNREDLLRKQRTFDNGSIPHQIHLGELHAILRRQEDFYPFLKDNREKIEKILTFRIPYYVGPLARGNSRFAWMTRKSEETITPWNFEEVVDKGASAQSFIERMTNFDKNLPNEKVLPKHSLLYEYFTVYNELTKVKYVTEGMRKPAFLSGEQKKAIVDLLFKTNRKVTVKQLKEDYFKKIECFDSVEISGVEDRFNASLGTYHDLLKIIKDKDFLDNEENEDILEDIVLTLTLFEDREMIEERLKTYAHLFDDKVMKQLKRRRYTGWGRLSRKLINGIRDKQSGKTILDFLKSDGFANRNFMQLIHDDSLTFKEDIQKAQVSGQGDSLHEHIANLAGSPAIKKGILQTVKVVDELVKVMGRHKPENIVIEMARENQTTQKGQKNSRERMKRIEEGIKELGSQILKEHPVENTQLQNEKLYLYYLQNGRDMYVDQELDINRLSDYDVDHIVPQSFLKDDSIDNKVLTRSDKARGKSDNVPSEEVVKKMKNYWRQLLNAKLITQRKFDNLTKAERGGLSELDKAGFIKRQLVETRQITKHVAQILDSRMNTKYDENDKLIREVKVITLKSKLVSDFRKDFQFYKVREINNYHHAHDAYLNAVVGTALIKKYPKLESEFVYGDYKVYDVRKMIAKSEQEIGKATAKYFFYSNIMNFFKTEITLANGEIRKRPLIETNGETGEIVWDKGRDFATVRKVLSMPQVNIVKKTEVQTGGFSKESILPKRNSDKLIARKKDWDPKKYGGFDSPTVAYSVLVVAKVEKGKSKKLKSVKELLGITIMERSSFEKNPIDFLEAKGYKEVKKDLIIKLPKYSLFELENGRKRMLASAGELQKGNELALPSKYVNFLYLASHYEKLKGSPEDNEQKQLFVEQHKHYLDEIIEQISEFSKRVILADANLDKVLSAYNKHRDKPIREQAENIIHLFTLTNLGAPAAFKYFDTTIDRKRYTSTKEVLDATLIHQSITGLYETRIDLSQLGGDGGGGGGGSEAAAKGGVQEISDSRPMLHIYLNGRRFLGLLDTGADKTCIAGRDWPANWPIHQTESSLQGLGMACGVARSSQPLRWQHEDKSGIIHPFVIPTLPFTLWGRDIMKDIKVRLMTDSPDDSQDLMIGAIESNLFADQISWKSDQPVWLNQWPLKQEKLQALQQLVTEQLQLGHLEESNSPWNTPVFVIKKKSGKWRLLQDLRAVNATMHDMGALQPGLPSPPAVPKGWEIIIIDLQDCFFNIKLHPEDCKRFAFSVPSPNFKRPYQRFQWKVLPQGMKNSPTLCQKFVDKAILTVRDKYQDSYIVHYMDDILLAHPSRSIVDEILTSMIQALNKHGLVVSTEKIQKYDNLKYLGTHIQGDSVSYQKLQIRTDKLRTLNDFQKLLGNINWIRPFLKLTTGELKPLFEILNPDSNPISTRKLTPEACKALQLMNERLSTARVKRLDLSQPWSLCILKTEYTPTACLWQDGVVEWIHLPHISPKVITPYDIFCTQLIIKGRHRSKELFSKDPDYIVVPYTKVQFDLLLQEKEDWPISLLGFLGEVHFHLPKDPLLTFTLQTAIIFPHMTSTTPLEKGIVIFTDGSANGRSVTYIQGREPIIKENTQNTAQQAEIVAVITAFEEVSQPFNLYTDSKYVTGLFPEIETATLSPRTKIYTELKHLQRLIHKRQEKFYIGHIRGHTGLPGPLAQGNAYADSLTRILTAAGKRTADGSEFEKRTADGSEFESPKKKAKVE

SEQ ID NO: 24 - protein, 2116 aa, synthetic construct
MPAAKRVKLDGGDKKYSIGLDIGTNSVGWAVITDEYKVPSKKFKVLGNTDRHSIKKNLIGALLFDSGETAEATRLKRTARRRYTRRKNRICYLQEIFSNEMAKVDDSFFHRLEESFLVEEDKKHERHPIFGNIVDEVAYHEKYPTIYHLRKKLVDSTDKADLRLIYLALAHMIKFRGHFLIEGDLNPDNSDVDKLFIQLVQTYNQLFEENPINASGVDAKAILSARLSKSRRLENLIAQLPGEKKNGLFGNLIALSLGLTPNFKSNFDLAEDAKLQLSKDTYDDDLDNLLAQIGDQYADLFLAAKNLSDAILLSDILRVNTEITKAPLSASMIKRYDEHHQDLTLLKALVRQQLPEKYKEIFFDQSKNGYAGYIDGGASQEEFYKFIKPILEKMDGTEELLVKLNREDLLRKQRTFDNGSIPHQIHLGELHAILRRQEDFYPFLKDNREKIEKILTFRIPYYVGPLARGNSRFAWMTRKSEETITPWNFEEVVDKGASAQSFIERMTNFDKNLPNEKVLPKHSLLYEYFTVYNELTKVKYVTEGMRKPAFLSGEQKKAIVDLLFKTNRKVTVKQLKEDYFKKIECFDSVEISGVEDRFNASLGTYHDLLKIIKDKDFLDNEENEDILEDIVLTLTLFEDREMIEERLKTYAHLFDDKVMKQLKRRRYTGWGRLSRKLINGIRDKQSGKTILDFLKSDGFANRNFMQLIHDDSLTFKEDIQKAQVSGQGDSLHEHIANLAGSPAIKKGILQTVKVVDELVKVMGRHKPENIVIEMARENQTTQKGQKNSRERMKRIEEGIKELGSQILKEHPVENTQLQNEKLYLYYLQNGRDMYVDQELDINRLSDYDVDHIVPQSFLKDDSIDNKVLTRSDKARGKSDNVPSEEVVKKMKNYWRQLLNAKLITQRKFDNLTKAERGGLSELDKAGFIKRQLVETRQITKHVAQILDSRMNTKYDENDKLIREVKVITLKSKLVSDFRKDFQFYKVREINNYHHAHDAYLNAVVGTALIKKYPKLESEFVYGDYKVYDVRKMIAKSEQEIGKATAKYFFYSNIMNFFKTEITLANGEIRKRPLIETNGETGEIVWDKGRDFATVRKVLSMPQVNIVKKTEVQTGGFSKESILPKRNSDKLIARKKDWDPKKYGGFDSPTVAYSVLVVAKVEKGKSKKLKSVKELLGITIMERSSFEKNPIDFLEAKGYKEVKKDLIIKLPKYSLFELENGRKRMLASAGELQKGNELALPSKYVNFLYLASHYEKLKGSPEDNEQKQLFVEQHKHYLDEIIEQISEFSKRVILADANLDKVLSAYNKHRDKPIREQAENIIHLFTLTNLGAPAAFKYFDTTIDRKRYTSTKEVLDATLIHQSITGLYETRIDLSQLGGDGGPAPEAAAKGSSGGVQEISDSRPMLHIYLNGRRFLGLLDTGADKTCIAGRDWPANWPIHQTESSLQGLGMACGVARSSQPLRWQHEDKSGIIHPFVIPTLPFTLWGRDIMKDIKVRLMTDSPDDSQDLMIGAIESNLFADQISWKSDQPVWLNQWPLKQEKLQALQQLVTEQLQLGHLEESNSPWNTPVFVIKKKSGKWRLLQDLRAVNATMHDMGALQPGLPSPPAVPKGWEIIIIDLQDCFFNIKLHPEDCKRFAFSVPSPNFKRPYQRFQWKVLPQGMKNSPTLCQKFVDKAILTVRDKYQDSYIVHYMDDILLAHPSRSIVDEILTSMIQALNKHGLVVSTEKIQKYDNLKYLGTHIQGDSVSYQKLQIRTDKLRTLNDFQKLLGNINWIRPFLKLTTGELKPLFEILNPDSNPISTRKLTPEACKALQLMNERLSTARVKRLDLSQPWSLCILKTEYTPTACLWQDGVVEWIHLPHISPKVITPYDIFCTQLIIKGRHRSKELFSKDPDYIVVPYTKVQFDLLLQEKEDWPISLLGFLGEVHFHLPKDPLLTFTLQTAIIFPHMTSTTPLEKGIVIFTDGSANGRSVTYIQGREPIIKENTQNTAQQAEIVAVITAFEEVSQPFNLYTDSKYVTGLFPEIETATLSPRTKIYTELKHLQRLIHKRQEKFYIGHIRGHTGLPGPLAQGNAYADSLTRILTAAGKRTADGSEFEKRTADGSEFESPKKKAKVE

SEQ ID NO: 25 - protein, 2116 aa, synthetic construct
MPAAKRVKLDGGDKKYSIGLDIGTNSVGWAVITDEYKVPSKKFKVLGNTDRHSIKKNLIGALLFDSGETAEATRLKRTARRRYTRRKNRICYLQEIFSNEMAKVDDSFFHRLEESFLVEEDKKHERHPIFGNIVDEVAYHEKYPTIYHLRKKLVDSTDKADLRLIYLALAHMIKFRGHFLIEGDLNPDNSDVDKLFIQLVQTYNQLFEENPINASGVDAKAILSARLSKSRRLENLIAQLPGEKKNGLFGNLIALSLGLTPNFKSNFDLAEDAKLQLSKDTYDDDLDNLLAQIGDQYADLFLAAKNLSDAILLSDILRVNTEITKAPLSASMIKRYDEHHQDLTLLKALVRQQLPEKYKEIFFDQSKNGYAGYIDGGASQEEFYKFIKPILEKMDGTEELLVKLNREDLLRKQRTFDNGSIPHQIHLGELHAILRRQEDFYPFLKDNREKIEKILTFRIPYYVGPLARGNSRFAWMTRKSEETITPWNFEEVVDKGASAQSFIERMTNFDKNLPNEKVLPKHSLLYEYFTVYNELTKVKYVTEGMRKPAFLSGEQKKAIVDLLFKTNRKVTVKQLKEDYFKKIECFDSVEISGVEDRFNASLGTYHDLLKIIKDKDFLDNEENEDILEDIVLTLTLFEDREMIEERLKTYAHLFDDKVMKQLKRRRYTGWGRLSRKLINGIRDKQSGKTILDFLKSDGFANRNFMQLIHDDSLTFKEDIQKAQVSGQGDSLHEHIANLAGSPAIKKGILQTVKVVDELVKVMGRHKPENIVIEMARENQTTQKGQKNSRERMKRIEEGIKELGSQILKEHPVENTQLQNEKLYLYYLQNGRDMYVDQELDINRLSDYDVDHIVPQSFLKDDSIDNKVLTRSDKARGKSDNVPSEEVVKKMKNYWRQLLNAKLITQRKFDNLTKAERGGLSELDKAGFIKRQLVETRQITKHVAQILDSRMNTKYDENDKLIREVKVITLKSKLVSDFRKDFQFYKVREINNYHHAHDAYLNAVVGTALIKKYPKLESEFVYGDYKVYDVRKMIAKSEQEIGKATAKYFFYSNIMNFFKTEITLANGEIRKRPLIETNGETGEIVWDKGRDFATVRKVLSMPQVNIVKKTEVQTGGFSKESILPKRNSDKLIARKKDWDPKKYGGFDSPTVAYSVLVVAKVEKGKSKKLKSVKELLGITIMERSSFEKNPIDFLEAKGYKEVKKDLIIKLPKYSLFELENGRKRMLASAGELQKGNELALPSKYVNFLYLASHYEKLKGSPEDNEQKQLFVEQHKHYLDEIIEQISEFSKRVILADANLDKVLSAYNKHRDKPIREQAENIIHLFTLTNLGAPAAFKYFDTTIDRKRYTSTKEVLDATLIHQSITGLYETRIDLSQLGGDGGGGSGSSEAAAKGGVQEISDSRPMLHIYLNGRRFLGLLDTGADKTCIAGRDWPANWPIHQTESSLQGLGMACGVARSSQPLRWQHEDKSGIIHPFVIPTLPFTLWGRDIMKDIKVRLMTDSPDDSQDLMIGAIESNLFADQISWKSDQPVWLNQWPLKQEKLQALQQLVTEQLQLGHLEESNSPWNTPVFVIKKKSGKWRLLQDLRAVNATMHDMGALQPGLPSPPAVPKGWEIIIIDLQDCFFNIKLHPEDCKRFAFSVPSPNFKRPYQRFQWKVLPQGMKNSPTLCQKFVDKAILTVRDKYQDSYIVHYMDDILLAHPSRSIVDEILTSMIQALNKHGLVVSTEKIQKYDNLKYLGTHIQGDSVSYQKLQIRTDKLRTLNDFQKLLGNINWIRPFLKLTTGELKPLFEILNPDSNPISTRKLTPEACKALQLMNERLSTARVKRLDLSQPWSLCILKTEYTPTACLWQDGVVEWIHLPHISPKVITPYDIFCTQLIIKGRHRSKELFSKDPDYIVVPYTKVQFDLLLQEKEDWPISLLGFLGEVHFHLPKDPLLTFTLQTAIIFPHMTSTTPLEKGIVIFTDGSANGRSVTYIQGREPIIKENTQNTAQQAEIVAVITAFEEVSQPFNLYTDSKYVTGLFPEIETATLSPRTKIYTELKHLQRLIHKRQEKFYIGHIRGHTGLPGPLAQGNAYADSLTRILTAAGKRTADGSEFEKRTADGSEFESPKKKAKVE

SEQ ID NO: 26 - protein, 2116 aa, synthetic construct
MPAAKRVKLDGGDKKYSIGLDIGTNSVGWAVITDEYKVPSKKFKVLGNTDRHSIKKNLIGALLFDSGETAEATRLKRTARRRYTRRKNRICYLQEIFSNEMAKVDDSFFHRLEESFLVEEDKKHERHPIFGNIVDEVAYHEKYPTIYHLRKKLVDSTDKADLRLIYLALAHMIKFRGHFLIEGDLNPDNSDVDKLFIQLVQTYNQLFEENPINASGVDAKAILSARLSKSRRLENLIAQLPGEKKNGLFGNLIALSLGLTPNFKSNFDLAEDAKLQLSKDTYDDDLDNLLAQIGDQYADLFLAAKNLSDAILLSDILRVNTEITKAPLSASMIKRYDEHHQDLTLLKALVRQQLPEKYKEIFFDQSKNGYAGYIDGGASQEEFYKFIKPILEKMDGTEELLVKLNREDLLRKQRTFDNGSIPHQIHLGELHAILRRQEDFYPFLKDNREKIEKILTFRIPYYVGPLARGNSRFAWMTRKSEETITPWNFEEVVDKGASAQSFIERMTNFDKNLPNEKVLPKHSLLYEYFTVYNELTKVKYVTEGMRKPAFLSGEQKKAIVDLLFKTNRKVTVKQLKEDYFKKIECFDSVEISGVEDRFNASLGTYHDLLKIIKDKDFLDNEENEDILEDIVLTLTLFEDREMIEERLKTYAHLFDDKVMKQLKRRRYTGWGRLSRKLINGIRDKQSGKTILDFLKSDGFANRNFMQLIHDDSLTFKEDIQKAQVSGQGDSLHEHIANLAGSPAIKKGILQTVKVVDELVKVMGRHKPENIVIEMARENQTTQKGQKNSRERMKRIEEGIKELGSQILKEHPVENTQLQNEKLYLYYLQNGRDMYVDQELDINRLSDYDVDHIVPQSFLKDDSIDNKVLTRSDKARGKSDNVPSEEVVKKMKNYWRQLLNAKLITQRKFDNLTKAERGGLSELDKAGFIKRQLVETRQITKHVAQILDSRMNTKYDENDKLIREVKVITLKSKLVSDFRKDFQFYKVREINNYHHAHDAYLNAVVGTALIKKYPKLESEFVYGDYKVYDVRKMIAKSEQEIGKATAKYFFYSNIMNFFKTEITLANGEIRKRPLIETNGETGEIVWDKGRDFATVRKVLSMPQVNIVKKTEVQTGGFSKESILPKRNSDKLIARKKDWDPKKYGGFDSPTVAYSVLVVAKVEKGKSKKLKSVKELLGITIMERSSFEKNPIDFLEAKGYKEVKKDLIIKLPKYSLFELENGRKRMLASAGELQKGNELALPSKYVNFLYLASHYEKLKGSPEDNEQKQLFVEQHKHYLDEIIEQISEFSKRVILADANLDKVLSAYNKHRDKPIREQAENIIHLFTLTNLGAPAAFKYFDTTIDRKRYTSTKEVLDATLIHQSITGLYETRIDLSQLGGDGGEAAAKGGSGSSGGVQEISDSRPMLHIYLNGRRFLGLLDTGADKTCIAGRDWPANWPIHQTESSLQGLGMACGVARSSQPLRWQHEDKSGIIHPFVIPTLPFTLWGRDIMKDIKVRLMTDSPDDSQDLMIGAIESNLFADQISWKSDQPVWLNQWPLKQEKLQALQQLVTEQLQLGHLEESNSPWNTPVFVIKKKSGKWRLLQDLRAVNATMHDMGALQPGLPSPVAVPKGWEIIIIDLQDCFFNIKLHPEDCKRFAFSVPSPNFKRPYQRFQWKVLPQGMKNSPTLCQKFVDKAILTVRDKYQDSYIVHYMDDILLAHPSRSIVDEILTSMIQALNKHGLVVSTEKIQKYDNLKYLGTHIQGDSVSYQKLQIRTDKLRTLNDFQKLLGNINWIRPFLKLTTGELKPLFEILNPDSNPISTRKLTPEACKALQLMNERLSTARVKRLDLSQPWSLCILKTEYTPTACLWQDGVVEWIHLPHISPKVITPYDIFCTQLIIKGRHRSKELFSKDPDYIVVPYTKVQFDLLLQEKEDWPISLLGFLGEVHFHLPKDPLLTFTLQTAIIFPHMTSTTPLEKGIVIFTDGSANGRSVTYIQGREPIIKENTQNTAQQAEIVAVITAFEEVSQPFNLYTDSKYVTGLFPEIETATLSPRTKIYTELKHLQRLIHKRQEKFYIGHIRGHTGLPGPLAQGNAYADSLTRILTAAGKRTADGSEFEKRTADGSEFESPKKKAKVE

SEQ ID NO: 27 - protein, 2116 aa, synthetic construct
MPAAKRVKLDGGDKKYSIGLDIGTNSVGWAVITDEYKVPSKKFKVLGNTDRHSIKKNLIGALLFDSGETAEATRLKRTARRRYTRRKNRICYLQEIFSNEMAKVDDSFFHRLEESFLVEEDKKHERHPIFGNIVDEVAYHEKYPTIYHLRKKLVDSTDKADLRLIYLALAHMIKFRGHFLIEGDLNPDNSDVDKLFIQLVQTYNQLFEENPINASGVDAKAILSARLSKSRRLENLIAQLPGEKKNGLFGNLIALSLGLTPNFKSNFDLAEDAKLQLSKDTYDDDLDNLLAQIGDQYADLFLAAKNLSDAILLSDILRVNTEITKAPLSASMIKRYDEHHQDLTLLKALVRQQLPEKYKEIFFDQSKNGYAGYIDGGASQEEFYKFIKPILEKMDGTEELLVKLNREDLLRKQRTFDNGSIPHQIHLGELHAILRRQEDFYPFLKDNREKIEKILTFRIPYYVGPLARGNSRFAWMTRKSEETITPWNFEEVVDKGASAQSFIERMTNFDKNLPNEKVLPKHSLLYEYFTVYNELTKVKYVTEGMRKPAFLSGEQKKAIVDLLFKTNRKVTVKQLKEDYFKKIECFDSVEISGVEDRFNASLGTYHDLLKIIKDKDFLDNEENEDILEDIVLTLTLFEDREMIEERLKTYAHLFDDKVMKQLKRRRYTGWGRLSRKLINGIRDKQSGKTILDFLKSDGFANRNFMQLIHDDSLTFKEDIQKAQVSGQGDSLHEHIANLAGSPAIKKGILQTVKVVDELVKVMGRHKPENIVIEMARENQTTQKGQKNSRERMKRIEEGIKELGSQILKEHPVENTQLQNEKLYLYYLQNGRDMYVDQELDINRLSDYDVDHIVPQSFLKDDSIDNKVLTRSDKARGKSDNVPSEEVVKKMKNYWRQLLNAKLITQRKFDNLTKAERGGLSELDKAGFIKRQLVETRQITKHVAQILDSRMNTKYDENDKLIREVKVITLKSKLVSDFRKDFQFYKVREINNYHHAHDAYLNAVVGTALIKKYPKLESEFVYGDYKVYDVRKMIAKSEQEIGKATAKYFFYSNIMNFFKTEITLANGEIRKRPLIETNGETGEIVWDKGRDFATVRKVLSMPQVNIVKKTEVQTGGFSKESILPKRNSDKLIARKKDWDPKKYGGFDSPTVAYSVLVVAKVEKGKSKKLKSVKELLGITIMERSSFEKNPIDFLEAKGYKEVKKDLIIKLPKYSLFELENGRKRMLASAGELQKGNELALPSKYVNFLYLASHYEKLKGSPEDNEQKQLFVEQHKHYLDEIIEQISEFSKRVILADANLDKVLSAYNKHRDKPIREQAENIIHLFTLTNLGAPAAFKYFDTTIDRKRYTSTKEVLDATLIHQSITGLYETRIDLSQLGGDGGEAAAKGGGGGSGGVQEISDSRPMLHIYLNGRRFLGLLDTGADKTCIAGRDWPANWPIHQTESSLQGLGMACGVARSSQPLRWQHEDKSGIIHPFVIPTLPFTLWGRDIMKDIKVRLMTDSPDDSQDLMIGAIESNLFADQISWKSDQPVWLNQWPLKQEKLQALQQLVTEQLQLGHLEESNSPWNTPVFVIKKKSGKWRLLQDLRAVNATMHDMGALQPGLPSPVAVPKGWEIIIIDLQDCFFNIKLHPEDCKRFAFSVPSPNFKRPYQRFQWKVLPQGMKNSPTLCQKFVDKAILTVRDKYQDSYIVHYMDDILLAHPSRSIVDEILTSMIQALNKHGLVVSTEKIQKYDNLKYLGTHIQGDSVSYQKLQIRTDKLRTLNDFQKLLGNINWIRPFLKLTTGELKPLFEILNPDSNPISTRKLTPEACKALQLMNERLSTARVKRLDLSQPWSLCILKTEYTPTACLWQDGVVEWIHLPHISPKVITPYDIFCTQLIIKGRHRSKELFSKDPDYIVVPYTKVQFDLLLQEKEDWPISLLGFLGEVHFHLPKDPLLTFTLQTAIIFPHMTSTTPLEKGIVIFTDGSANGRSVTYIQGREPIIKENTQNTAQQAEIVAVITAFEEVSQPFNLYTDSKYVTGLFPEIETATLSPRTKIYTELKHLQRLIHKRQEKFYIGHIRGHTGLPGPLAQGNAYADSLTRILTAAGKRTADGSEFEKRTADGSEFESPKKKAKVE

SEQ ID NO: 28 - protein, 2116 aa, synthetic construct
MPAAKRVKLDGGDKKYSIGLDIGTNSVGWAVITDEYKVPSKKFKVLGNTDRHSIKKNLIGALLFDSGETAEATRLKRTARRRYTRRKNRICYLQEIFSNEMAKVDDSFFHRLEESFLVEEDKKHERHPIFGNIVDEVAYHEKYPTIYHLRKKLVDSTDKADLRLIYLALAHMIKFRGHFLIEGDLNPDNSDVDKLFIQLVQTYNQLFEENPINASGVDAKAILSARLSKSRRLENLIAQLPGEKKNGLFGNLIALSLGLTPNFKSNFDLAEDAKLQLSKDTYDDDLDNLLAQIGDQYADLFLAAKNLSDAILLSDILRVNTEITKAPLSASMIKRYDEHHQDLTLLKALVRQQLPEKYKEIFFDQSKNGYAGYIDGGASQEEFYKFIKPILEKMDGTEELLVKLNREDLLRKQRTFDNGSIPHQIHLGELHAILRRQEDFYPFLKDNREKIEKILTFRIPYYVGPLARGNSRFAWMTRKSEETITPWNFEEVVDKGASAQSFIERMTNFDKNLPNEKVLPKHSLLYEYFTVYNELTKVKYVTEGMRKPAFLSGEQKKAIVDLLFKTNRKVTVKQLKEDYFKKIECFDSVEISGVEDRFNASLGTYHDLLKIIKDKDFLDNEENEDILEDIVLTLTLFEDREMIEERLKTYAHLFDDKVMKQLKRRRYTGWGRLSRKLINGIRDKQSGKTILDFLKSDGFANRNFMQLIHDDSLTFKEDIQKAQVSGQGDSLHEHIANLAGSPAIKKGILQTVKVVDELVKVMGRHKPENIVIEMARENQTTQKGQKNSRERMKRIEEGIKELGSQILKEHPVENTQLQNEKLYLYYLQNGRDMYVDQELDINRLSDYDVDHIVPQSFLKDDSIDNKVLTRSDKARGKSDNVPSEEVVKKMKNYWRQLLNAKLITQRKFDNLTKAERGGLSELDKAGFIKRQLVETRQITKHVAQILDSRMNTKYDENDKLIREVKVITLKSKLVSDFRKDFQFYKVREINNYHHAHDAYLNAVVGTALIKKYPKLESEFVYGDYKVYDVRKMIAKSEQEIGKATAKYFFYSNIMNFFKTEITLANGEIRKRPLIETNGETGEIVWDKGRDFATVRKVLSMPQVNIVKKTEVQTGGFSKESILPKRNSDKLIARKKDWDPKKYGGFDSPTVAYSVLVVAKVEKGKSKKLKSVKELLGITIMERSSFEKNPIDFLEAKGYKEVKKDLIIKLPKYSLFELENGRKRMLASAGELQKGNELALPSKYVNFLYLASHYEKLKGSPEDNEQKQLFVEQHKHYLDEIIEQISEFSKRVILADANLDKVLSAYNKHRDKPIREQAENIIHLFTLTNLGAPAAFKYFDTTIDRKRYTSTKEVLDATLIHQSITGLYETRIDLSQLGGDGGEAAAKPAPGGSGGVQEISDSRPMLHIYLNGRRFLGLLDTGADKTCIAGRDWPANWPIHQTESSLQGLGMACGVARSSQPLRWQHEDKSGIIHPFVIPTLPFTLWGRDIMKDIKVRLMTDSPDDSQDLMIGAIESNLFADQISWKSDQPVWLNQWPLKQEKLQALQQLVTEQLQLGHLEESNSPWNTPVFVIKKKSGKWRLLQDLRAVNATMHDMGALQPGLPSPVAVPKGWEIIIIDLQDCFFNIKLHPEDCKRFAFSVPSPNFKRPYQRFQWKVLPQGMKNSPTLCQKFVDKAILTVRDKYQDSYIVHYMDDILLAHPSRSIVDEILTSMIQALNKHGLVVSTEKIQKYDNLKYLGTHIQGDSVSYQKLQIRTDKLRTLNDFQKLLGNINWIRPFLKLTTGELKPLFEILNPDSNPISTRKLTPEACKALQLMNERLSTARVKRLDLSQPWSLCILKTEYTPTACLWQDGVVEWIHLPHISPKVITPYDIFCTQLIIKGRHRSKELFSKDPDYIVVPYTKVQFDLLLQEKEDWPISLLGFLGEVHFHLPKDPLLTFTLQTAIIFPHMTSTTPLEKGIVIFTDGSANGRSVTYIQGREPIIKENTQNTAQQAEIVAVITAFEEVSQPFNLYTDSKYVTGLFPEIETATLSPRTKIYTELKHLQRLIHKRQEKFYIGHIRGHTGLPGPLAQGNAYADSLTRILTAAGKRTADGSEFEKRTADGSEFESPKKKAKVE

SEQ ID NO: 29 - protein, 2113 aa, synthetic construct
MPAAKRVKLDGGDKKYSIGLDIGTNSVGWAVITDEYKVPSKKFKVLGNTDRHSIKKNLIGALLFDSGETAEATRLKRTARRRYTRRKNRICYLQEIFSNEMAKVDDSFFHRLEESFLVEEDKKHERHPIFGNIVDEVAYHEKYPTIYHLRKKLVDSTDKADLRLIYLALAHMIKFRGHFLIEGDLNPDNSDVDKLFIQLVQTYNQLFEENPINASGVDAKAILSARLSKSRRLENLIAQLPGEKKNGLFGNLIALSLGLTPNFKSNFDLAEDAKLQLSKDTYDDDLDNLLAQIGDQYADLFLAAKNLSDAILLSDILRVNTEITKAPLSASMIKRYDEHHQDLTLLKALVRQQLPEKYKEIFFDQSKNGYAGYIDGGASQEEFYKFIKPILEKMDGTEELLVKLNREDLLRKQRTFDNGSIPHQIHLGELHAILRRQEDFYPFLKDNREKIEKILTFRIPYYVGPLARGNSRFAWMTRKSEETITPWNFEEVVDKGASAQSFIERMTNFDKNLPNEKVLPKHSLLYEYFTVYNELTKVKYVTEGMRKPAFLSGEQKKAIVDLLFKTNRKVTVKQLKEDYFKKIECFDSVEISGVEDRFNASLGTYHDLLKIIKDKDFLDNEENEDILEDIVLTLTLFEDREMIEERLKTYAHLFDDKVMKQLKRRRYTGWGRLSRKLINGIRDKQSGKTILDFLKSDGFANRNFMQLIHDDSLTFKEDIQKAQVSGQGDSLHEHIANLAGSPAIKKGILQTVKVVDELVKVMGRHKPENIVIEMARENQTTQKGQKNSRERMKRIEEGIKELGSQILKEHPVENTQLQNEKLYLYYLQNGRDMYVDQELDINRLSDYDVDHIVPQSFLKDDSIDNKVLTRSDKARGKSDNVPSEEVVKKMKNYWRQLLNAKLITQRKFDNLTKAERGGLSELDKAGFIKRQLVETRQITKHVAQILDSRMNTKYDENDKLIREVKVITLKSKLVSDFRKDFQFYKVREINNYHHAHDAYLNAVVGTALIKKYPKLESEFVYGDYKVYDVRKMIAKSEQEIGKATAKYFFYSNIMNFFKTEITLANGEIRKRPLIETNGETGEIVWDKGRDFATVRKVLSMPQVNIVKKTEVQTGGFSKESILPKRNSDKLIARKKDWDPKKYGGFDSPTVAYSVLVVAKVEKGKSKKLKSVKELLGITIMERSSFEKNPIDFLEAKGYKEVKKDLIIKLPKYSLFELENGRKRMLASAGELQKGNELALPSKYVNFLYLASHYEKLKGSPEDNEQKQLFVEQHKHYLDEIIEQISEFSKRVILADANLDKVLSAYNKHRDKPIREQAENIIHLFTLTNLGAPAAFKYFDTTIDRKRYTSTKEVLDATLIHQSITGLYETRIDLSQLGGDGGGGSEAAAKGGVQEISDSRPMLHIYLNGRRFLGLLDTGADKTCIAGRDWPANWPIHQTESSLQGLGMACGVARSSQPLRWQHEDKSGIIHPFVIPTLPFTLWGRDIMKDIKVRLMTDSPDDSQDLMIGAIESNLFADQISWKSDQPVWLNQWPLKQEKLQALQQLVTEQLQLGHLEESNSPWNTPVFVIKKKSGKWRLLQDLRAVNATMHDMGALQPGLPSPVAVPKGWEIIIIDLQDCFFNIKLHPEDCKRFAFSVPSPNFKRPYQRFQWKVLPQGMKNSPTLCQKFVDKAILTVRDKYQDSYIVHYMDDILLAHPSRSIVDEILTSMIQALNKHGLVVSTEKIQKYDNLKYLGTHIQGDSVSYQKLQIRTDKLRTLNDFQKLLGNINWIRPFLKLTTGELKPLFEILNPDSNPISTRKLTPEACKALQLMNERLSTARVKRLDLSQPWSLCILKTEYTPTACLWQDGVVEWIHLPHISPKVITPYDIFCTQLIIKGRHRSKELFSKDPDYIVVPYTKVQFDLLLQEKEDWPISLLGFLGEVHFHLPKDPLLTFTLQTAIIFPHMTSTTPLEKGIVIFTDGSANGRSVTYIQGREPIIKENTQNTAQQAEIVAVITAFEEVSQPFNLYTDSKYVTGLFPEIETATLSPRTKIYTELKHLQRLIHKRQEKFYIGHIRGHTGLPGPLAQGNAYADSLTRILTAAGKRTADGSEFEKRTADGSEFESPKKKAKVE

SEQ ID NO: 30 - protein, 2111 aa, synthetic construct
MPAAKRVKLDGGDKKYSIGLDIGTNSVGWAVITDEYKVPSKKFKVLGNTDRHSIKKNLIGALLFDSGETAEATRLKRTARRRYTRRKNRICYLQEIFSNEMAKVDDSFFHRLEESFLVEEDKKHERHPIFGNIVDEVAYHEKYPTIYHLRKKLVDSTDKADLRLIYLALAHMIKFRGHFLIEGDLNPDNSDVDKLFIQLVQTYNQLFEENPINASGVDAKAILSARLSKSRRLENLIAQLPGEKKNGLFGNLIALSLGLTPNFKSNFDLAEDAKLQLSKDTYDDDLDNLLAQIGDQYADLFLAAKNLSDAILLSDILRVNTEITKAPLSASMIKRYDEHHQDLTLLKALVRQQLPEKYKEIFFDQSKNGYAGYIDGGASQEEFYKFIKPILEKMDGTEELLVKLNREDLLRKQRTFDNGSIPHQIHLGELHAILRRQEDFYPFLKDNREKIEKILTFRIPYYVGPLARGNSRFAWMTRKSEETITPWNFEEVVDKGASAQSFIERMTNFDKNLPNEKVLPKHSLLYEYFTVYNELTKVKYVTEGMRKPAFLSGEQKKAIVDLLFKTNRKVTVKQLKEDYFKKIECFDSVEISGVEDRFNASLGTYHDLLKIIKDKDFLDNEENEDILEDIVLTLTLFEDREMIEERLKTYAHLFDDKVMKQLKRRRYTGWGRLSRKLINGIRDKQSGKTILDFLKSDGFANRNFMQLIHDDSLTFKEDIQKAQVSGQGDSLHEHIANLAGSPAIKKGILQTVKVVDELVKVMGRHKPENIVIEMARENQTTQKGQKNSRERMKRIEEGIKELGSQILKEHPVENTQLQNEKLYLYYLQNGRDMYVDQELDINRLSDYDVDHIVPQSFLKDDSIDNKVLTRSDKARGKSDNVPSEEVVKKMKNYWRQLLNAKLITQRKFDNLTKAERGGLSELDKAGFIKRQLVETRQITKHVAQILDSRMNTKYDENDKLIREVKVITLKSKLVSDFRKDFQFYKVREINNYHHAHDAYLNAVVGTALIKKYPKLESEFVYGDYKVYDVRKMIAKSEQEIGKATAKYFFYSNIMNFFKTEITLANGEIRKRPLIETNGETGEIVWDKGRDFATVRKVLSMPQVNIVKKTEVQTGGFSKESILPKRNSDKLIARKKDWDPKKYGGFDSPTVAYSVLVVAKVEKGKSKKLKSVKELLGITIMERSSFEKNPIDFLEAKGYKEVKKDLIIKLPKYSLFELENGRKRMLASAGELQKGNELALPSKYVNFLYLASHYEKLKGSPEDNEQKQLFVEQHKHYLDEIIEQISEFSKRVILADANLDKVLSAYNKHRDKPIREQAENIIHLFTLTNLGAPAAFKYFDTTIDRKRYTSTKEVLDATLIHQSITGLYETRIDLSQLGGDGGGSSGGGGGVQEISDSRPMLHIYLNGRRFLGLLDTGADKTCIAGRDWPANWPIHQTESSLQGLGMACGVARSSQPLRWQHEDKSGIIHPFVIPTLPFTLWGRDIMKDIKVRLMTDSPDDSQDLMIGAIESNLFADQISWKSDQPVWLNQWPLKQEKLQALQQLVTEQLQLGHLEESNSPWNTPVFVIKKKSGKWRLLQDLRAVNATMHDMGALQPGLPSPVAVPKGWEIIIIDLQDCFFNIKLHPEDCKRFAFSVPSPNFKRPYQRFQWKVLPQGMKNSPTLCQKFVDKAILTVRDKYQDSYIVHYMDDILLAHPSRSIVDEILTSMIQALNKHGLVVSTEKIQKYDNLKYLGTHIQGDSVSYQKLQIRTDKLRTLNDFQKLLGNINWIRPFLKLTTGELKPLFEILNPDSNPISTRKLTPEACKALQLMNERLSTARVKRLDLSQPWSLCILKTEYTPTACLWQDGVVEWIHLPHISPKVITPYDIFCTQLIIKGRHRSKELFSKDPDYIVVPYTKVQFDLLLQEKEDWPISLLGFLGEVHFHLPKDPLLTFTLQTAIIFPHMTSTTPLEKGIVIFTDGSANGRSVTYIQGREPIIKENTQNTAQQAEIVAVITAFEEVSQPFNLYTDSKYVTGLFPEIETATLSPRTKIYTELKHLQRLIHKRQEKFYIGHIRGHTGLPGPLAQGNAYADSLTRILTAAGKRTADGSEFEKRTADGSEFESPKKKAKVE

SEQ ID NO: 31 - protein, 2114 aa, synthetic construct
MPAAKRVKLDGGDKKYSIGLDIGTNSVGWAVITDEYKVPSKKFKVLGNTDRHSIKKNLIGALLFDSGETAEATRLKRTARRRYTRRKNRICYLQEIFSNEMAKVDDSFFHRLEESFLVEEDKKHERHPIFGNIVDEVAYHEKYPTIYHLRKKLVDSTDKADLRLIYLALAHMIKFRGHFLIEGDLNPDNSDVDKLFIQLVQTYNQLFEENPINASGVDAKAILSARLSKSRRLENLIAQLPGEKKNGLFGNLIALSLGLTPNFKSNFDLAEDAKLQLSKDTYDDDLDNLLAQIGDQYADLFLAAKNLSDAILLSDILRVNTEITKAPLSASMIKRYDEHHQDLTLLKALVRQQLPEKYKEIFFDQSKNGYAGYIDGGASQEEFYKFIKPILEKMDGTEELLVKLNREDLLRKQRTFDNGSIPHQIHLGELHAILRRQEDFYPFLKDNREKIEKILTFRIPYYVGPLARGNSRFAWMTRKSEETITPWNFEEVVDKGASAQSFIERMTNFDKNLPNEKVLPKHSLLYEYFTVYNELTKVKYVTEGMRKPAFLSGEQKKAIVDLLFKTNRKVTVKQLKEDYFKKIECFDSVEISGVEDRFNASLGTYHDLLKIIKDKDFLDNEENEDILEDIVLTLTLFEDREMIEERLKTYAHLFDDKVMKQLKRRRYTGWGRLSRKLINGIRDKQSGKTILDFLKSDGFANRNFMQLIHDDSLTFKEDIQKAQVSGQGDSLHEHIANLAGSPAIKKGILQTVKVVDELVKVMGRHKPENIVIEMARENQTTQKGQKNSRERMKRIEEGIKELGSQILKEHPVENTQLQNEKLYLYYLQNGRDMYVDQELDINRLSDYDVDHIVPQSFLKDDSIDNKVLTRSDKARGKSDNVPSEEVVKKMKNYWRQLLNAKLITQRKFDNLTKAERGGLSELDKAGFIKRQLVETRQITKHVAQILDSRMNTKYDENDKLIREVKVITLKSKLVSDFRKDFQFYKVREINNYHHAHDAYLNAVVGTALIKKYPKLESEFVYGDYKVYDVRKMIAKSEQEIGKATAKYFFYSNIMNFFKTEITLANGEIRKRPLIETNGETGEIVWDKGRDFATVRKVLSMPQVNIVKKTEVQTGGFSKESILPKRNSDKLIARKKDWDPKKYGGFDSPTVAYSVLVVAKVEKGKSKKLKSVKELLGITIMERSSFEKNPIDFLEAKGYKEVKKDLIIKLPKYSLFELENGRKRMLASAGELQKGNELALPSKYVNFLYLASHYEKLKGSPEDNEQKQLFVEQHKHYLDEIIEQISEFSKRVILADANLDKVLSAYNKHRDKPIREQAENIIHLFTLTNLGAPAAFKYFDTTIDRKRYTSTKEVLDATLIHQSITGLYETRIDLSQLGGDGGGGGPAPGSSGGVQEISDSRPMLHIYLNGRRFLGLLDTGADKTCIAGRDWPANWPIHQTESSLQGLGMACGVARSSQPLRWQHEDKSGIIHPFVIPTLPFTLWGRDIMKDIKVRLMTDSPDDSQDLMIGAIESNLFADQISWKSDQPVWLNQWPLKQEKLQALQQLVTEQLQLGHLEESNSPWNTPVFVIKKKSGKWRLLQDLRAVNATMHDMGALQPGLPSPVAVPKGWEIIIIDLQDCFFNIKLHPEDCKRFAFSVPSPNFKRPYQRFQWKVLPQGMKNSPTLCQKFVDKAILTVRDKYQDSYIVHYMDDILLAHPSRSIVDEILTSMIQALNKHGLVVSTEKIQKYDNLKYLGTHIQGDSVSYQKLQIRTDKLRTLNDFQKLLGNINWIRPFLKLTTGELKPLFEILNPDSNPISTRKLTPEACKALQLMNERLSTARVKRLDLSQPWSLCILKTEYTPTACLWQDGVVEWIHLPHISPKVITPYDIFCTQLIIKGRHRSKELFSKDPDYIVVPYTKVQFDLLLQEKEDWPISLLGFLGEVHFHLPKDPLLTFTLQTAIIFPHMTSTTPLEKGIVIFTDGSANGRSVTYIQGREPIIKENTQNTAQQAEIVAVITAFEEVSQPFNLYTDSKYVTGLFPEIETATLSPRTKIYTELKHLQRLIHKRQEKFYIGHIRGHTGLPGPLAQGNAYADSLTRILTAAGKRTADGSEFEKRTADGSEFESPKKKAKVE

SEQ ID NO: 32 - protein, 2010 aa, synthetic construct
MPAAKRVKLDGGDKKYSIGLDIGTNSVGWAVITDEYKVPSKKFKVLGNTDRHSIKKNLIGALLFDSGETAEATRLKRTARRRYTRRKNRICYLQEIFSNEMAKVDDSFFHRLEESFLVEEDKKHERHPIFGNIVDEVAYHEKYPTIYHLRKKLVDSTDKADLRLIYLALAHMIKFRGHFLIEGDLNPDNSDVDKLFIQLVQTYNQLFEENPINASGVDAKAILSARLSKSRRLENLIAQLPGEKKNGLFGNLIALSLGLTPNFKSNFDLAEDAKLQLSKDTYDDDLDNLLAQIGDQYADLFLAAKNLSDAILLSDILRVNTEITKAPLSASMIKRYDEHHQDLTLLKALVRQQLPEKYKEIFFDQSKNGYAGYIDGGASQEEFYKFIKPILEKMDGTEELLVKLNREDLLRKQRTFDNGSIPHQIHLGELHAILRRQEDFYPFLKDNREKIEKILTFRIPYYVGPLARGNSRFAWMTRKSEETITPWNFEEVVDKGASAQSFIERMTNFDKNLPNEKVLPKHSLLYEYFTVYNELTKVKYVTEGMRKPAFLSGEQKKAIVDLLFKTNRKVTVKQLKEDYFKKIECFDSVEISGVEDRFNASLGTYHDLLKIIKDKDFLDNEENEDILEDIVLTLTLFEDREMIEERLKTYAHLFDDKVMKQLKRRRYTGWGRLSRKLINGIRDKQSGKTILDFLKSDGFANRNFMQLIHDDSLTFKEDIQKAQVSGQGDSLHEHIANLAGSPAIKKGILQTVKVVDELVKVMGRHKPENIVIEMARENQTTQKGQKNSRERMKRIEEGIKELGSQILKEHPVENTQLQNEKLYLYYLQNGRDMYVDQELDINRLSDYDVDHIVPQSFLKDDSIDNKVLTRSDKARGKSDNVPSEEVVKKMKNYWRQLLNAKLITQRKFDNLTKAERGGLSELDKAGFIKRQLVETRQITKHVAQILDSRMNTKYDENDKLIREVKVITLKSKLVSDFRKDFQFYKVREINNYHHAHDAYLNAVVGTALIKKYPKLESEFVYGDYKVYDVRKMIAKSEQEIGKATAKYFFYSNIMNFFKTEITLANGEIRKRPLIETNGETGEIVWDKGRDFATVRKVLSMPQVNIVKKTEVQTGGFSKESILPKRNSDKLIARKKDWDPKKYGGFDSPTVAYSVLVVAKVEKGKSKKLKSVKELLGITIMERSSFEKNPIDFLEAKGYKEVKKDLIIKLPKYSLFELENGRKRMLASAGELQKGNELALPSKYVNFLYLASHYEKLKGSPEDNEQKQLFVEQHKHYLDEIIEQISEFSKRVILADANLDKVLSAYNKHRDKPIREQAENIIHLFTLTNLGAPAAFKYFDTTIDRKRYTSTKEVLDATLIHQSITGLYETRIDLSQLGGDGGGGGEAAAKGSSGGLTAAIDILAPQQCAEPITWKSDEPVWVDQWPLTNDKLAAAQQLVQEQLEAGHITESSSPWNTPIFVIKKKSGKWRLLQDLRAVNATMVLMGALQPGLPSPVAIPQGYLKIIIDLKDCFFSIPLHPSDQKRFAFSLPSTNFKEPMQRFQWKVLPQGMANSPTLCQKYVATAIHKVRHAWKQMYIIHYMDDILIAGKDGQQVLQCFDQLKQELTAAGLHIAPEKVQLQDPYTYLGFELNGPKITNQKAVIRKDKLQTLNDFQKLLGDINWLRPYLKLTTGDLKPLFDTLKGDSDPNSHRSLSKEALASLEKVETAIAEQFVTHINYSLPLIFLIFNTALTPTGLFWQDNPIMWIHLPASPKKVLLPYYDAIADLIILGRDHSKKYFGIEPSTIIQPYSKSQIDWLMQNTEMWPIACASFVGILDNHYPPNKLIQFCKLHTFVFPQIISKTPLNNALLVFTDGSSTGMAAYTLTDTTIKFQTNLNSAQLVELQALIAVLSAFPNQPLNIYTDSAYLAHSIPLLETVAQIKHISETAKLFLQCQQLIYNRSIPFYIGHVRAHSGLPGPIAQGNQRADLATKIVASNINTAGKRTADGSEFEKRTADGSEFESPKKKAKVE

SEQ ID NO: 33 - protein, 2008 aa, synthetic construct
MPAAKRVKLDGGDKKYSIGLDIGTNSVGWAVITDEYKVPSKKFKVLGNTDRHSIKKNLIGALLFDSGETAEATRLKRTARRRYTRRKNRICYLQEIFSNEMAKVDDSFFHRLEESFLVEEDKKHERHPIFGNIVDEVAYHEKYPTIYHLRKKLVDSTDKADLRLIYLALAHMIKFRGHFLIEGDLNPDNSDVDKLFIQLVQTYNQLFEENPINASGVDAKAILSARLSKSRRLENLIAQLPGEKKNGLFGNLIALSLGLTPNFKSNFDLAEDAKLQLSKDTYDDDLDNLLAQIGDQYADLFLAAKNLSDAILLSDILRVNTEITKAPLSASMIKRYDEHHQDLTLLKALVRQQLPEKYKEIFFDQSKNGYAGYIDGGASQEEFYKFIKPILEKMDGTEELLVKLNREDLLRKQRTFDNGSIPHQIHLGELHAILRRQEDFYPFLKDNREKIEKILTFRIPYYVGPLARGNSRFAWMTRKSEETITPWNFEEVVDKGASAQSFIERMTNFDKNLPNEKVLPKHSLLYEYFTVYNELTKVKYVTEGMRKPAFLSGEQKKAIVDLLFKTNRKVTVKQLKEDYFKKIECFDSVEISGVEDRFNASLGTYHDLLKIIKDKDFLDNEENEDILEDIVLTLTLFEDREMIEERLKTYAHLFDDKVMKQLKRRRYTGWGRLSRKLINGIRDKQSGKTILDFLKSDGFANRNFMQLIHDDSLTFKEDIQKAQVSGQGDSLHEHIANLAGSPAIKKGILQTVKVVDELVKVMGRHKPENIVIEMARENQTTQKGQKNSRERMKRIEEGIKELGSQILKEHPVENTQLQNEKLYLYYLQNGRDMYVDQELDINRLSDYDVDHIVPQSFLKDDSIDNKVLTRSDKARGKSDNVPSEEVVKKMKNYWRQLLNAKLITQRKFDNLTKAERGGLSELDKAGFIKRQLVETRQITKHVAQILDSRMNTKYDENDKLIREVKVITLKSKLVSDFRKDFQFYKVREINNYHHAHDAYLNAVVGTALIKKYPKLESEFVYGDYKVYDVRKMIAKSEQEIGKATAKYFFYSNIMNFFKTEITLANGEIRKRPLIETNGETGEIVWDKGRDFATVRKVLSMPQVNIVKKTEVQTGGFSKESILPKRNSDKLIARKKDWDPKKYGGFDSPTVAYSVLVVAKVEKGKSKKLKSVKELLGITIMERSSFEKNPIDFLEAKGYKEVKKDLIIKLPKYSLFELENGRKRMLASAGELQKGNELALPSKYVNFLYLASHYEKLKGSPEDNEQKQLFVEQHKHYLDEIIEQISEFSKRVILADANLDKVLSAYNKHRDKPIREQAENIIHLFTLTNLGAPAAFKYFDTTIDRKRYTSTKEVLDATLIHQSITGLYETRIDLSQLGGDGGGSSPAPGGGGGLTAAIDILAPQQCAEPITWKSDEPVWVDQWPLTNDKLAAAQQLVQEQLEAGHITESSSPWNTPIFVIKKKSGKWRLLQDLRAVNATMVLMGALQPGLPSPVAPPQGYLKIIIDLKDCFFSIPLHPSDQKRFAFSLPSTNFKEPMQRFQWKVLPQGMANSPTLCQKYVATAIHKVRHAWKQMYIIHYMDDILIAGKDGQQVLQCFDQLKQELTAAGLHIAPEKVQLQDPYTYLGFELNGPKITNQKAVIRKDKLQTLNDFQKLLGDINWLRPYLKLTTGDLKPLFDTLKPDSDPNSHRSLSKEALASLEKVETAIAEQFVTHINYSLPLIFLIFNTALTPTGLFWQDNPIMWIHLPASPKKVLLPYYDAIADLIILGRDHSKKYFGIEPSTIIQPYSKSQIDWLMQNTEMWPIACASFVGILDNHYPPNKLIQFCKLHTFVFPQIISKTPLNNALLVFTDGSSTGMAAYTLTDTTIKFQTNLNSAQLVELQALIAVLSAFPNQPLNIYTDSAYLAHSIPLLETVAQIKHISETAKLFLQCQQLIYNRSIPFYIGHVRAHSGLPGPIAQGNQRADLATKIVASNINTAGKRTADGSEFEKRTADGSEFESPKKKAKVE

SEQ ID NO: 34 - protein, 2085 aa, synthetic construct
MPAAKRVKLDGGDKKYSIGLDIGTNSVGWAVITDEYKVPSKKFKVLGNTDRHSIKKNLIGALLFDSGETAEATRLKRTARRRYTRRKNRICYLQEIFSNEMAKVDDSFFHRLEESFLVEEDKKHERHPIFGNIVDEVAYHEKYPTIYHLRKKLVDSTDKADLRLIYLALAHMIKFRGHFLIEGDLNPDNSDVDKLFIQLVQTYNQLFEENPINASGVDAKAILSARLSKSRRLENLIAQLPGEKKNGLFGNLIALSLGLTPNFKSNFDLAEDAKLQLSKDTYDDDLDNLLAQIGDQYADLFLAAKNLSDAILLSDILRVNTEITKAPLSASMIKRYDEHHQDLTLLKALVRQQLPEKYKEIFFDQSKNGYAGYIDGGASQEEFYKFIKPILEKMDGTEELLVKLNREDLLRKQRTFDNGSIPHQIHLGELHAILRRQEDFYPFLKDNREKIEKILTFRIPYYVGPLARGNSRFAWMTRKSEETITPWNFEEVVDKGASAQSFIERMTNFDKNLPNEKVLPKHSLLYEYFTVYNELTKVKYVTEGMRKPAFLSGEQKKAIVDLLFKTNRKVTVKQLKEDYFKKIECFDSVEISGVEDRFNASLGTYHDLLKIIKDKDFLDNEENEDILEDIVLTLTLFEDREMIEERLKTYAHLFDDKVMKQLKRRRYTGWGRLSRKLINGIRDKQSGKTILDFLKSDGFANRNFMQLIHDDSLTFKEDIQKAQVSGQGDSLHEHIANLAGSPAIKKGILQTVKVVDELVKVMGRHKPENIVIEMARENQTTQKGQKNSRERMKRIEEGIKELGSQILKEHPVENTQLQNEKLYLYYLQNGRDMYVDQELDINRLSDYDVDHIVPQSFLKDDSIDNKVLTRSDKARGKSDNVPSEEVVKKMKNYWRQLLNAKLITQRKFDNLTKAERGGLSELDKAGFIKRQLVETRQITKHVAQILDSRMNTKYDENDKLIREVKVITLKSKLVSDFRKDFQFYKVREINNYHHAHDAYLNAVVGTALIKKYPKLESEFVYGDYKVYDVRKMIAKSEQEIGKATAKYFFYSNIMNFFKTEITLANGEIRKRPLIETNGETGEIVWDKGRDFATVRKVLSMPQVNIVKKTEVQTGGFSKESILPKRNSDKLIARKKDWDPKKYGGFDSPTVAYSVLVVAKVEKGKSKKLKSVKELLGITIMERSSFEKNPIDFLEAKGYKEVKKDLIIKLPKYSLFELENGRKRMLASAGELQKGNELALPSKYVNFLYLASHYEKLKGSPEDNEQKQLFVEQHKHYLDEIIEQISEFSKRVILADANLDKVLSAYNKHRDKPIREQAENIIHLFTLTNLGAPAAFKYFDTTIDRKRYTSTKEVLDATLIHQSITGLYETRIDLSQLGGDGGEAAAKGSSGGLDDEYRLYSPLVKPDQNIQFWLEQFPQAWAETAGMGLAKQVPPQVIQLKASATPVSVRQYPLSKEAQEGIRPHVQRLIQQGILVPVQSPWNTPLLPVRKPGTNDYRPVQDLREVNKRVQDIHPTVPNPYNLLCALPPQRSWYTVLDLKDAFFCLRLHPTSQPLFAFEWRDPGTGRTGQLTWTRLPQGFKNSPTIFNEALHRDLANFRIQHPQVTLLQYVDDLLLAGATKQDCLEGTKALLLELSDLGYRASAKKAQICRREVTYLGYSLRDGQRWLTEARKKTVVQIPAPTTAKQVREFLGKAGFCRLFIPGFATLAAPLYPLTKPKGEFSWAPEHQKAFDAIKKALLSAPALALPDVTKPFTLYVDERKGVARGVLTQTLGPWRRPVAYLSKKLDPVASGWPVCLKAIAAVAILVKDADKLTLGQNITVIAPHALENIVRQPPDRWMTNARMTHYQSLLLTERVTFAPPAALNPATLLPEETDEPVTHDCHQLLIEETGVRKDLTDIPLTGEVLTWFTDGSSYVVEGKRMAGAAVVDGTRTIWASSLPEGTSAQKAELMALTQALRLAEGKSINIYTDSRYAFATAHVHGAIYKQRGWLTSAGREIKNKEEILSLLEALHLPKRLAIIHCPGHQKAKDPISRGNQMADRVAKQAAQGVNLLPAGKRTADGSEFEKRTADGSEFESPKKKAKVE

SEQ ID NO: 35 - protein, 2088 aa, synthetic construct
MPAAKRVKLDGGDKKYSIGLDIGTNSVGWAVITDEYKVPSKKFKVLGNTDRHSIKKNLIGALLFDSGETAEATRLKRTARRRYTRRKNRICYLQEIFSNEMAKVDDSFFHRLEESFLVEEDKKHERHPIFGNIVDEVAYHEKYPTIYHLRKKLVDSTDKADLRLIYLALAHMIKFRGHFLIEGDLNPDNSDVDKLFIQLVQTYNQLFEENPINASGVDAKAILSARLSKSRRLENLIAQLPGEKKNGLFGNLIALSLGLTPNFKSNFDLAEDAKLQLSKDTYDDDLDNLLAQIGDQYADLFLAAKNLSDAILLSDILRVNTEITKAPLSASMIKRYDEHHQDLTLLKALVRQQLPEKYKEIFFDQSKNGYAGYIDGGASQEEFYKFIKPILEKMDGTEELLVKLNREDLLRKQRTFDNGSIPHQIHLGELHAILRRQEDFYPFLKDNREKIEKILTFRIPYYVGPLARGNSRFAWMTRKSEETITPWNFEEVVDKGASAQSFIERMTNFDKNLPNEKVLPKHSLLYEYFTVYNELTKVKYVTEGMRKPAFLSGEQKKAIVDLLFKTNRKVTVKQLKEDYFKKIECFDSVEISGVEDRFNASLGTYHDLLKIIKDKDFLDNEENEDILEDIVLTLTLFEDREMIEERLKTYAHLFDDKVMKQLKRRRYTGWGRLSRKLINGIRDKQSGKTILDFLKSDGFANRNFMQLIHDDSLTFKEDIQKAQVSGQGDSLHEHIANLAGSPAIKKGILQTVKVVDELVKVMGRHKPENIVIEMARENQTTQKGQKNSRERMKRIEEGIKELGSQILKEHPVENTQLQNEKLYLYYLQNGRDMYVDQELDINRLSDYDVDHIVPQSFLKDDSIDNKVLTRSDKARGKSDNVPSEEVVKKMKNYWRQLLNAKLITQRKFDNLTKAERGGLSELDKAGFIKRQLVETRQITKHVAQILDSRMNTKYDENDKLIREVKVITLKSKLVSDFRKDFQFYKVREINNYHHAHDAYLNAVVGTALIKKYPKLESEFVYGDYKVYDVRKMIAKSEQEIGKATAKYFFYSNIMNFFKTEITLANGEIRKRPLIETNGETGEIVWDKGRDFATVRKVLSMPQVNIVKKTEVQTGGFSKESILPKRNSDKLIARKKDWDPKKYGGFDSPTVAYSVLVVAKVEKGKSKKLKSVKELLGITIMERSSFEKNPIDFLEAKGYKEVKKDLIIKLPKYSLFELENGRKRMLASAGELQKGNELALPSKYVNFLYLASHYEKLKGSPEDNEQKQLFVEQHKHYLDEIIEQISEFSKRVILADANLDKVLSAYNKHRDKPIREQAENIIHLFTLTNLGAPAAFKYFDTTIDRKRYTSTKEVLDATLIHQSITGLYETRIDLSQLGGDGGEAAAKGGSPAPGGLDDEYRLYSPLVKPDQNIQFWLEQFPQAWAETAGMGLAKQVPPQVIQLKASATPVSVRQYPLSKEAQEGIRPHVQRLIQQGILVPVQSPWNTPLLPVRKPGTNDYRPVQDLREVNKRVQDIHPTVPNPYNLLCALPPQRSWYTVLDLKDAFFCLRLHPTSQPLFAFEWRDPGTGRTGQLTWTRLPQGFKNSPTIFNEALHRDLANFRIQHPQVTLLQYVDDLLLAGATKQDCLEGTKALLLELSDLGYRASAKKAQICRREVTYLGYSLRDGQRWLTEARKKTVVQIPAPTTAKQVREFLGKAGFCRLFIPGFATLAAPLYPLTKPKGEFSWAPEHQKAFDAIKKALLSAPALALPDVTKPFTLYVDERKGVARGVLTQTLGPWRRPVAYLSKKLDPVASGWPVCLKAIAAVAILVKDADKLTLGQNITVIAPHALENIVRQPPDRWMTNARMTHYQSLLLTERVTFAPPAALNPATLLPEETDEPVTHDCHQLLIEETGVRKDLTDIPLTGEVLTWFTDGSSYVVEGKRMAGAAVVDGTRTIWASSLPEGTSAQKAELMALTQALRLAEGKSINIYTDSRYAFATAHVHGAIYKQRGWLTSAGREIKNKEEILSLLEALHLPKRLAIIHCPGHQKAKDPISRGNQMADRVAKQAAQGVNLLPAGKRTADGSEFEKRTADGSEFESPKKKAKVE

SEQ ID NO: 36 - protein, 2123 aa, synthetic construct
MPAAKRVKLDGGDKKYSIGLDIGTNSVGWAVITDEYKVPSKKFKVLGNTDRHSIKKNLIGALLFDSGETAEATRLKRTARRRYTRRKNRICYLQEIFSNEMAKVDDSFFHRLEESFLVEEDKKHERHPIFGNIVDEVAYHEKYPTIYHLRKKLVDSTDKADLRLIYLALAHMIKFRGHFLIEGDLNPDNSDVDKLFIQLVQTYNQLFEENPINASGVDAKAILSARLSKSRRLENLIAQLPGEKKNGLFGNLIALSLGLTPNFKSNFDLAEDAKLQLSKDTYDDDLDNLLAQIGDQYADLFLAAKNLSDAILLSDILRVNTEITKAPLSASMIKRYDEHHQDLTLLKALVRQQLPEKYKEIFFDQSKNGYAGYIDGGASQEEFYKFIKPILEKMDGTEELLVKLNREDLLRKQRTFDNGSIPHQIHLGELHAILRRQEDFYPFLKDNREKIEKILTFRIPYYVGPLARGNSRFAWMTRKSEETITPWNFEEVVDKGASAQSFIERMTNFDKNLPNEKVLPKHSLLYEYFTVYNELTKVKYVTEGMRKPAFLSGEQKKAIVDLLFKTNRKVTVKQLKEDYFKKIECFDSVEISGVEDRFNASLGTYHDLLKIIKDKDFLDNEENEDILEDIVLTLTLFEDREMIEERLKTYAHLFDDKVMKQLKRRRYTGWGRLSRKLINGIRDKQSGKTILDFLKSDGFANRNFMQLIHDDSLTFKEDIQKAQVSGQGDSLHEHIANLAGSPAIKKGILQTVKVVDELVKVMGRHKPENIVIEMARENQTTQKGQKNSRERMKRIEEGIKELGSQILKEHPVENTQLQNEKLYLYYLQNGRDMYVDQELDINRLSDYDVDHIVPQSFLKDDSIDNKVLTRSDKARGKSDNVPSEEVVKKMKNYWRQLLNAKLITQRKFDNLTKAERGGLSELDKAGFIKRQLVETRQITKHVAQILDSRMNTKYDENDKLIREVKVITLKSKLVSDFRKDFQFYKVREINNYHHAHDAYLNAVVGTALIKKYPKLESEFVYGDYKVYDVRKMIAKSEQEIGKATAKYFFYSNIMNFFKTEITLANGEIRKRPLIETNGETGEIVWDKGRDFATVRKVLSMPQVNIVKKTEVQTGGFSKESILPKRNSDKLIARKKDWDPKKYGGFDSPTVAYSVLVVAKVEKGKSKKLKSVKELLGITIMERSSFEKNPIDFLEAKGYKEVKKDLIIKLPKYSLFELENGRKRMLASAGELQKGNELALPSKYVNFLYLASHYEKLKGSPEDNEQKQLFVEQHKHYLDEIIEQISEFSKRVILADANLDKVLSAYNKHRDKPIREQAENIIHLFTLTNLGAPAAFKYFDTTIDRKRYTSTKEVLDATLIHQSITGLYETRIDLSQLGGDGGAEAAAKEAAAKEAAAKEAAAKALEAEAAAKEAAAKEAAAKEAAAKAGGLDDEYRLYSPLVKPDQNIQFWLEQFPQAWAETAGMGLAKQVPPQVIQLKASATPVSVRQYPLSKEAQEGIRPHVQRLIQQGILVPVQSPWNTPLLPVRKPGTNDYRPVQDLREVNKRVQDIHPTVPNPYNLLCALPPQRSWYTVLDLKDAFFCLRLHPTSQPLFAFEWRDPGTGRTGQLTWTRLPQGFKNSPTIFNEALHRDLANFRIQHPQVTLLQYVDDLLLAGATKQDCLEGTKALLLELSDLGYRASAKKAQICRREVTYLGYSLRDGQRWLTEARKKTVVQIPAPTTAKQVREFLGKAGFCRLFIPGFATLAAPLYPLTKPKGEFSWAPEHQKAFDAIKKALLSAPALALPDVTKPFTLYVDERKGVARGVLTQTLGPWRRPVAYLSKKLDPVASGWPVCLKAIAAVAILVKDADKLTLGQNITVIAPHALENIVRQPPDRWMTNARMTHYQSLLLTERVTFAPPAALNPATLLPEETDEPVTHDCHQLLIEETGVRKDLTDIPLTGEVLTWFTDGSSYVVEGKRMAGAAVVDGTRTIWASSLPEGTSAQKAELMALTQALRLAEGKSINIYTDSRYAFATAHVHGAIYKQRGWLTSAGREIKNKEEILSLLEALHLPKRLAIIHCPGHQKAKDPISRGNQMADRVAKQAAQGVNLLPAGKRTADGSEFEKRTADGSEFESPKKKAKVE

SEQ ID NO: 37 - protein, 2092 aa, synthetic construct
MPAAKRVKLDGGDKKYSIGLDIGTNSVGWAVITDEYKVPSKKFKVLGNTDRHSIKKNLIGALLFDSGETAEATRLKRTARRRYTRRKNRICYLQEIFSNEMAKVDDSFFHRLEESFLVEEDKKHERHPIFGNIVDEVAYHEKYPTIYHLRKKLVDSTDKADLRLIYLALAHMIKFRGHFLIEGDLNPDNSDVDKLFIQLVQTYNQLFEENPINASGVDAKAILSARLSKSRRLENLIAQLPGEKKNGLFGNLIALSLGLTPNFKSNFDLAEDAKLQLSKDTYDDDLDNLLAQIGDQYADLFLAAKNLSDAILLSDILRVNTEITKAPLSASMIKRYDEHHQDLTLLKALVRQQLPEKYKEIFFDQSKNGYAGYIDGGASQEEFYKFIKPILEKMDGTEELLVKLNREDLLRKQRTFDNGSIPHQIHLGELHAILRRQEDFYPFLKDNREKIEKILTFRIPYYVGPLARGNSRFAWMTRKSEETITPWNFEEVVDKGASAQSFIERMTNFDKNLPNEKVLPKHSLLYEYFTVYNELTKVKYVTEGMRKPAFLSGEQKKAIVDLLFKTNRKVTVKQLKEDYFKKIECFDSVEISGVEDRFNASLGTYHDLLKIIKDKDFLDNEENEDILEDIVLTLTLFEDREMIEERLKTYAHLFDDKVMKQLKRRRYTGWGRLSRKLINGIRDKQSGKTILDFLKSDGFANRNFMQLIHDDSLTFKEDIQKAQVSGQGDSLHEHIANLAGSPAIKKGILQTVKVVDELVKVMGRHKPENIVIEMARENQTTQKGQKNSRERMKRIEEGIKELGSQILKEHPVENTQLQNEKLYLYYLQNGRDMYVDQELDINRLSDYDVDHIVPQSFLKDDSIDNKVLTRSDKARGKSDNVPSEEVVKKMKNYWRQLLNAKLITQRKFDNLTKAERGGLSELDKAGFIKRQLVETRQITKHVAQILDSRMNTKYDENDKLIREVKVITLKSKLVSDFRKDFQFYKVREINNYHHAHDAYLNAVVGTALIKKYPKLESEFVYGDYKVYDVRKMIAKSEQEIGKATAKYFFYSNIMNFFKTEITLANGEIRKRPLIETNGETGEIVWDKGRDFATVRKVLSMPQVNIVKKTEVQTGGFSKESILPKRNSDKLIARKKDWDPKKYGGFDSPTVAYSVLVVAKVEKGKSKKLKSVKELLGITIMERSSFEKNPIDFLEAKGYKEVKKDLIIKLPKYSLFELENGRKRMLASAGELQKGNELALPSKYVNFLYLASHYEKLKGSPEDNEQKQLFVEQHKHYLDEIIEQISEFSKRVILADANLDKVLSAYNKHRDKPIREQAENIIHLFTLTNLGAPAAFKYFDTTIDRKRYTSTKEVLDATLIHQSITGLYETRIDLSQLGGDGGEAAAKEAAAKEAAAKGGLDDEYRLYSPLVKPDQNIQFWLEQFPQAWAETAGMGLAKQVPPQVIQLKASATPVSVRQYPLSKEAQEGIRPHVQRLIQQGILVPVQSPWNTPLLPVRKPGTNDYRPVQDLREVNKRVQDIHPTVPNPYNLLCALPPQRSWYTVLDLKDAFFCLRLHPTSQPLFAFEWRDPGTGRTGQLTWTRLPQGFKNSPTIFNEALHRDLANFRIQHPQVTLLQYVDDLLLAGATKQDCLEGTKALLLELSDLGYRASAKKAQICRREVTYLGYSLRDGQRWLTEARKKTVVQIPAPTTAKQVREFLGKAGFCRLFIPGFATLAAPLYPLTKPKGEFSWAPEHQKAFDAIKKALLSAPALALPDVTKPFTLYVDERKGVARGVLTQTLGPWRRPVAYLSKKLDPVASGWPVCLKAIAAVAILVKDADKLTLGQNITVIAPHALENIVRQPPDRWMTNARMTHYQSLLLTERVTFAPPAALNPATLLPEETDEPVTHDCHQLLIEETGVRKDLTDIPLTGEVLTWFTDGSSYVVEGKRMAGAAVVDGTRTIWASSLPEGTSAQKAELMALTQALRLAEGKSINIYTDSRYAFATAHVHGAIYKQRGWLTSAGREIKNKEEILSLLEALHLPKRLAIIHCPGHQKAKDPISRGNQMADRVAKQAAQGVNLLPAGKRTADGSEFEKRTADGSEFESPKKKAKVE

SEQ ID NO: 38 - protein, 2086 aa, synthetic construct
MPAAKRVKLDGGDKKYSIGLDIGTNSVGWAVITDEYKVPSKKFKVLGNTDRHSIKKNLIGALLFDSGETAEATRLKRTARRRYTRRKNRICYLQEIFSNEMAKVDDSFFHRLEESFLVEEDKKHERHPIFGNIVDEVAYHEKYPTIYHLRKKLVDSTDKADLRLIYLALAHMIKFRGHFLIEGDLNPDNSDVDKLFIQLVQTYNQLFEENPINASGVDAKAILSARLSKSRRLENLIAQLPGEKKNGLFGNLIALSLGLTPNFKSNFDLAEDAKLQLSKDTYDDDLDNLLAQIGDQYADLFLAAKNLSDAILLSDILRVNTEITKAPLSASMIKRYDEHHQDLTLLKALVRQQLPEKYKEIFFDQSKNGYAGYIDGGASQEEFYKFIKPILEKMDGTEELLVKLNREDLLRKQRTFDNGSIPHQIHLGELHAILRRQEDFYPFLKDNREKIEKILTFRIPYYVGPLARGNSRFAWMTRKSEETITPWNFEEVVDKGASAQSFIERMTNFDKNLPNEKVLPKHSLLYEYFTVYNELTKVKYVTEGMRKPAFLSGEQKKAIVDLLFKTNRKVTVKQLKEDYFKKIECFDSVEISGVEDRFNASLGTYHDLLKIIKDKDFLDNEENEDILEDIVLTLTLFEDREMIEERLKTYAHLFDDKVMKQLKRRRYTGWGRLSRKLINGIRDKQSGKTILDFLKSDGFANRNFMQLIHDDSLTFKEDIQKAQVSGQGDSLHEHIANLAGSPAIKKGILQTVKVVDELVKVMGRHKPENIVIEMARENQTTQKGQKNSRERMKRIEEGIKELGSQILKEHPVENTQLQNEKLYLYYLQNGRDMYVDQELDINRLSDYDVDHIVPQSFLKDDSIDNKVLTRSDKARGKSDNVPSEEVVKKMKNYWRQLLNAKLITQRKFDNLTKAERGGLSELDKAGFIKRQLVETRQITKHVAQILDSRMNTKYDENDKLIREVKVITLKSKLVSDFRKDFQFYKVREINNYHHAHDAYLNAVVGTALIKKYPKLESEFVYGDYKVYDVRKMIAKSEQEIGKATAKYFFYSNIMNFFKTEITLANGEIRKRPLIETNGETGEIVWDKGRDFATVRKVLSMPQVNIVKKTEVQTGGFSKESILPKRNSDKLIARKKDWDPKKYGGFDSPTVAYSVLVVAKVEKGKSKKLKSVKELLGITIMERSSFEKNPIDFLEAKGYKEVKKDLIIKLPKYSLFELENGRKRMLASAGELQKGNELALPSKYVNFLYLASHYEKLKGSPEDNEQKQLFVEQHKHYLDEIIEQISEFSKRVILADANLDKVLSAYNKHRDKPIREQAENIIHLFTLTNLGAPAAFKYFDTTIDRKRYTSTKEVLDATLIHQSITGLYETRIDLSQLGGDGGGGSGSSPAPGGLDDEYRLYSPLVKPDQNIQFWLEQFPQAWAETAGMGLAKQVPPQVIQLKASATPVSVRQYPLSKEAQEGIRPHVQRLIQQGILVPVQSPWNTPLLPVRKPGTNDYRPVQDLREVNKRVQDIHPTVPNPYNLLCALPPQRSWYTVLDLKDAFFCLRLHPTSQPLFAFEWRDPGTGRTGQLTWTRLPQGFKNSPTIFNEALHRDLANFRIQHPQVTLLQYVDDLLLAGATKQDCLEGTKALLLELSDLGYRASAKKAQICRREVTYLGYSLRDGQRWLTEARKKTVVQIPAPTTAKQVREFLGKAGFCRLFIPGFATLAAPLYPLTKPKGEFSWAPEHQKAFDAIKKALLSAPALALPDVTKPFTLYVDERKGVARGVLTQTLGPWRRPVAYLSKKLDPVASGWPVCLKAIAAVAILVKDADKLTLGQNITVIAPHALENIVRQPPDRWMTNARMTHYQSLLLTERVTFAPPAALNPATLLPEETDEPVTHDCHQLLIEETGVRKDLTDIPLTGEVLTWFTDGSSYVVEGKRMAGAAVVDGTRTIWASSLPEGTSAQKAELMALTQALRLAEGKSINIYTDSRYAFATAHVHGAIYKQRGWLTSAGREIKNKEEILSLLEALHLPKRLAIIHCPGHQKAKDPISRGNQMADRVAKQAAQGVNLLPAGKRTADGSEFEKRTADGSEFESPKKKAKVE

SEQ ID NO: 39 - protein, 2102 aa, synthetic construct
MPAAKRVKLDGGDKKYSIGLDIGTNSVGWAVITDEYKVPSKKFKVLGNTDRHSIKKNLIGALLFDSGETAEATRLKRTARRRYTRRKNRICYLQEIFSNEMAKVDDSFFHRLEESFLVEEDKKHERHPIFGNIVDEVAYHEKYPTIYHLRKKLVDSTDKADLRLIYLALAHMIKFRGHFLIEGDLNPDNSDVDKLFIQLVQTYNQLFEENPINASGVDAKAILSARLSKSRRLENLIAQLPGEKKNGLFGNLIALSLGLTPNFKSNFDLAEDAKLQLSKDTYDDDLDNLLAQIGDQYADLFLAAKNLSDAILLSDILRVNTEITKAPLSASMIKRYDEHHQDLTLLKALVRQQLPEKYKEIFFDQSKNGYAGYIDGGASQEEFYKFIKPILEKMDGTEELLVKLNREDLLRKQRTFDNGSIPHQIHLGELHAILRRQEDFYPFLKDNREKIEKILTFRIPYYVGPLARGNSRFAWMTRKSEETITPWNFEEVVDKGASAQSFIERMTNFDKNLPNEKVLPKHSLLYEYFTVYNELTKVKYVTEGMRKPAFLSGEQKKAIVDLLFKTNRKVTVKQLKEDYFKKIECFDSVEISGVEDRFNASLGTYHDLLKIIKDKDFLDNEENEDILEDIVLTLTLFEDREMIEERLKTYAHLFDDKVMKQLKRRRYTGWGRLSRKLINGIRDKQSGKTILDFLKSDGFANRNFMQLIHDDSLTFKEDIQKAQVSGQGDSLHEHIANLAGSPAIKKGILQTVKVVDELVKVMGRHKPENIVIEMARENQTTQKGQKNSRERMKRIEEGIKELGSQILKEHPVENTQLQNEKLYLYYLQNGRDMYVDQELDINRLSDYDVDHIVPQSFLKDDSIDNKVLTRSDKARGKSDNVPSEEVVKKMKNYWRQLLNAKLITQRKFDNLTKAERGGLSELDKAGFIKRQLVETRQITKHVAQILDSRMNTKYDENDKLIREVKVITLKSKLVSDFRKDFQFYKVREINNYHHAHDAYLNAVVGTALIKKYPKLESEFVYGDYKVYDVRKMIAKSEQEIGKATAKYFFYSNIMNFFKTEITLANGEIRKRPLIETNGETGEIVWDKGRDFATVRKVLSMPQVNIVKKTEVQTGGFSKESILPKRNSDKLIARKKDWDPKKYGGFDSPTVAYSVLVVAKVEKGKSKKLKSVKELLGITIMERSSFEKNPIDFLEAKGYKEVKKDLIIKLPKYSLFELENGRKRMLASAGELQKGNELALPSKYVNFLYLASHYEKLKGSPEDNEQKQLFVEQHKHYLDEIIEQISEFSKRVILADANLDKVLSAYNKHRDKPIREQAENIIHLFTLTNLGAPAAFKYFDTTIDRKRYTSTKEVLDATLIHQSITGLYETRIDLSQLGGDGGEAAAKEAAAKEAAAKEAAAKEAAAKGGLDDEYRLYSPLVKPDQNIQFWLEQFPQAWAETAGMGLAKQVPPQVIQLKASATPVSVRQYPLSKEAQEGIRPHVQRLIQQGILVPVQSPWNTPLLPVRKPGTNDYRPVQDLREVNKRVQDIHPTVPNPYNLLCALPPQRSWYTVLDLKDAFFCLRLHPTSQPLFAFEWRDPGTGRTGQLTWTRLPQGFKNSPTIFNEALHRDLANFRIQHPQVTLLQYVDDLLLAGATKQDCLEGTKALLLELSDLGYRASAKKAQICRREVTYLGYSLRDGQRWLTEARKKTVVQIPAPTTAKQVREFLGKAGFCRLFIPGFATLAAPLYPLTKPKGEFSWAPEHQKAFDAIKKALLSAPALALPDVTKPFTLYVDERKGVARGVLTQTLGPWRRPVAYLSKKLDPVASGWPVCLKAIAAVAILVKDADKLTLGQNITVIAPHALENIVRQPPDRWMTNARMTHYQSLLLTERVTFAPPAALNPATLLPEETDEPVTHDCHQLLIEETGVRKDLTDIPLTGEVLTWFTDGSSYVVEGKRMAGAAVVDGTRTIWASSLPEGTSAQKAELMALTQALRLAEGKSINIYTDSRYAFATAHVHGAIYKQRGWLTSAGREIKNKEEILSLLEALHLPKRLAIIHCPGHQKAKDPISRGNQMADRVAKQAAQGVNLLPAGKRTADGSEFEKRTADGSEFESPKKKAKVE

SEQ ID NO: 40 - protein, 2088 aa, synthetic construct
MPAAKRVKLDGGDKKYSIGLDIGTNSVGWAVITDEYKVPSKKFKVLGNTDRHSIKKNLIGALLFDSGETAEATRLKRTARRRYTRRKNRICYLQEIFSNEMAKVDDSFFHRLEESFLVEEDKKHERHPIFGNIVDEVAYHEKYPTIYHLRKKLVDSTDKADLRLIYLALAHMIKFRGHFLIEGDLNPDNSDVDKLFIQLVQTYNQLFEENPINASGVDAKAILSARLSKSRRLENLIAQLPGEKKNGLFGNLIALSLGLTPNFKSNFDLAEDAKLQLSKDTYDDDLDNLLAQIGDQYADLFLAAKNLSDAILLSDILRVNTEITKAPLSASMIKRYDEHHQDLTLLKALVRQQLPEKYKEIFFDQSKNGYAGYIDGGASQEEFYKFIKPILEKMDGTEELLVKLNREDLLRKQRTFDNGSIPHQIHLGELHAILRRQEDFYPFLKDNREKIEKILTFRIPYYVGPLARGNSRFAWMTRKSEETITPWNFEEVVDKGASAQSFIERMTNFDKNLPNEKVLPKHSLLYEYFTVYNELTKVKYVTEGMRKPAFLSGEQKKAIVDLLFKTNRKVTVKQLKEDYFKKIECFDSVEISGVEDRFNASLGTYHDLLKIIKDKDFLDNEENEDILEDIVLTLTLFEDREMIEERLKTYAHLFDDKVMKQLKRRRYTGWGRLSRKLINGIRDKQSGKTILDFLKSDGFANRNFMQLIHDDSLTFKEDIQKAQVSGQGDSLHEHIANLAGSPAIKKGILQTVKVVDELVKVMGRHKPENIVIEMARENQTTQKGQKNSRERMKRIEEGIKELGSQILKEHPVENTQLQNEKLYLYYLQNGRDMYVDQELDINRLSDYDVDHIVPQSFLKDDSIDNKVLTRSDKARGKSDNVPSEEVVKKMKNYWRQLLNAKLITQRKFDNLTKAERGGLSELDKAGFIKRQLVETRQITKHVAQILDSRMNTKYDENDKLIREVKVITLKSKLVSDFRKDFQFYKVREINNYHHAHDAYLNAVVGTALIKKYPKLESEFVYGDYKVYDVRKMIAKSEQEIGKATAKYFFYSNIMNFFKTEITLANGEIRKRPLIETNGETGEIVWDKGRDFATVRKVLSMPQVNIVKKTEVQTGGFSKESILPKRNSDKLIARKKDWDPKKYGGFDSPTVAYSVLVVAKVEKGKSKKLKSVKELLGITIMERSSFEKNPIDFLEAKGYKEVKKDLIIKLPKYSLFELENGRKRMLASAGELQKGNELALPSKYVNFLYLASHYEKLKGSPEDNEQKQLFVEQHKHYLDEIIEQISEFSKRVILADANLDKVLSAYNKHRDKPIREQAENIIHLFTLTNLGAPAAFKYFDTTIDRKRYTSTKEVLDATLIHQSITGLYETRIDLSQLGGDGGGSSGGGEAAAKGGLDDEYRLYSPLVKPDQNIQFWLEQFPQAWAETAGMGLAKQVPPQVIQLKASATPVSVRQYPLSKEAQEGIRPHVQRLIQQGILVPVQSPWNTPLLPVRKPGTNDYRPVQDLREVNKRVQDIHPTVPNPYNLLCALPPQRSWYTVLDLKDAFFCLRLHPTSQPLFAFEWRDPGTGRTGQLTWTRLPQGFKNSPTIFNEALHRDLANFRIQHPQVTLLQYVDDLLLAGATKQDCLEGTKALLLELSDLGYRASAKKAQICRREVTYLGYSLRDGQRWLTEARKKTVVQIPAPTTAKQVREFLGKAGFCRLFIPGFATLAAPLYPLTKPKGEFSWAPEHQKAFDAIKKALLSAPALALPDVTKPFTLYVDERKGVARGVLTQTLGPWRRPVAYLSKKLDPVASGWPVCLKAIAAVAILVKDADKLTLGQNITVIAPHALENIVRQPPDRWMTNARMTHYQSLLLTERVTFAPPAALNPATLLPEETDEPVTHDCHQLLIEETGVRKDLTDIPLTGEVLTWFTDGSSYVVEGKRMAGAAVVDGTRTIWASSLPEGTSAQKAELMALTQALRLAEGKSINIYTDSRYAFATAHVHGAIYKQRGWLTSAGREIKNKEEILSLLEALHLPKRLAIIHCPGHQKAKDPISRGNQMADRVAKQAAQGVNLLPAGKRTADGSEFEKRTADGSEFESPKKKAKVE

SEQ ID NO: 41 - protein, 2089 aa, synthetic construct
MPAAKRVKLDGGDKKYSIGLDIGTNSVGWAVITDEYKVPSKKFKVLGNTDRHSIKKNLIGALLFDSGETAEATRLKRTARRRYTRRKNRICYLQEIFSNEMAKVDDSFFHRLEESFLVEEDKKHERHPIFGNIVDEVAYHEKYPTIYHLRKKLVDSTDKADLRLIYLALAHMIKFRGHFLIEGDLNPDNSDVDKLFIQLVQTYNQLFEENPINASGVDAKAILSARLSKSRRLENLIAQLPGEKKNGLFGNLIALSLGLTPNFKSNFDLAEDAKLQLSKDTYDDDLDNLLAQIGDQYADLFLAAKNLSDAILLSDILRVNTEITKAPLSASMIKRYDEHHQDLTLLKALVRQQLPEKYKEIFFDQSKNGYAGYIDGGASQEEFYKFIKPILEKMDGTEELLVKLNREDLLRKQRTFDNGSIPHQIHLGELHAILRRQEDFYPFLKDNREKIEKILTFRIPYYVGPLARGNSRFAWMTRKSEETITPWNFEEVVDKGASAQSFIERMTNFDKNLPNEKVLPKHSLLYEYFTVYNELTKVKYVTEGMRKPAFLSGEQKKAIVDLLFKTNRKVTVKQLKEDYFKKIECFDSVEISGVEDRFNASLGTYHDLLKIIKDKDFLDNEENEDILEDIVLTLTLFEDREMIEERLKTYAHLFDDKVMKQLKRRRYTGWGRLSRKLINGIRDKQSGKTILDFLKSDGFANRNFMQLIHDDSLTFKEDIQKAQVSGQGDSLHEHIANLAGSPAIKKGILQTVKVVDELVKVMGRHKPENIVIEMARENQTTQKGQKNSRERMKRIEEGIKELGSQILKEHPVENTQLQNEKLYLYYLQNGRDMYVDQELDINRLSDYDVDHIVPQSFLKDDSIDNKVLTRSDKARGKSDNVPSEEVVKKMKNYWRQLLNAKLITQRKFDNLTKAERGGLSELDKAGFIKRQLVETRQITKHVAQILDSRMNTKYDENDKLIREVKVITLKSKLVSDFRKDFQFYKVREINNYHHAHDAYLNAVVGTALIKKYPKLESEFVYGDYKVYDVRKMIAKSEQEIGKATAKYFFYSNIMNFFKTEITLANGEIRKRPLIETNGETGEIVWDKGRDFATVRKVLSMPQVNIVKKTEVQTGGFSKESILPKRNSDKLIARKKDWDPKKYGGFDSPTVAYSVLVVAKVEKGKSKKLKSVKELLGITIMERSSFEKNPIDFLEAKGYKEVKKDLIIKLPKYSLFELENGRKRMLASAGELQKGNELALPSKYVNFLYLASHYEKLKGSPEDNEQKQLFVEQHKHYLDEIIEQISEFSKRVILADANLDKVLSAYNKHRDKPIREQAENIIHLFTLTNLGAPAAFKYFDTTIDRKRYTSTKEVLDATLIHQSITGLYETRIDLSQLGGDGGGSSGSSGSSGSSGGLDDEYRLYSPLVKPDQNIQFWLEQFPQAWAETAGMGLAKQVPPQVIQLKASATPVSVRQYPLSKEAQEGIRPHVQRLIQQGILVPVQSPWNTPLLPVRKPGTNDYRPVQDLREVNKRVQDIHPTVPNPYNLLCALPPQRSWYTVLDLKDAFFCLRLHPTSQPLFAFEWRDPGTGRTGQLTWTRLPQGFKNSPTIFNEALHRDLANFRIQHPQVTLLQYVDDLLLAGATKQDCLEGTKALLLELSDLGYRASAKKAQICRREVTYLGYSLRDGQRWLTEARKKTVVQIPAPTTAKQVREFLGKAGFCRLFIPGFATLAAPLYPLTKPKGEFSWAPEHQKAFDAIKKALLSAPALALPDVTKPFTLYVDERKGVARGVLTQTLGPWRRPVAYLSKKLDPVASGWPVCLKAIAAVAILVKDADKLTLGQNITVIAPHALENIVRQPPDRWMTNARMTHYQSLLLTERVTFAPPAALNPATLLPEETDEPVTHDCHQLLIEETGVRKDLTDIPLTGEVLTWFTDGSSYVVEGKRMAGAAVVDGTRTIWASSLPEGTSAQKAELMALTQALRLAEGKSINIYTDSRYAFATAHVHGAIYKQRGWLTSAGREIKNKEEILSLLEALHLPKRLAIIHCPGHQKAKDPISRGNQMADRVAKQAAQGVNLLPAGKRTADGSEFEKRTADGSEFESPKKKAKVE

SEQ ID NO: 42 - protein, 2088 aa, synthetic construct
MPAAKRVKLDGGDKKYSIGLDIGTNSVGWAVITDEYKVPSKKFKVLGNTDRHSIKKNLIGALLFDSGETAEATRLKRTARRRYTRRKNRICYLQEIFSNEMAKVDDSFFHRLEESFLVEEDKKHERHPIFGNIVDEVAYHEKYPTIYHLRKKLVDSTDKADLRLIYLALAHMIKFRGHFLIEGDLNPDNSDVDKLFIQLVQTYNQLFEENPINASGVDAKAILSARLSKSRRLENLIAQLPGEKKNGLFGNLIALSLGLTPNFKSNFDLAEDAKLQLSKDTYDDDLDNLLAQIGDQYADLFLAAKNLSDAILLSDILRVNTEITKAPLSASMIKRYDEHHQDLTLLKALVRQQLPEKYKEIFFDQSKNGYAGYIDGGASQEEFYKFIKPILEKMDGTEELLVKLNREDLLRKQRTFDNGSIPHQIHLGELHAILRRQEDFYPFLKDNREKIEKILTFRIPYYVGPLARGNSRFAWMTRKSEETITPWNFEEVVDKGASAQSFIERMTNFDKNLPNEKVLPKHSLLYEYFTVYNELTKVKYVTEGMRKPAFLSGEQKKAIVDLLFKTNRKVTVKQLKEDYFKKIECFDSVEISGVEDRFNASLGTYHDLLKIIKDKDFLDNEENEDILEDIVLTLTLFEDREMIEERLKTYAHLFDDKVMKQLKRRRYTGWGRLSRKLINGIRDKQSGKTILDFLKSDGFANRNFMQLIHDDSLTFKEDIQKAQVSGQGDSLHEHIANLAGSPAIKKGILQTVKVVDELVKVMGRHKPENIVIEMARENQTTQKGQKNSRERMKRIEEGIKELGSQILKEHPVENTQLQNEKLYLYYLQNGRDMYVDQELDINRLSDYDVDHIVPQSFLKDDSIDNKVLTRSDKARGKSDNVPSEEVVKKMKNYWRQLLNAKLITQRKFDNLTKAERGGLSELDKAGFIKRQLVETRQITKHVAQILDSRMNTKYDENDKLIREVKVITLKSKLVSDFRKDFQFYKVREINNYHHAHDAYLNAVVGTALIKKYPKLESEFVYGDYKVYDVRKMIAKSEQEIGKATAKYFFYSNIMNFFKTEITLANGEIRKRPLIETNGETGEIVWDKGRDFATVRKVLSMPQVNIVKKTEVQTGGFSKESILPKRNSDKLIARKKDWDPKKYGGFDSPTVAYSVLVVAKVEKGKSKKLKSVKELLGITIMERSSFEKNPIDFLEAKGYKEVKKDLIIKLPKYSLFELENGRKRMLASAGELQKGNELALPSKYVNFLYLASHYEKLKGSPEDNEQKQLFVEQHKHYLDEIIEQISEFSKRVILADANLDKVLSAYNKHRDKPIREQAENIIHLFTLTNLGAPAAFKYFDTTIDRKRYTSTKEVLDATLIHQSITGLYETRIDLSQLGGDGGGSSEAAAKGGGGGLDDEYRLYSPLVKPDQNIQFWLEQFPQAWAETAGMGLAKQVPPQVIQLKASATPVSVRQYPLSKEAQEGIRPHVQRLIQQGILVPVQSPWNTPLLPVRKPGTNDYRPVQDLREVNKRVQDIHPTVPNPYNLLCALPPQRSWYTVLDLKDAFFCLRLHPTSQPLFAFEWRDPGTGRTGQLTWTRLPQGFKNSPTIFNEALHRDLANFRIQHPQVTLLQYVDDLLLAGATKQDCLEGTKALLLELSDLGYRASAKKAQICRREVTYLGYSLRDGQRWLTEARKKTVVQIPAPTTAKQVREFLGKAGFCRLFIPGFATLAAPLYPLTKPKGEFSWAPEHQKAFDAIKKALLSAPALALPDVTKPFTLYVDERKGVARGVLTQTLGPWRRPVAYLSKKLDPVASGWPVCLKAIAAVAILVKDADKLTLGQNITVIAPHALENIVRQPPDRWMTNARMTHYQSLLLTERVTFAPPAALNPATLLPEETDEPVTHDCHQLLIEETGVRKDLTDIPLTGEVLTWFTDGSSYVVEGKRMAGAAVVDGTRTIWASSLPEGTSAQKAELMALTQALRLAEGKSINIYTDSRYAFATAHVHGAIYKQRGWLTSAGREIKNKEEILSLLEALHLPKRLAIIHCPGHQKAKDPISRGNQMADRVAKQAAQGVNLLPAGKRTADGSEFEKRTADGSEFESPKKKAKVE

SEQ ID NO: 43 - protein, 2086 aa, synthetic construct
MPAAKRVKLDGGDKKYSIGLDIGTNSVGWAVITDEYKVPSKKFKVLGNTDRHSIKKNLIGALLFDSGETAEATRLKRTARRRYTRRKNRICYLQEIFSNEMAKVDDSFFHRLEESFLVEEDKKHERHPIFGNIVDEVAYHEKYPTIYHLRKKLVDSTDKADLRLIYLALAHMIKFRGHFLIEGDLNPDNSDVDKLFIQLVQTYNQLFEENPINASGVDAKAILSARLSKSRRLENLIAQLPGEKKNGLFGNLIALSLGLTPNFKSNFDLAEDAKLQLSKDTYDDDLDNLLAQIGDQYADLFLAAKNLSDAILLSDILRVNTEITKAPLSASMIKRYDEHHQDLTLLKALVRQQLPEKYKEIFFDQSKNGYAGYIDGGASQEEFYKFIKPILEKMDGTEELLVKLNREDLLRKQRTFDNGSIPHQIHLGELHAILRRQEDFYPFLKDNREKIEKILTFRIPYYVGPLARGNSRFAWMTRKSEETITPWNFEEVVDKGASAQSFIERMTNFDKNLPNEKVLPKHSLLYEYFTVYNELTKVKYVTEGMRKPAFLSGEQKKAIVDLLFKTNRKVTVKQLKEDYFKKIECFDSVEISGVEDRFNASLGTYHDLLKIIKDKDFLDNEENEDILEDIVLTLTLFEDREMIEERLKTYAHLFDDKVMKQLKRRRYTGWGRLSRKLINGIRDKQSGKTILDFLKSDGFANRNFMQLIHDDSLTFKEDIQKAQVSGQGDSLHEHIANLAGSPAIKKGILQTVKVVDELVKVMGRHKPENIVIEMARENQTTQKGQKNSRERMKRIEEGIKELGSQILKEHPVENTQLQNEKLYLYYLQNGRDMYVDQELDINRLSDYDVDHIVPQSFLKDDSIDNKVLTRSDKARGKSDNVPSEEVVKKMKNYWRQLLNAKLITQRKFDNLTKAERGGLSELDKAGFIKRQLVETRQITKHVAQILDSRMNTKYDENDKLIREVKVITLKSKLVSDFRKDFQFYKVREINNYHHAHDAYLNAVVGTALIKKYPKLESEFVYGDYKVYDVRKMIAKSEQEIGKATAKYFFYSNIMNFFKTEITLANGEIRKRPLIETNGETGEIVWDKGRDFATVRKVLSMPQVNIVKKTEVQTGGFSKESILPKRNSDKLIARKKDWDPKKYGGFDSPTVAYSVLVVAKVEKGKSKKLKSVKELLGITIMERSSFEKNPIDFLEAKGYKEVKKDLIIKLPKYSLFELENGRKRMLASAGELQKGNELALPSKYVNFLYLASHYEKLKGSPEDNEQKQLFVEQHKHYLDEIIEQISEFSKRVILADANLDKVLSAYNKHRDKPIREQAENIIHLFTLTNLGAPAAFKYFDTTIDRKRYTSTKEVLDATLIHQSITGLYETRIDLSQLGGDGGGGGGSSPAPGGLDDEYRLYSPLVKPDQNIQFWLEQFPQAWAETAGMGLAKQVPPQVIQLKASATPVSVRQYPLSKEAQEGIRPHVQRLIQQGILVPVQSPWNTPLLPVRKPGTNDYRPVQDLREVNKRVQDIHPTVPNPYNLLCALPPQRSWYTVLDLKDAFFCLRLHPTSQPLFAFEWRDPGTGRTGQLTWTRLPQGFKNSPTIFNEALHRDLANFRIQHPQVTLLQYVDDLLLAGATKQDCLEGTKALLLELSDLGYRASAKKAQICRREVTYLGYSLRDGQRWLTEARKKTVVQIPAPTTAKQVREFLGKAGFCRLFIPGFATLAAPLYPLTKPKGEFSWAPEHQKAFDAIKKALLSAPALALPDVTKPFTLYVDERKGVARGVLTQTLGPWRRPVAYLSKKLDPVASGWPVCLKAIAAVAILVKDADKLTLGQNITVIAPHALENIVRQPPDRWMTNARMTHYQSLLLTERVTFAPPAALNPATLLPEETDEPVTHDCHQLLIEETGVRKDLTDIPLTGEVLTWFTDGSSYVVEGKRMAGAAVVDGTRTIWASSLPEGTSAQKAELMALTQALRLAEGKSINIYTDSRYAFATAHVHGAIYKQRGWLTSAGREIKNKEEILSLLEALHLPKRLAIIHCPGHQKAKDPISRGNQMADRVAKQAAQGVNLLPAGKRTADGSEFEKRTADGSEFESPKKKAKVE

SEQ ID NO: 44 - protein, 2086 aa, synthetic construct
MPAAKRVKLDGGDKKYSIGLDIGTNSVGWAVITDEYKVPSKKFKVLGNTDRHSIKKNLIGALLFDSGETAEATRLKRTARRRYTRRKNRICYLQEIFSNEMAKVDDSFFHRLEESFLVEEDKKHERHPIFGNIVDEVAYHEKYPTIYHLRKKLVDSTDKADLRLIYLALAHMIKFRGHFLIEGDLNPDNSDVDKLFIQLVQTYNQLFEENPINASGVDAKAILSARLSKSRRLENLIAQLPGEKKNGLFGNLIALSLGLTPNFKSNFDLAEDAKLQLSKDTYDDDLDNLLAQIGDQYADLFLAAKNLSDAILLSDILRVNTEITKAPLSASMIKRYDEHHQDLTLLKALVRQQLPEKYKEIFFDQSKNGYAGYIDGGASQEEFYKFIKPILEKMDGTEELLVKLNREDLLRKQRTFDNGSIPHQIHLGELHAILRRQEDFYPFLKDNREKIEKILTFRIPYYVGPLARGNSRFAWMTRKSEETITPWNFEEVVDKGASAQSFIERMTNFDKNLPNEKVLPKHSLLYEYFTVYNELTKVKYVTEGMRKPAFLSGEQKKAIVDLLFKTNRKVTVKQLKEDYFKKIECFDSVEISGVEDRFNASLGTYHDLLKIIKDKDFLDNEENEDILEDIVLTLTLFEDREMIEERLKTYAHLFDDKVMKQLKRRRYTGWGRLSRKLINGIRDKQSGKTILDFLKSDGFANRNFMQLIHDDSLTFKEDIQKAQVSGQGDSLHEHIANLAGSPAIKKGILQTVKVVDELVKVMGRHKPENIVIEMARENQTTQKGQKNSRERMKRIEEGIKELGSQILKEHPVENTQLQNEKLYLYYLQNGRDMYVDQELDINRLSDYDVDHIVPQSFLKDDSIDNKVLTRSDKARGKSDNVPSEEVVKKMKNYWRQLLNAKLITQRKFDNLTKAERGGLSELDKAGFIKRQLVETRQITKHVAQILDSRMNTKYDENDKLIREVKVITLKSKLVSDFRKDFQFYKVREINNYHHAHDAYLNAVVGTALIKKYPKLESEFVYGDYKVYDVRKMIAKSEQEIGKATAKYFFYSNIMNFFKTEITLANGEIRKRPLIETNGETGEIVWDKGRDFATVRKVLSMPQVNIVKKTEVQTGGFSKESILPKRNSDKLIARKKDWDPKKYGGFDSPTVAYSVLVVAKVEKGKSKKLKSVKELLGITIMERSSFEKNPIDFLEAKGYKEVKKDLIIKLPKYSLFELENGRKRMLASAGELQKGNELALPSKYVNFLYLASHYEKLKGSPEDNEQKQLFVEQHKHYLDEIIEQISEFSKRVILADANLDKVLSAYNKHRDKPIREQAENIIHLFTLTNLGAPAAFKYFDTTIDRKRYTSTKEVLDATLIHQSITGLYETRIDLSQLGGDGGPAPGGSGGGGGLDDEYRLYSPLVKPDQNIQFWLEQFPQAWAETAGMGLAKQVPPQVIQLKASATPVSVRQYPLSKEAQEGIRPHVQRLIQQGILVPVQSPWNTPLLPVRKPGTNDYRPVQDLREVNKRVQDIHPTVPNPYNLLCALPPQRSWYTVLDLKDAFFCLRLHPTSQPLFAFEWRDPGTGRTGQLTWTRLPQGFKNSPTIFNEALHRDLANFRIQHPQVTLLQYVDDLLLAGATKQDCLEGTKALLLELSDLGYRASAKKAQICRREVTYLGYSLRDGQRWLTEARKKTVVQIPAPTTAKQVREFLGKAGFCRLFIPGFATLAAPLYPLTKPKGEFSWAPEHQKAFDAIKKALLSAPALALPDVTKPFTLYVDERKGVARGVLTQTLGPWRRPVAYLSKKLDPVASGWPVCLKAIAAVAILVKDADKLTLGQNITVIAPHALENIVRQPPDRWMTNARMTHYQSLLLTERVTFAPPAALNPATLLPEETDEPVTHDCHQLLIEETGVRKDLTDIPLTGEVLTWFTDGSSYVVEGKRMAGAAVVDGTRTIWASSLPEGTSAQKAELMALTQALRLAEGKSINIYTDSRYAFATAHVHGAIYKQRGWLTSAGREIKNKEEILSLLEALHLPKRLAIIHCPGHQKAKDPISRGNQMADRVAKQAAQGVNLLPAGKRTADGSEFEKRTADGSEFESPKKKAKVE

SEQ ID NO: 45 - protein, 2084 aa, synthetic construct
MPAAKRVKLDGGDKKYSIGLDIGTNSVGWAVITDEYKVPSKKFKVLGNTDRHSIKKNLIGALLFDSGETAEATRLKRTARRRYTRRKNRICYLQEIFSNEMAKVDDSFFHRLEESFLVEEDKKHERHPIFGNIVDEVAYHEKYPTIYHLRKKLVDSTDKADLRLIYLALAHMIKFRGHFLIEGDLNPDNSDVDKLFIQLVQTYNQLFEENPINASGVDAKAILSARLSKSRRLENLIAQLPGEKKNGLFGNLIALSLGLTPNFKSNFDLAEDAKLQLSKDTYDDDLDNLLAQIGDQYADLFLAAKNLSDAILLSDILRVNTEITKAPLSASMIKRYDEHHQDLTLLKALVRQQLPEKYKEIFFDQSKNGYAGYIDGGASQEEFYKFIKPILEKMDGTEELLVKLNREDLLRKQRTFDNGSIPHQIHLGELHAILRRQEDFYPFLKDNREKIEKILTFRIPYYVGPLARGNSRFAWMTRKSEETITPWNFEEVVDKGASAQSFIERMTNFDKNLPNEKVLPKHSLLYEYFTVYNELTKVKYVTEGMRKPAFLSGEQKKAIVDLLFKTNRKVTVKQLKEDYFKKIECFDSVEISGVEDRFNASLGTYHDLLKIIKDKDFLDNEENEDILEDIVLTLTLFEDREMIEERLKTYAHLFDDKVMKQLKRRRYTGWGRLSRKLINGIRDKQSGKTILDFLKSDGFANRNFMQLIHDDSLTFKEDIQKAQVSGQGDSLHEHIANLAGSPAIKKGILQTVKVVDELVKVMGRHKPENIVIEMARENQTTQKGQKNSRERMKRIEEGIKELGSQILKEHPVENTQLQNEKLYLYYLQNGRDMYVDQELDINRLSDYDVDHIVPQSFLKDDSIDNKVLTRSDKARGKSDNVPSEEVVKKMKNYWRQLLNAKLITQRKFDNLTKAERGGLSELDKAGFIKRQLVETRQITKHVAQILDSRMNTKYDENDKLIREVKVITLKSKLVSDFRKDFQFYKVREINNYHHAHDAYLNAVVGTALIKKYPKLESEFVYGDYKVYDVRKMIAKSEQEIGKATAKYFFYSNIMNFFKTEITLANGEIRKRPLIETNGETGEIVWDKGRDFATVRKVLSMPQVNIVKKTEVQTGGFSKESILPKRNSDKLIARKKDWDPKKYGGFDSPTVAYSVLVVAKVEKGKSKKLKSVKELLGITIMERSSFEKNPIDFLEAKGYKEVKKDLIIKLPKYSLFELENGRKRMLASAGELQKGNELALPSKYVNFLYLASHYEKLKGSPEDNEQKQLFVEQHKHYLDEIIEQISEFSKRVILADANLDKVLSAYNKHRDKPIREQAENIIHLFTLTNLGAPAAFKYFDTTIDRKRYTSTKEVLDATLIHQSITGLYETRIDLSQLGGDGGPAPAPAPGGLDDEYRLYSPLVKPDQNIQFWLEQFPQAWAETAGMGLAKQVPPQVIQLKASATPVSVRQYPLSKEAQEGIRPHVQRLIQQGILVPVQSPWNTPLLPVRKPGTNDYRPVQDLREVNKRVQDIHPTVPNPYNLLCALPPQRSWYTVLDLKDAFFCLRLHPTSQPLFAFEWRDPGTGRTGQLTWTRLPQGFKNSPTIFNEALHRDLANFRIQHPQVTLLQYVDDLLLAGATKQDCLEGTKALLLELSDLGYRASAKKAQICRREVTYLGYSLRDGQRWLTEARKKTVVQIPAPTTAKQVREFLGKAGFCRLFIPGFATLAAPLYPLTKPKGEFSWAPEHQKAFDAIKKALLSAPALALPDVTKPFTLYVDERKGVARGVLTQTLGPWRRPVAYLSKKLDPVASGWPVCLKAIAAVAILVKDADKLTLGQNITVIAPHALENIVRQPPDRWMTNARMTHYQSLLLTERVTFAPPAALNPATLLPEETDEPVTHDCHQLLIEETGVRKDLTDIPLTGEVLTWFTDGSSYVVEGKRMAGAAVVDGTRTIWASSLPEGTSAQKAELMALTQALRLAEGKSINIYTDSRYAFATAHVHGAIYKQRGWLTSAGREIKNKEEILSLLEALHLPKRLAIIHCPGHQKAKDPISRGNQMADRVAKQAAQGVNLLPAGKRTADGSEFEKRTADGSEFESPKKKAKVE

SEQ ID NO: 46 - protein, 2097 aa, synthetic construct
MPAAKRVKLDGGDKKYSIGLDIGTNSVGWAVITDEYKVPSKKFKVLGNTDRHSIKKNLIGALLFDSGETAEATRLKRTARRRYTRRKNRICYLQEIFSNEMAKVDDSFFHRLEESFLVEEDKKHERHPIFGNIVDEVAYHEKYPTIYHLRKKLVDSTDKADLRLIYLALAHMIKFRGHFLIEGDLNPDNSDVDKLFIQLVQTYNQLFEENPINASGVDAKAILSARLSKSRRLENLIAQLPGEKKNGLFGNLIALSLGLTPNFKSNFDLAEDAKLQLSKDTYDDDLDNLLAQIGDQYADLFLAAKNLSDAILLSDILRVNTEITKAPLSASMIKRYDEHHQDLTLLKALVRQQLPEKYKEIFFDQSKNGYAGYIDGGASQEEFYKFIKPILEKMDGTEELLVKLNREDLLRKQRTFDNGSIPHQIHLGELHAILRRQEDFYPFLKDNREKIEKILTFRIPYYVGPLARGNSRFAWMTRKSEETITPWNFEEVVDKGASAQSFIERMTNFDKNLPNEKVLPKHSLLYEYFTVYNELTKVKYVTEGMRKPAFLSGEQKKAIVDLLFKTNRKVTVKQLKEDYFKKIECFDSVEISGVEDRFNASLGTYHDLLKIIKDKDFLDNEENEDILEDIVLTLTLFEDREMIEERLKTYAHLFDDKVMKQLKRRRYTGWGRLSRKLINGIRDKQSGKTILDFLKSDGFANRNFMQLIHDDSLTFKEDIQKAQVSGQGDSLHEHIANLAGSPAIKKGILQTVKVVDELVKVMGRHKPENIVIEMARENQTTQKGQKNSRERMKRIEEGIKELGSQILKEHPVENTQLQNEKLYLYYLQNGRDMYVDQELDINRLSDYDVDHIVPQSFLKDDSIDNKVLTRSDKARGKSDNVPSEEVVKKMKNYWRQLLNAKLITQRKFDNLTKAERGGLSELDKAGFIKRQLVETRQITKHVAQILDSRMNTKYDENDKLIREVKVITLKSKLVSDFRKDFQFYKVREINNYHHAHDAYLNAVVGTALIKKYPKLESEFVYGDYKVYDVRKMIAKSEQEIGKATAKYFFYSNIMNFFKTEITLANGEIRKRPLIETNGETGEIVWDKGRDFATVRKVLSMPQVNIVKKTEVQTGGFSKESILPKRNSDKLIARKKDWDPKKYGGFDSPTVAYSVLVVAKVEKGKSKKLKSVKELLGITIMERSSFEKNPIDFLEAKGYKEVKKDLIIKLPKYSLFELENGRKRMLASAGELQKGNELALPSKYVNFLYLASHYEKLKGSPEDNEQKQLFVEQHKHYLDEIIEQISEFSKRVILADANLDKVLSAYNKHRDKPIREQAENIIHLFTLTNLGAPAAFKYFDTTIDRKRYTSTKEVLDATLIHQSITGLYETRIDLSQLGGDGGEAAAKEAAAKEAAAKEAAAKGGLDDEYRLYSPLVKPDQNIQFWLEQFPQAWAETAGMGLAKQVPPQVIQLKASATPVSVRQYPLSKEAQEGIRPHVQRLIQQGILVPVQSPWNTPLLPVRKPGTNDYRPVQDLREVNKRVQDIHPTVPNPYNLLCALPPQRSWYTVLDLKDAFFCLRLHPTSQPLFAFEWRDPGTGRTGQLTWTRLPQGFKNSPTIFNEALHRDLANFRIQHPQVTLLQYVDDLLLAGATKQDCLEGTKALLLELSDLGYRASAKKAQICRREVTYLGYSLRDGQRWLTEARKKTVVQIPAPTTAKQVREFLGKAGFCRLFIPGFATLAAPLYPLTKPKGEFSWAPEHQKAFDAIKKALLSAPALALPDVTKPFTLYVDERKGVARGVLTQTLGPWRRPVAYLSKKLDPVASGWPVCLKAIAAVAILVKDADKLTLGQNITVIAPHALENIVRQPPDRWMTNARMTHYQSLLLTERVTFAPPAALNPATLLPEETDEPVTHDCHQLLIEETGVRKDLTDIPLTGEVLTWFTDGSSYVVEGKRMAGAAVVDGTRTIWASSLPEGTSAQKAELMALTQALRLAEGKSINIYTDSRYAFATAHVHGAIYKQRGWLTSAGREIKNKEEILSLLEALHLPKRLAIIHCPGHQKAKDPISRGNQMADRVAKQAAQGVNLLPAGKRTADGSEFEKRTADGSEFESPKKKAKVE

SEQ ID NO: 47 - protein, 2083 aa, synthetic construct
MPAAKRVKLDGGDKKYSIGLDIGTNSVGWAVITDEYKVPSKKFKVLGNTDRHSIKKNLIGALLFDSGETAEATRLKRTARRRYTRRKNRICYLQEIFSNEMAKVDDSFFHRLEESFLVEEDKKHERHPIFGNIVDEVAYHEKYPTIYHLRKKLVDSTDKADLRLIYLALAHMIKFRGHFLIEGDLNPDNSDVDKLFIQLVQTYNQLFEENPINASGVDAKAILSARLSKSRRLENLIAQLPGEKKNGLFGNLIALSLGLTPNFKSNFDLAEDAKLQLSKDTYDDDLDNLLAQIGDQYADLFLAAKNLSDAILLSDILRVNTEITKAPLSASMIKRYDEHHQDLTLLKALVRQQLPEKYKEIFFDQSKNGYAGYIDGGASQEEFYKFIKPILEKMDGTEELLVKLNREDLLRKQRTFDNGSIPHQIHLGELHAILRRQEDFYPFLKDNREKIEKILTFRIPYYVGPLARGNSRFAWMTRKSEETITPWNFEEVVDKGASAQSFIERMTNFDKNLPNEKVLPKHSLLYEYFTVYNELTKVKYVTEGMRKPAFLSGEQKKAIVDLLFKTNRKVTVKQLKEDYFKKIECFDSVEISGVEDRFNASLGTYHDLLKIIKDKDFLDNEENEDILEDIVLTLTLFEDREMIEERLKTYAHLFDDKVMKQLKRRRYTGWGRLSRKLINGIRDKQSGKTILDFLKSDGFANRNFMQLIHDDSLTFKEDIQKAQVSGQGDSLHEHIANLAGSPAIKKGILQTVKVVDELVKVMGRHKPENIVIEMARENQTTQKGQKNSRERMKRIEEGIKELGSQILKEHPVENTQLQNEKLYLYYLQNGRDMYVDQELDINRLSDYDVDHIVPQSFLKDDSIDNKVLTRSDKARGKSDNVPSEEVVKKMKNYWRQLLNAKLITQRKFDNLTKAERGGLSELDKAGFIKRQLVETRQITKHVAQILDSRMNTKYDENDKLIREVKVITLKSKLVSDFRKDFQFYKVREINNYHHAHDAYLNAVVGTALIKKYPKLESEFVYGDYKVYDVRKMIAKSEQEIGKATAKYFFYSNIMNFFKTEITLANGEIRKRPLIETNGETGEIVWDKGRDFATVRKVLSMPQVNIVKKTEVQTGGFSKESILPKRNSDKLIARKKDWDPKKYGGFDSPTVAYSVLVVAKVEKGKSKKLKSVKELLGITIMERSSFEKNPIDFLEAKGYKEVKKDLIIKLPKYSLFELENGRKRMLASAGELQKGNELALPSKYVNFLYLASHYEKLKGSPEDNEQKQLFVEQHKHYLDEIIEQISEFSKRVILADANLDKVLSAYNKHRDKPIREQAENIIHLFTLTNLGAPAAFKYFDTTIDRKRYTSTKEVLDATLIHQSITGLYETRIDLSQLGGDGGGSSPAPGGLDDEYRLYSPLVKPDQNIQFWLEQFPQAWAETAGMGLAKQVPPQVIQLKASATPVSVRQYPLSKEAQEGIRPHVQRLIQQGILVPVQSPWNTPLLPVRKPGTNDYRPVQDLREVNKRVQDIHPTVPNPYNLLCALPPQRSWYTVLDLKDAFFCLRLHPTSQPLFAFEWRDPGTGRTGQLTWTRLPQGFKNSPTIFNEALHRDLANFRIQHPQVTLLQYVDDLLLAGATKQDCLEGTKALLLELSDLGYRASAKKAQICRREVTYLGYSLRDGQRWLTEARKKTVVQIPAPTTAKQVREFLGKAGFCRLFIPGFATLAAPLYPLTKPKGEFSWAPEHQKAFDAIKKALLSAPALALPDVTKPFTLYVDERKGVARGVLTQTLGPWRRPVAYLSKKLDPVASGWPVCLKAIAAVAILVKDADKLTLGQNITVIAPHALENIVRQPPDRWMTNARMTHYQSLLLTERVTFAPPAALNPATLLPEETDEPVTHDCHQLLIEETGVRKDLTDIPLTGEVLTWFTDGSSYVVEGKRMAGAAVVDGTRTIWASSLPEGTSAQKAELMALTQALRLAEGKSINIYTDSRYAFATAHVHGAIYKQRGWLTSAGREIKNKEEILSLLEALHLPKRLAIIHCPGHQKAKDPISRGNQMADRVAKQAAQGVNLLPAGKRTADGSEFEKRTADGSEFESPKKKAKVE

SEQ ID NO: 48 - protein, 2085 aa, synthetic construct
MPAAKRVKLDGGDKKYSIGLDIGTNSVGWAVITDEYKVPSKKFKVLGNTDRHSIKKNLIGALLFDSGETAEATRLKRTARRRYTRRKNRICYLQEIFSNEMAKVDDSFFHRLEESFLVEEDKKHERHPIFGNIVDEVAYHEKYPTIYHLRKKLVDSTDKADLRLIYLALAHMIKFRGHFLIEGDLNPDNSDVDKLFIQLVQTYNQLFEENPINASGVDAKAILSARLSKSRRLENLIAQLPGEKKNGLFGNLIALSLGLTPNFKSNFDLAEDAKLQLSKDTYDDDLDNLLAQIGDQYADLFLAAKNLSDAILLSDILRVNTEITKAPLSASMIKRYDEHHQDLTLLKALVRQQLPEKYKEIFFDQSKNGYAGYIDGGASQEEFYKFIKPILEKMDGTEELLVKLNREDLLRKQRTFDNGSIPHQIHLGELHAILRRQEDFYPFLKDNREKIEKILTFRIPYYVGPLARGNSRFAWMTRKSEETITPWNFEEVVDKGASAQSFIERMTNFDKNLPNEKVLPKHSLLYEYFTVYNELTKVKYVTEGMRKPAFLSGEQKKAIVDLLFKTNRKVTVKQLKEDYFKKIECFDSVEISGVEDRFNASLGTYHDLLKIIKDKDFLDNEENEDILEDIVLTLTLFEDREMIEERLKTYAHLFDDKVMKQLKRRRYTGWGRLSRKLINGIRDKQSGKTILDFLKSDGFANRNFMQLIHDDSLTFKEDIQKAQVSGQGDSLHEHIANLAGSPAIKKGILQTVKVVDELVKVMGRHKPENIVIEMARENQTTQKGQKNSRERMKRIEEGIKELGSQILKEHPVENTQLQNEKLYLYYLQNGRDMYVDQELDINRLSDYDVDHIVPQSFLKDDSIDNKVLTRSDKARGKSDNVPSEEVVKKMKNYWRQLLNAKLITQRKFDNLTKAERGGLSELDKAGFIKRQLVETRQITKHVAQILDSRMNTKYDENDKLIREVKVITLKSKLVSDFRKDFQFYKVREINNYHHAHDAYLNAVVGTALIKKYPKLESEFVYGDYKVYDVRKMIAKSEQEIGKATAKYFFYSNIMNFFKTEITLANGEIRKRPLIETNGETGEIVWDKGRDFATVRKVLSMPQVNIVKKTEVQTGGFSKESILPKRNSDKLIARKKDWDPKKYGGFDSPTVAYSVLVVAKVEKGKSKKLKSVKELLGITIMERSSFEKNPIDFLEAKGYKEVKKDLIIKLPKYSLFELENGRKRMLASAGELQKGNELALPSKYVNFLYLASHYEKLKGSPEDNEQKQLFVEQHKHYLDEIIEQISEFSKRVILADANLDKVLSAYNKHRDKPIREQAENIIHLFTLTNLGAPAAFKYFDTTIDRKRYTSTKEVLDATLIHQSITGLYETRIDLSQLGGDGGEAAAKGGGGGLDDEYRLYSPLVKPDQNIQFWLEQFPQAWAETAGMGLAKQVPPQVIQLKASATPVSVRQYPLSKEAQEGIRPHVQRLIQQGILVPVQSPWNTPLLPVRKPGTNDYRPVQDLREVNKRVQDIHPTVPNPYNLLCALPPQRSWYTVLDLKDAFFCLRLHPTSQPLFAFEWRDPGTGRTGQLTWTRLPQGFKNSPTIFNEALHRDLANFRIQHPQVTLLQYVDDLLLAGATKQDCLEGTKALLLELSDLGYRASAKKAQICRREVTYLGYSLRDGQRWLTEARKKTVVQIPAPTTAKQVREFLGKAGFCRLFIPGFATLAAPLYPLTKPKGEFSWAPEHQKAFDAIKKALLSAPALALPDVTKPFTLYVDERKGVARGVLTQTLGPWRRPVAYLSKKLDPVASGWPVCLKAIAAVAILVKDADKLTLGQNITVIAPHALENIVRQPPDRWMTNARMTHYQSLLLTERVTFAPPAALNPATLLPEETDEPVTHDCHQLLIEETGVRKDLTDIPLTGEVLTWFTDGSSYVVEGKRMAGAAVVDGTRTIWASSLPEGTSAQKAELMALTQALRLAEGKSINIYTDSRYAFATAHVHGAIYKQRGWLTSAGREIKNKEEILSLLEALHLPKRLAIIHCPGHQKAKDPISRGNQMADRVAKQAAQGVNLLPAGKRTADGSEFEKRTADGSEFESPKKKAKVE

SEQ ID NO: 49 - protein, 2088 aa, synthetic construct
MPAAKRVKLDGGDKKYSIGLDIGTNSVGWAVITDEYKVPSKKFKVLGNTDRHSIKKNLIGALLFDSGETAEATRLKRTARRRYTRRKNRICYLQEIFSNEMAKVDDSFFHRLEESFLVEEDKKHERHPIFGNIVDEVAYHEKYPTIYHLRKKLVDSTDKADLRLIYLALAHMIKFRGHFLIEGDLNPDNSDVDKLFIQLVQTYNQLFEENPINASGVDAKAILSARLSKSRRLENLIAQLPGEKKNGLFGNLIALSLGLTPNFKSNFDLAEDAKLQLSKDTYDDDLDNLLAQIGDQYADLFLAAKNLSDAILLSDILRVNTEITKAPLSASMIKRYDEHHQDLTLLKALVRQQLPEKYKEIFFDQSKNGYAGYIDGGASQEEFYKFIKPILEKMDGTEELLVKLNREDLLRKQRTFDNGSIPHQIHLGELHAILRRQEDFYPFLKDNREKIEKILTFRIPYYVGPLARGNSRFAWMTRKSEETITPWNFEEVVDKGASAQSFIERMTNFDKNLPNEKVLPKHSLLYEYFTVYNELTKVKYVTEGMRKPAFLSGEQKKAIVDLLFKTNRKVTVKQLKEDYFKKIECFDSVEISGVEDRFNASLGTYHDLLKIIKDKDFLDNEENEDILEDIVLTLTLFEDREMIEERLKTYAHLFDDKVMKQLKRRRYTGWGRLSRKLINGIRDKQSGKTILDFLKSDGFANRNFMQLIHDDSLTFKEDIQKAQVSGQGDSLHEHIANLAGSPAIKKGILQTVKVVDELVKVMGRHKPENIVIEMARENQTTQKGQKNSRERMKRIEEGIKELGSQILKEHPVENTQLQNEKLYLYYLQNGRDMYVDQELDINRLSDYDVDHIVPQSFLKDDSIDNKVLTRSDKARGKSDNVPSEEVVKKMKNYWRQLLNAKLITQRKFDNLTKAERGGLSELDKAGFIKRQLVETRQITKHVAQILDSRMNTKYDENDKLIREVKVITLKSKLVSDFRKDFQFYKVREINNYHHAHDAYLNAVVGTALIKKYPKLESEFVYGDYKVYDVRKMIAKSEQEIGKATAKYFFYSNIMNFFKTEITLANGEIRKRPLIETNGETGEIVWDKGRDFATVRKVLSMPQVNIVKKTEVQTGGFSKESILPKRNSDKLIARKKDWDPKKYGGFDSPTVAYSVLVVAKVEKGKSKKLKSVKELLGITIMERSSFEKNPIDFLEAKGYKEVKKDLIIKLPKYSLFELENGRKRMLASAGELQKGNELALPSKYVNFLYLASHYEKLKGSPEDNEQKQLFVEQHKHYLDEIIEQISEFSKRVILADANLDKVLSAYNKHRDKPIREQAENIIHLFTLTNLGAPAAFKYFDTTIDRKRYTSTKEVLDATLIHQSITGLYETRIDLSQLGGDGGGGSEAAAKPAPGGLDDEYRLYSPLVKPDQNIQFWLEQFPQAWAETAGMGLAKQVPPQVIQLKASATPVSVRQYPLSKEAQEGIRPHVQRLIQQGILVPVQSPWNTPLLPVRKPGTNDYRPVQDLREVNKRVQDIHPTVPNPYNLLCALPPQRSWYTVLDLKDAFFCLRLHPTSQPLFAFEWRDPGTGRTGQLTWTRLPQGFKNSPTIFNEALHRDLANFRIQHPQVTLLQYVDDLLLAGATKQDCLEGTKALLLELSDLGYRASAKKAQICRREVTYLGYSLRDGQRWLTEARKKTVVQIPAPTTAKQVREFLGKAGFCRLFIPGFATLAAPLYPLTKPKGEFSWAPEHQKAFDAIKKALLSAPALALPDVTKPFTLYVDERKGVARGVLTQTLGPWRRPVAYLSKKLDPVASGWPVCLKAIAAVAILVKDADKLTLGQNITVIAPHALENIVRQPPDRWMTNARMTHYQSLLLTERVTFAPPAALNPATLLPEETDEPVTHDCHQLLIEETGVRKDLTDIPLTGEVLTWFTDGSSYVVEGKRMAGAAVVDGTRTIWASSLPEGTSAQKAELMALTQALRLAEGKSINIYTDSRYAFATAHVHGAIYKQRGWLTSAGREIKNKEEILSLLEALHLPKRLAIIHCPGHQKAKDPISRGNQMADRVAKQAAQGVNLLPAGKRTADGSEFEKRTADGSEFESPKKKAKVE

SEQ ID NO: 50 - protein, 2088 aa, synthetic construct
MPAAKRVKLDGGDKKYSIGLDIGTNSVGWAVITDEYKVPSKKFKVLGNTDRHSIKKNLIGALLFDSGETAEATRLKRTARRRYTRRKNRICYLQEIFSNEMAKVDDSFFHRLEESFLVEEDKKHERHPIFGNIVDEVAYHEKYPTIYHLRKKLVDSTDKADLRLIYLALAHMIKFRGHFLIEGDLNPDNSDVDKLFIQLVQTYNQLFEENPINASGVDAKAILSARLSKSRRLENLIAQLPGEKKNGLFGNLIALSLGLTPNFKSNFDLAEDAKLQLSKDTYDDDLDNLLAQIGDQYADLFLAAKNLSDAILLSDILRVNTEITKAPLSASMIKRYDEHHQDLTLLKALVRQQLPEKYKEIFFDQSKNGYAGYIDGGASQEEFYKFIKPILEKMDGTEELLVKLNREDLLRKQRTFDNGSIPHQIHLGELHAILRRQEDFYPFLKDNREKIEKILTFRIPYYVGPLARGNSRFAWMTRKSEETITPWNFEEVVDKGASAQSFIERMTNFDKNLPNEKVLPKHSLLYEYFTVYNELTKVKYVTEGMRKPAFLSGEQKKAIVDLLFKTNRKVTVKQLKEDYFKKIECFDSVEISGVEDRFNASLGTYHDLLKIIKDKDFLDNEENEDILEDIVLTLTLFEDREMIEERLKTYAHLFDDKVMKQLKRRRYTGWGRLSRKLINGIRDKQSGKTILDFLKSDGFANRNFMQLIHDDSLTFKEDIQKAQVSGQGDSLHEHIANLAGSPAIKKGILQTVKVVDELVKVMGRHKPENIVIEMARENQTTQKGQKNSRERMKRIEEGIKELGSQILKEHPVENTQLQNEKLYLYYLQNGRDMYVDQELDINRLSDYDVDHIVPQSFLKDDSIDNKVLTRSDKARGKSDNVPSEEVVKKMKNYWRQLLNAKLITQRKFDNLTKAERGGLSELDKAGFIKRQLVETRQITKHVAQILDSRMNTKYDENDKLIREVKVITLKSKLVSDFRKDFQFYKVREINNYHHAHDAYLNAVVGTALIKKYPKLESEFVYGDYKVYDVRKMIAKSEQEIGKATAKYFFYSNIMNFFKTEITLANGEIRKRPLIETNGETGEIVWDKGRDFATVRKVLSMPQVNIVKKTEVQTGGFSKESILPKRNSDKLIARKKDWDPKKYGGFDSPTVAYSVLVVAKVEKGKSKKLKSVKELLGITIMERSSFEKNPIDFLEAKGYKEVKKDLIIKLPKYSLFELENGRKRMLASAGELQKGNELALPSKYVNFLYLASHYEKLKGSPEDNEQKQLFVEQHKHYLDEIIEQISEFSKRVILADANLDKVLSAYNKHRDKPIREQAENIIHLFTLTNLGAPAAFKYFDTTIDRKRYTSTKEVLDATLIHQSITGLYETRIDLSQLGGDGGPAPGGGEAAAKGGLDDEYRLYSPLVKPDQNIQFWLEQFPQAWAETAGMGLAKQVPPQVIQLKASATPVSVRQYPLSKEAQEGIRPHVQRLIQQGILVPVQSPWNTPLLPVRKPGTNDYRPVQDLREVNKRVQDIHPTVPNPYNLLCALPPQRSWYTVLDLKDAFFCLRLHPTSQPLFAFEWRDPGTGRTGQLTWTRLPQGFKNSPTIFNEALHRDLANFRIQHPQVTLLQYVDDLLLAGATKQDCLEGTKALLLELSDLGYRASAKKAQICRREVTYLGYSLRDGQRWLTEARKKTVVQIPAPTTAKQVREFLGKAGFCRLFIPGFATLAAPLYPLTKPKGEFSWAPEHQKAFDAIKKALLSAPALALPDVTKPFTLYVDERKGVARGVLTQTLGPWRRPVAYLSKKLDPVASGWPVCLKAIAAVAILVKDADKLTLGQNITVIAPHALENIVRQPPDRWMTNARMTHYQSLLLTERVTFAPPAALNPATLLPEETDEPVTHDCHQLLIEETGVRKDLTDIPLTGEVLTWFTDGSSYVVEGKRMAGAAVVDGTRTIWASSLPEGTSAQKAELMALTQALRLAEGKSINIYTDSRYAFATAHVHGAIYKQRGWLTSAGREIKNKEEILSLLEALHLPKRLAIIHCPGHQKAKDPISRGNQMADRVAKQAAQGVNLLPAGKRTADGSEFEKRTADGSEFESPKKKAKVE

SEQ ID NO: 51 - protein, 2092 aa, synthetic construct
MPAAKRVKLDGGDKKYSIGLDIGTNSVGWAVITDEYKVPSKKFKVLGNTDRHSIKKNLIGALLFDSGETAEATRLKRTARRRYTRRKNRICYLQEIFSNEMAKVDDSFFHRLEESFLVEEDKKHERHPIFGNIVDEVAYHEKYPTIYHLRKKLVDSTDKADLRLIYLALAHMIKFRGHFLIEGDLNPDNSDVDKLFIQLVQTYNQLFEENPINASGVDAKAILSARLSKSRRLENLIAQLPGEKKNGLFGNLIALSLGLTPNFKSNFDLAEDAKLQLSKDTYDDDLDNLLAQIGDQYADLFLAAKNLSDAILLSDILRVNTEITKAPLSASMIKRYDEHHQDLTLLKALVRQQLPEKYKEIFFDQSKNGYAGYIDGGASQEEFYKFIKPILEKMDGTEELLVKLNREDLLRKQRTFDNGSIPHQIHLGELHAILRRQEDFYPFLKDNREKIEKILTFRIPYYVGPLARGNSRFAWMTRKSEETITPWNFEEVVDKGASAQSFIERMTNFDKNLPNEKVLPKHSLLYEYFTVYNELTKVKYVTEGMRKPAFLSGEQKKAIVDLLFKTNRKVTVKQLKEDYFKKIECFDSVEISGVEDRFNASLGTYHDLLKIIKDKDFLDNEENEDILEDIVLTLTLFEDREMIEERLKTYAHLFDDKVMKQLKRRRYTGWGRLSRKLINGIRDKQSGKTILDFLKSDGFANRNFMQLIHDDSLTFKEDIQKAQVSGQGDSLHEHIANLAGSPAIKKGILQTVKVVDELVKVMGRHKPENIVIEMARENQTTQKGQKNSRERMKRIEEGIKELGSQILKEHPVENTQLQNEKLYLYYLQNGRDMYVDQELDINRLSDYDVDHIVPQSFLKDDSIDNKVLTRSDKARGKSDNVPSEEVVKKMKNYWRQLLNAKLITQRKFDNLTKAERGGLSELDKAGFIKRQLVETRQITKHVAQILDSRMNTKYDENDKLIREVKVITLKSKLVSDFRKDFQFYKVREINNYHHAHDAYLNAVVGTALIKKYPKLESEFVYGDYKVYDVRKMIAKSEQEIGKATAKYFFYSNIMNFFKTEITLANGEIRKRPLIETNGETGEIVWDKGRDFATVRKVLSMPQVNIVKKTEVQTGGFSKESILPKRNSDKLIARKKDWDPKKYGGFDSPTVAYSVLVVAKVEKGKSKKLKSVKELLGITIMERSSFEKNPIDFLEAKGYKEVKKDLIIKLPKYSLFELENGRKRMLASAGELQKGNELALPSKYVNFLYLASHYEKLKGSPEDNEQKQLFVEQHKHYLDEIIEQISEFSKRVILADANLDKVLSAYNKHRDKPIREQAENIIHLFTLTNLGAPAAFKYFDTTIDRKRYTSTKEVLDATLIHQSITGLYETRIDLSQLGGDGGGGGGSGGGGSGGGGSGGLDDEYRLYSPLVKPDQNIQFWLEQFPQAWAETAGMGLAKQVPPQVIQLKASATPVSVRQYPLSKEAQEGIRPHVQRLIQQGILVPVQSPWNTPLLPVRKPGTNDYRPVQDLREVNKRVQDIHPTVPNPYNLLCALPPQRSWYTVLDLKDAFFCLRLHPTSQPLFAFEWRDPGTGRTGQLTWTRLPQGFKNSPTIFNEALHRDLANFRIQHPQVTLLQYVDDLLLAGATKQDCLEGTKALLLELSDLGYRASAKKAQICRREVTYLGYSLRDGQRWLTEARKKTVVQIPAPTTAKQVREFLGKAGFCRLFIPGFATLAAPLYPLTKPKGEFSWAPEHQKAFDAIKKALLSAPALALPDVTKPFTLYVDERKGVARGVLTQTLGPWRRPVAYLSKKLDPVASGWPVCLKAIAAVAILVKDADKLTLGQNITVIAPHALENIVRQPPDRWMTNARMTHYQSLLLTERVTFAPPAALNPATLLPEETDEPVTHDCHQLLIEETGVRKDLTDIPLTGEVLTWFTDGSSYVVEGKRMAGAAVVDGTRTIWASSLPEGTSAQKAELMALTQALRLAEGKSINIYTDSRYAFATAHVHGAIYKQRGWLTSAGREIKNKEEILSLLEALHLPKRLAIIHCPGHQKAKDPISRGNQMADRVAKQAAQGVNLLPAGKRTADGSEFEKRTADGSEFESPKKKAKVE

SEQ ID NO: 52 - protein, 2092 aa, synthetic construct
MPAAKRVKLDGGDKKYSIGLDIGTNSVGWAVITDEYKVPSKKFKVLGNTDRHSIKKNLIGALLFDSGETAEATRLKRTARRRYTRRKNRICYLQEIFSNEMAKVDDSFFHRLEESFLVEEDKKHERHPIFGNIVDEVAYHEKYPTIYHLRKKLVDSTDKADLRLIYLALAHMIKFRGHFLIEGDLNPDNSDVDKLFIQLVQTYNQLFEENPINASGVDAKAILSARLSKSRRLENLIAQLPGEKKNGLFGNLIALSLGLTPNFKSNFDLAEDAKLQLSKDTYDDDLDNLLAQIGDQYADLFLAAKNLSDAILLSDILRVNTEITKAPLSASMIKRYDEHHQDLTLLKALVRQQLPEKYKEIFFDQSKNGYAGYIDGGASQEEFYKFIKPILEKMDGTEELLVKLNREDLLRKQRTFDNGSIPHQIHLGELHAILRRQEDFYPFLKDNREKIEKILTFRIPYYVGPLARGNSRFAWMTRKSEETITPWNFEEVVDKGASAQSFIERMTNFDKNLPNEKVLPKHSLLYEYFTVYNELTKVKYVTEGMRKPAFLSGEQKKAIVDLLFKTNRKVTVKQLKEDYFKKIECFDSVEISGVEDRFNASLGTYHDLLKIIKDKDFLDNEENEDILEDIVLTLTLFEDREMIEERLKTYAHLFDDKVMKQLKRRRYTGWGRLSRKLINGIRDKQSGKTILDFLKSDGFANRNFMQLIHDDSLTFKEDIQKAQVSGQGDSLHEHIANLAGSPAIKKGILQTVKVVDELVKVMGRHKPENIVIEMARENQTTQKGQKNSRERMKRIEEGIKELGSQILKEHPVENTQLQNEKLYLYYLQNGRDMYVDQELDINRLSDYDVDHIVPQSFLKDDSIDNKVLTRSDKARGKSDNVPSEEVVKKMKNYWRQLLNAKLITQRKFDNLTKAERGGLSELDKAGFIKRQLVETRQITKHVAQILDSRMNTKYDENDKLIREVKVITLKSKLVSDFRKDFQFYKVREINNYHHAHDAYLNAVVGTALIKKYPKLESEFVYGDYKVYDVRKMIAKSEQEIGKATAKYFFYSNIMNFFKTEITLANGEIRKRPLIETNGETGEIVWDKGRDFATVRKVLSMPQVNIVKKTEVQTGGFSKESILPKRNSDKLIARKKDWDPKKYGGFDSPTVAYSVLVVAKVEKGKSKKLKSVKELLGITIMERSSFEKNPIDFLEAKGYKEVKKDLIIKLPKYSLFELENGRKRMLASAGELQKGNELALPSKYVNFLYLASHYEKLKGSPEDNEQKQLFVEQHKHYLDEIIEQISEFSKRVILADANLDKVLSAYNKHRDKPIREQAENIIHLFTLTNLGAPAAFKYFDTTIDRKRYTSTKEVLDATLIHQSITGLYETRIDLSQLGGDGGGGSGGSGGSGGSGGSGGLDDEYRLYSPLVKPDQNIQFWLEQFPQAWAETAGMGLAKQVPPQVIQLKASATPVSVRQYPLSKEAQEGIRPHVQRLIQQGILVPVQSPWNTPLLPVRKPGTNDYRPVQDLREVNKRVQDIHPTVPNPYNLLCALPPQRSWYTVLDLKDAFFCLRLHPTSQPLFAFEWRDPGTGRTGQLTWTRLPQGFKNSPTIFNEALHRDLANFRIQHPQVTLLQYVDDLLLAGATKQDCLEGTKALLLELSDLGYRASAKKAQICRREVTYLGYSLRDGQRWLTEARKKTVVQIPAPTTAKQVREFLGKAGFCRLFIPGFATLAAPLYPLTKPKGEFSWAPEHQKAFDAIKKALLSAPALALPDVTKPFTLYVDERKGVARGVLTQTLGPWRRPVAYLSKKLDPVASGWPVCLKAIAAVAILVKDADKLTLGQNITVIAPHALENIVRQPPDRWMTNARMTHYQSLLLTERVTFAPPAALNPATLLPEETDEPVTHDCHQLLIEETGVRKDLTDIPLTGEVLTWFTDGSSYVVEGKRMAGAAVVDGTRTIWASSLPEGTSAQKAELMALTQALRLAEGKSINIYTDSRYAFATAHVHGAIYKQRGWLTSAGREIKNKEEILSLLEALHLPKRLAIIHCPGHQKAKDPISRGNQMADRVAKQAAQGVNLLPAGKRTADGSEFEKRTADGSEFESPKKKAKVE

SEQ ID NO: 53 - protein, 2088 aa, synthetic construct
MPAAKRVKLDGGDKKYSIGLDIGTNSVGWAVITDEYKVPSKKFKVLGNTDRHSIKKNLIGALLFDSGETAEATRLKRTARRRYTRRKNRICYLQEIFSNEMAKVDDSFFHRLEESFLVEEDKKHERHPIFGNIVDEVAYHEKYPTIYHLRKKLVDSTDKADLRLIYLALAHMIKFRGHFLIEGDLNPDNSDVDKLFIQLVQTYNQLFEENPINASGVDAKAILSARLSKSRRLENLIAQLPGEKKNGLFGNLIALSLGLTPNFKSNFDLAEDAKLQLSKDTYDDDLDNLLAQIGDQYADLFLAAKNLSDAILLSDILRVNTEITKAPLSASMIKRYDEHHQDLTLLKALVRQQLPEKYKEIFFDQSKNGYAGYIDGGASQEEFYKFIKPILEKMDGTEELLVKLNREDLLRKQRTFDNGSIPHQIHLGELHAILRRQEDFYPFLKDNREKIEKILTFRIPYYVGPLARGNSRFAWMTRKSEETITPWNFEEVVDKGASAQSFIERMTNFDKNLPNEKVLPKHSLLYEYFTVYNELTKVKYVTEGMRKPAFLSGEQKKAIVDLLFKTNRKVTVKQLKEDYFKKIECFDSVEISGVEDRFNASLGTYHDLLKIIKDKDFLDNEENEDILEDIVLTLTLFEDREMIEERLKTYAHLFDDKVMKQLKRRRYTGWGRLSRKLINGIRDKQSGKTILDFLKSDGFANRNFMQLIHDDSLTFKEDIQKAQVSGQGDSLHEHIANLAGSPAIKKGILQTVKVVDELVKVMGRHKPENIVIEMARENQTTQKGQKNSRERMKRIEEGIKELGSQILKEHPVENTQLQNEKLYLYYLQNGRDMYVDQELDINRLSDYDVDHIVPQSFLKDDSIDNKVLTRSDKARGKSDNVPSEEVVKKMKNYWRQLLNAKLITQRKFDNLTKAERGGLSELDKAGFIKRQLVETRQITKHVAQILDSRMNTKYDENDKLIREVKVITLKSKLVSDFRKDFQFYKVREINNYHHAHDAYLNAVVGTALIKKYPKLESEFVYGDYKVYDVRKMIAKSEQEIGKATAKYFFYSNIMNFFKTEITLANGEIRKRPLIETNGETGEIVWDKGRDFATVRKVLSMPQVNIVKKTEVQTGGFSKESILPKRNSDKLIARKKDWDPKKYGGFDSPTVAYSVLVVAKVEKGKSKKLKSVKELLGITIMERSSFEKNPIDFLEAKGYKEVKKDLIIKLPKYSLFELENGRKRMLASAGELQKGNELALPSKYVNFLYLASHYEKLKGSPEDNEQKQLFVEQHKHYLDEIIEQISEFSKRVILADANLDKVLSAYNKHRDKPIREQAENIIHLFTLTNLGAPAAFKYFDTTIDRKRYTSTKEVLDATLIHQSITGLYETRIDLSQLGGDGGEAAAKGGGGSSGGLDDEYRLYSPLVKPDQNIQFWLEQFPQAWAETAGMGLAKQVPPQVIQLKASATPVSVRQYPLSKEAQEGIRPHVQRLIQQGILVPVQSPWNTPLLPVRKPGTNDYRPVQDLREVNKRVQDIHPTVPNPYNLLCALPPQRSWYTVLDLKDAFFCLRLHPTSQPLFAFEWRDPGTGRTGQLTWTRLPQGFKNSPTIFNEALHRDLANFRIQHPQVTLLQYVDDLLLAGATKQDCLEGTKALLLELSDLGYRASAKKAQICRREVTYLGYSLRDGQRWLTEARKKTVVQIPAPTTAKQVREFLGKAGFCRLFIPGFATLAAPLYPLTKPKGEFSWAPEHQKAFDAIKKALLSAPALALPDVTKPFTLYVDERKGVARGVLTQTLGPWRRPVAYLSKKLDPVASGWPVCLKAIAAVAILVKDADKLTLGQNITVIAPHALENIVRQPPDRWMTNARMTHYQSLLLTERVTFAPPAALNPATLLPEETDEPVTHDCHQLLIEETGVRKDLTDIPLTGEVLTWFTDGSSYVVEGKRMAGAAVVDGTRTIWASSLPEGTSAQKAELMALTQALRLAEGKSINIYTDSRYAFATAHVHGAIYKQRGWLTSAGREIKNKEEILSLLEALHLPKRLAIIHCPGHQKAKDPISRGNQMADRVAKQAAQGVNLLPAGKRTADGSEFEKRTADGSEFESPKKKAKVE

SEQ ID NO: 54 - protein, 2090 aa, synthetic construct
MPAAKRVKLDGGDKKYSIGLDIGTNSVGWAVITDEYKVPSKKFKVLGNTDRHSIKKNLIGALLFDSGETAEATRLKRTARRRYTRRKNRICYLQEIFSNEMAKVDDSFFHRLEESFLVEEDKKHERHPIFGNIVDEVAYHEKYPTIYHLRKKLVDSTDKADLRLIYLALAHMIKFRGHFLIEGDLNPDNSDVDKLFIQLVQTYNQLFEENPINASGVDAKAILSARLSKSRRLENLIAQLPGEKKNGLFGNLIALSLGLTPNFKSNFDLAEDAKLQLSKDTYDDDLDNLLAQIGDQYADLFLAAKNLSDAILLSDILRVNTEITKAPLSASMIKRYDEHHQDLTLLKALVRQQLPEKYKEIFFDQSKNGYAGYIDGGASQEEFYKFIKPILEKMDGTEELLVKLNREDLLRKQRTFDNGSIPHQIHLGELHAILRRQEDFYPFLKDNREKIEKILTFRIPYYVGPLARGNSRFAWMTRKSEETITPWNFEEVVDKGASAQSFIERMTNFDKNLPNEKVLPKHSLLYEYFTVYNELTKVKYVTEGMRKPAFLSGEQKKAIVDLLFKTNRKVTVKQLKEDYFKKIECFDSVEISGVEDRFNASLGTYHDLLKIIKDKDFLDNEENEDILEDIVLTLTLFEDREMIEERLKTYAHLFDDKVMKQLKRRRYTGWGRLSRKLINGIRDKQSGKTILDFLKSDGFANRNFMQLIHDDSLTFKEDIQKAQVSGQGDSLHEHIANLAGSPAIKKGILQTVKVVDELVKVMGRHKPENIVIEMARENQTTQKGQKNSRERMKRIEEGIKELGSQILKEHPVENTQLQNEKLYLYYLQNGRDMYVDQELDINRLSDYDVDHIVPQSFLKDDSIDNKVLTRSDKARGKSDNVPSEEVVKKMKNYWRQLLNAKLITQRKFDNLTKAERGGLSELDKAGFIKRQLVETRQITKHVAQILDSRMNTKYDENDKLIREVKVITLKSKLVSDFRKDFQFYKVREINNYHHAHDAYLNAVVGTALIKKYPKLESEFVYGDYKVYDVRKMIAKSEQEIGKATAKYFFYSNIMNFFKTEITLANGEIRKRPLIETNGETGEIVWDKGRDFATVRKVLSMPQVNIVKKTEVQTGGFSKESILPKRNSDKLIARKKDWDPKKYGGFDSPTVAYSVLVVAKVEKGKSKKLKSVKELLGITIMERSSFEKNPIDFLEAKGYKEVKKDLIIKLPKYSLFELENGRKRMLASAGELQKGNELALPSKYVNFLYLASHYEKLKGSPEDNEQKQLFVEQHKHYLDEIIEQISEFSKRVILADANLDKVLSAYNKHRDKPIREQAENIIHLFTLTNLGAPAAFKYFDTTIDRKRYTSTKEVLDATLIHQSITGLYETRIDLSQLGGDGGPAPAPAPAPAPAPGGLDDEYRLYSPLVKPDQNIQFWLEQFPQAWAETAGMGLAKQVPPQVIQLKASATPVSVRQYPLSKEAQEGIRPHVQRLIQQGILVPVQSPWNTPLLPVRKPGTNDYRPVQDLREVNKRVQDIHPTVPNPYNLLCALPPQRSWYTVLDLKDAFFCLRLHPTSQPLFAFEWRDPGTGRTGQLTWTRLPQGFKNSPTIFNEALHRDLANFRIQHPQVTLLQYVDDLLLAGATKQDCLEGTKALLLELSDLGYRASAKKAQICRREVTYLGYSLRDGQRWLTEARKKTVVQIPAPTTAKQVREFLGKAGFCRLFIPGFATLAAPLYPLTKPKGEFSWAPEHQKAFDAIKKALLSAPALALPDVTKPFTLYVDERKGVARGVLTQTLGPWRRPVAYLSKKLDPVASGWPVCLKAIAAVAILVKDADKLTLGQNITVIAPHALENIVRQPPDRWMTNARMTHYQSLLLTERVTFAPPAALNPATLLPEETDEPVTHDCHQLLIEETGVRKDLTDIPLTGEVLTWFTDGSSYVVEGKRMAGAAVVDGTRTIWASSLPEGTSAQKAELMALTQALRLAEGKSINIYTDSRYAFATAHVHGAIYKQRGWLTSAGREIKNKEEILSLLEALHLPKRLAIIHCPGHQKAKDPISRGNQMADRVAKQAAQGVNLLPAGKRTADGSEFEKRTADGSEFESPKKKAKVE

SEQ ID NO: 55 - protein, 2087 aa, synthetic construct
MPAAKRVKLDGGDKKYSIGLDIGTNSVGWAVITDEYKVPSKKFKVLGNTDRHSIKKNLIGALLFDSGETAEATRLKRTARRRYTRRKNRICYLQEIFSNEMAKVDDSFFHRLEESFLVEEDKKHERHPIFGNIVDEVAYHEKYPTIYHLRKKLVDSTDKADLRLIYLALAHMIKFRGHFLIEGDLNPDNSDVDKLFIQLVQTYNQLFEENPINASGVDAKAILSARLSKSRRLENLIAQLPGEKKNGLFGNLIALSLGLTPNFKSNFDLAEDAKLQLSKDTYDDDLDNLLAQIGDQYADLFLAAKNLSDAILLSDILRVNTEITKAPLSASMIKRYDEHHQDLTLLKALVRQQLPEKYKEIFFDQSKNGYAGYIDGGASQEEFYKFIKPILEKMDGTEELLVKLNREDLLRKQRTFDNGSIPHQIHLGELHAILRRQEDFYPFLKDNREKIEKILTFRIPYYVGPLARGNSRFAWMTRKSEETITPWNFEEVVDKGASAQSFIERMTNFDKNLPNEKVLPKHSLLYEYFTVYNELTKVKYVTEGMRKPAFLSGEQKKAIVDLLFKTNRKVTVKQLKEDYFKKIECFDSVEISGVEDRFNASLGTYHDLLKIIKDKDFLDNEENEDILEDIVLTLTLFEDREMIEERLKTYAHLFDDKVMKQLKRRRYTGWGRLSRKLINGIRDKQSGKTILDFLKSDGFANRNFMQLIHDDSLTFKEDIQKAQVSGQGDSLHEHIANLAGSPAIKKGILQTVKVVDELVKVMGRHKPENIVIEMARENQTTQKGQKNSRERMKRIEEGIKELGSQILKEHPVENTQLQNEKLYLYYLQNGRDMYVDQELDINRLSDYDVDHIVPQSFLKDDSIDNKVLTRSDKARGKSDNVPSEEVVKKMKNYWRQLLNAKLITQRKFDNLTKAERGGLSELDKAGFIKRQLVETRQITKHVAQILDSRMNTKYDENDKLIREVKVITLKSKLVSDFRKDFQFYKVREINNYHHAHDAYLNAVVGTALIKKYPKLESEFVYGDYKVYDVRKMIAKSEQEIGKATAKYFFYSNIMNFFKTEITLANGEIRKRPLIETNGETGEIVWDKGRDFATVRKVLSMPQVNIVKKTEVQTGGFSKESILPKRNSDKLIARKKDWDPKKYGGFDSPTVAYSVLVVAKVEKGKSKKLKSVKELLGITIMERSSFEKNPIDFLEAKGYKEVKKDLIIKLPKYSLFELENGRKRMLASAGELQKGNELALPSKYVNFLYLASHYEKLKGSPEDNEQKQLFVEQHKHYLDEIIEQISEFSKRVILADANLDKVLSAYNKHRDKPIREQAENIIHLFTLTNLGAPAAFKYFDTTIDRKRYTSTKEVLDATLIHQSITGLYETRIDLSQLGGDGGGGGGSGGGGSGGLDDEYRLYSPLVKPDQNIQFWLEQFPQAWAETAGMGLAKQVPPQVIQLKASATPVSVRQYPLSKEAQEGIRPHVQRLIQQGILVPVQSPWNTPLLPVRKPGTNDYRPVQDLREVNKRVQDIHPTVPNPYNLLCALPPQRSWYTVLDLKDAFFCLRLHPTSQPLFAFEWRDPGTGRTGQLTWTRLPQGFKNSPTIFNEALHRDLANFRIQHPQVTLLQYVDDLLLAGATKQDCLEGTKALLLELSDLGYRASAKKAQICRREVTYLGYSLRDGQRWLTEARKKTVVQIPAPTTAKQVREFLGKAGFCRLFIPGFATLAAPLYPLTKPKGEFSWAPEHQKAFDAIKKALLSAPALALPDVTKPFTLYVDERKGVARGVLTQTLGPWRRPVAYLSKKLDPVASGWPVCLKAIAAVAILVKDADKLTLGQNITVIAPHALENIVRQPPDRWMTNARMTHYQSLLLTERVTFAPPAALNPATLLPEETDEPVTHDCHQLLIEETGVRKDLTDIPLTGEVLTWFTDGSSYVVEGKRMAGAAVVDGTRTIWASSLPEGTSAQKAELMALTQALRLAEGKSINIYTDSRYAFATAHVHGAIYKQRGWLTSAGREIKNKEEILSLLEALHLPKRLAIIHCPGHQKAKDPISRGNQMADRVAKQAAQGVNLLPAGKRTADGSEFEKRTADGSEFESPKKKAKVE

SEQ ID NO: 56 - protein, 2092 aa, synthetic construct
MPAAKRVKLDGGDKKYSIGLDIGTNSVGWAVITDEYKVPSKKFKVLGNTDRHSIKKNLIGALLFDSGETAEATRLKRTARRRYTRRKNRICYLQEIFSNEMAKVDDSFFHRLEESFLVEEDKKHERHPIFGNIVDEVAYHEKYPTIYHLRKKLVDSTDKADLRLIYLALAHMIKFRGHFLIEGDLNPDNSDVDKLFIQLVQTYNQLFEENPINASGVDAKAILSARLSKSRRLENLIAQLPGEKKNGLFGNLIALSLGLTPNFKSNFDLAEDAKLQLSKDTYDDDLDNLLAQIGDQYADLFLAAKNLSDAILLSDILRVNTEITKAPLSASMIKRYDEHHQDLTLLKALVRQQLPEKYKEIFFDQSKNGYAGYIDGGASQEEFYKFIKPILEKMDGTEELLVKLNREDLLRKQRTFDNGSIPHQIHLGELHAILRRQEDFYPFLKDNREKIEKILTFRIPYYVGPLARGNSRFAWMTRKSEETITPWNFEEVVDKGASAQSFIERMTNFDKNLPNEKVLPKHSLLYEYFTVYNELTKVKYVTEGMRKPAFLSGEQKKAIVDLLFKTNRKVTVKQLKEDYFKKIECFDSVEISGVEDRFNASLGTYHDLLKIIKDKDFLDNEENEDILEDIVLTLTLFEDREMIEERLKTYAHLFDDKVMKQLKRRRYTGWGRLSRKLINGIRDKQSGKTILDFLKSDGFANRNFMQLIHDDSLTFKEDIQKAQVSGQGDSLHEHIANLAGSPAIKKGILQTVKVVDELVKVMGRHKPENIVIEMARENQTTQKGQKNSRERMKRIEEGIKELGSQILKEHPVENTQLQNEKLYLYYLQNGRDMYVDQELDINRLSDYDVDHIVPQSFLKDDSIDNKVLTRSDKARGKSDNVPSEEVVKKMKNYWRQLLNAKLITQRKFDNLTKAERGGLSELDKAGFIKRQLVETRQITKHVAQILDSRMNTKYDENDKLIREVKVITLKSKLVSDFRKDFQFYKVREINNYHHAHDAYLNAVVGTALIKKYPKLESEFVYGDYKVYDVRKMIAKSEQEIGKATAKYFFYSNIMNFFKTEITLANGEIRKRPLIETNGETGEIVWDKGRDFATVRKVLSMPQVNIVKKTEVQTGGFSKESILPKRNSDKLIARKKDWDPKKYGGFDSPTVAYSVLVVAKVEKGKSKKLKSVKELLGITIMERSSFEKNPIDFLEAKGYKEVKKDLIIKLPKYSLFELENGRKRMLASAGELQKGNELALPSKYVNFLYLASHYEKLKGSPEDNEQKQLFVEQHKHYLDEIIEQISEFSKRVILADANLDKVLSAYNKHRDKPIREQAENIIHLFTLTNLGAPAAFKYFDTTIDRKRYTSTKEVLDATLIHQSITGLYETRIDLSQLGGDGGEAAAKGGGGSEAAAKGGLDDEYRLYSPLVKPDQNIQFWLEQFPQAWAETAGMGLAKQVPPQVIQLKASATPVSVRQYPLSKEAQEGIRPHVQRLIQQGILVPVQSPWNTPLLPVRKPGTNDYRPVQDLREVNKRVQDIHPTVPNPYNLLCALPPQRSWYTVLDLKDAFFCLRLHPTSQPLFAFEWRDPGTGRTGQLTWTRLPQGFKNSPTIFNEALHRDLANFRIQHPQVTLLQYVDDLLLAGATKQDCLEGTKALLLELSDLGYRASAKKAQICRREVTYLGYSLRDGQRWLTEARKKTVVQIPAPTTAKQVREFLGKAGFCRLFIPGFATLAAPLYPLTKPKGEFSWAPEHQKAFDAIKKALLSAPALALPDVTKPFTLYVDERKGVARGVLTQTLGPWRRPVAYLSKKLDPVASGWPVCLKAIAAVAILVKDADKLTLGQNITVIAPHALENIVRQPPDRWMTNARMTHYQSLLLTERVTFAPPAALNPATLLPEETDEPVTHDCHQLLIEETGVRKDLTDIPLTGEVLTWFTDGSSYVVEGKRMAGAAVVDGTRTIWASSLPEGTSAQKAELMALTQALRLAEGKSINIYTDSRYAFATAHVHGAIYKQRGWLTSAGREIKNKEEILSLLEALHLPKRLAIIHCPGHQKAKDPISRGNQMADRVAKQAAQGVNLLPAGKRTADGSEFEKRTADGSEFESPKKKAKVE

SEQ ID NO: 57 - protein, 2085 aa, synthetic construct
MPAAKRVKLDGGDKKYSIGLDIGTNSVGWAVITDEYKVPSKKFKVLGNTDRHSIKKNLIGALLFDSGETAEATRLKRTARRRYTRRKNRICYLQEIFSNEMAKVDDSFFHRLEESFLVEEDKKHERHPIFGNIVDEVAYHEKYPTIYHLRKKLVDSTDKADLRLIYLALAHMIKFRGHFLIEGDLNPDNSDVDKLFIQLVQTYNQLFEENPINASGVDAKAILSARLSKSRRLENLIAQLPGEKKNGLFGNLIALSLGLTPNFKSNFDLAEDAKLQLSKDTYDDDLDNLLAQIGDQYADLFLAAKNLSDAILLSDILRVNTEITKAPLSASMIKRYDEHHQDLTLLKALVRQQLPEKYKEIFFDQSKNGYAGYIDGGASQEEFYKFIKPILEKMDGTEELLVKLNREDLLRKQRTFDNGSIPHQIHLGELHAILRRQEDFYPFLKDNREKIEKILTFRIPYYVGPLARGNSRFAWMTRKSEETITPWNFEEVVDKGASAQSFIERMTNFDKNLPNEKVLPKHSLLYEYFTVYNELTKVKYVTEGMRKPAFLSGEQKKAIVDLLFKTNRKVTVKQLKEDYFKKIECFDSVEISGVEDRFNASLGTYHDLLKIIKDKDFLDNEENEDILEDIVLTLTLFEDREMIEERLKTYAHLFDDKVMKQLKRRRYTGWGRLSRKLINGIRDKQSGKTILDFLKSDGFANRNFMQLIHDDSLTFKEDIQKAQVSGQGDSLHEHIANLAGSPAIKKGILQTVKVVDELVKVMGRHKPENIVIEMARENQTTQKGQKNSRERMKRIEEGIKELGSQILKEHPVENTQLQNEKLYLYYLQNGRDMYVDQELDINRLSDYDVDHIVPQSFLKDDSIDNKVLTRSDKARGKSDNVPSEEVVKKMKNYWRQLLNAKLITQRKFDNLTKAERGGLSELDKAGFIKRQLVETRQITKHVAQILDSRMNTKYDENDKLIREVKVITLKSKLVSDFRKDFQFYKVREINNYHHAHDAYLNAVVGTALIKKYPKLESEFVYGDYKVYDVRKMIAKSEQEIGKATAKYFFYSNIMNFFKTEITLANGEIRKRPLIETNGETGEIVWDKGRDFATVRKVLSMPQVNIVKKTEVQTGGFSKESILPKRNSDKLIARKKDWDPKKYGGFDSPTVAYSVLVVAKVEKGKSKKLKSVKELLGITIMERSSFEKNPIDFLEAKGYKEVKKDLIIKLPKYSLFELENGRKRMLASAGELQKGNELALPSKYVNFLYLASHYEKLKGSPEDNEQKQLFVEQHKHYLDEIIEQISEFSKRVILADANLDKVLSAYNKHRDKPIREQAENIIHLFTLTNLGAPAAFKYFDTTIDRKRYTSTKEVLDATLIHQSITGLYETRIDLSQLGGDGGGGGGGGGGGGLDDEYRLYSPLVKPDQNIQFWLEQFPQAWAETAGMGLAKQVPPQVIQLKASATPVSVRQYPLSKEAQEGIRPHVQRLIQQGILVPVQSPWNTPLLPVRKPGTNDYRPVQDLREVNKRVQDIHPTVPNPYNLLCALPPQRSWYTVLDLKDAFFCLRLHPTSQPLFAFEWRDPGTGRTGQLTWTRLPQGFKNSPTIFNEALHRDLANFRIQHPQVTLLQYVDDLLLAGATKQDCLEGTKALLLELSDLGYRASAKKAQICRREVTYLGYSLRDGQRWLTEARKKTVVQIPAPTTAKQVREFLGKAGFCRLFIPGFATLAAPLYPLTKPKGEFSWAPEHQKAFDAIKKALLSAPALALPDVTKPFTLYVDERKGVARGVLTQTLGPWRRPVAYLSKKLDPVASGWPVCLKAIAAVAILVKDADKLTLGQNITVIAPHALENIVRQPPDRWMTNARMTHYQSLLLTERVTFAPPAALNPATLLPEETDEPVTHDCHQLLIEETGVRKDLTDIPLTGEVLTWFTDGSSYVVEGKRMAGAAVVDGTRTIWASSLPEGTSAQKAELMALTQALRLAEGKSINIYTDSRYAFATAHVHGAIYKQRGWLTSAGREIKNKEEILSLLEALHLPKRLAIIHCPGHQKAKDPISRGNQMADRVAKQAAQGVNLLPAGKRTADGSEFEKRTADGSEFESPKKKAKVE

SEQ ID NO: 58 - protein, 2086 aa, synthetic construct
MPAAKRVKLDGGDKKYSIGLDIGTNSVGWAVITDEYKVPSKKFKVLGNTDRHSIKKNLIGALLFDSGETAEATRLKRTARRRYTRRKNRICYLQEIFSNEMAKVDDSFFHRLEESFLVEEDKKHERHPIFGNIVDEVAYHEKYPTIYHLRKKLVDSTDKADLRLIYLALAHMIKFRGHFLIEGDLNPDNSDVDKLFIQLVQTYNQLFEENPINASGVDAKAILSARLSKSRRLENLIAQLPGEKKNGLFGNLIALSLGLTPNFKSNFDLAEDAKLQLSKDTYDDDLDNLLAQIGDQYADLFLAAKNLSDAILLSDILRVNTEITKAPLSASMIKRYDEHHQDLTLLKALVRQQLPEKYKEIFFDQSKNGYAGYIDGGASQEEFYKFIKPILEKMDGTEELLVKLNREDLLRKQRTFDNGSIPHQIHLGELHAILRRQEDFYPFLKDNREKIEKILTFRIPYYVGPLARGNSRFAWMTRKSEETITPWNFEEVVDKGASAQSFIERMTNFDKNLPNEKVLPKHSLLYEYFTVYNELTKVKYVTEGMRKPAFLSGEQKKAIVDLLFKTNRKVTVKQLKEDYFKKIECFDSVEISGVEDRFNASLGTYHDLLKIIKDKDFLDNEENEDILEDIVLTLTLFEDREMIEERLKTYAHLFDDKVMKQLKRRRYTGWGRLSRKLINGIRDKQSGKTILDFLKSDGFANRNFMQLIHDDSLTFKEDIQKAQVSGQGDSLHEHIANLAGSPAIKKGILQTVKVVDELVKVMGRHKPENIVIEMARENQTTQKGQKNSRERMKRIEEGIKELGSQILKEHPVENTQLQNEKLYLYYLQNGRDMYVDQELDINRLSDYDVDHIVPQSFLKDDSIDNKVLTRSDKARGKSDNVPSEEVVKKMKNYWRQLLNAKLITQRKFDNLTKAERGGLSELDKAGFIKRQLVETRQITKHVAQILDSRMNTKYDENDKLIREVKVITLKSKLVSDFRKDFQFYKVREINNYHHAHDAYLNAVVGTALIKKYPKLESEFVYGDYKVYDVRKMIAKSEQEIGKATAKYFFYSNIMNFFKTEITLANGEIRKRPLIETNGETGEIVWDKGRDFATVRKVLSMPQVNIVKKTEVQTGGFSKESILPKRNSDKLIARKKDWDPKKYGGFDSPTVAYSVLVVAKVEKGKSKKLKSVKELLGITIMERSSFEKNPIDFLEAKGYKEVKKDLIIKLPKYSLFELENGRKRMLASAGELQKGNELALPSKYVNFLYLASHYEKLKGSPEDNEQKQLFVEQHKHYLDEIIEQISEFSKRVILADANLDKVLSAYNKHRDKPIREQAENIIHLFTLTNLGAPAAFKYFDTTIDRKRYTSTKEVLDATLIHQSITGLYETRIDLSQLGGDGGGGSPAPGGGGGLDDEYRLYSPLVKPDQNIQFWLEQFPQAWAETAGMGLAKQVPPQVIQLKASATPVSVRQYPLSKEAQEGIRPHVQRLIQQGILVPVQSPWNTPLLPVRKPGTNDYRPVQDLREVNKRVQDIHPTVPNPYNLLCALPPQRSWYTVLDLKDAFFCLRLHPTSQPLFAFEWRDPGTGRTGQLTWTRLPQGFKNSPTIFNEALHRDLANFRIQHPQVTLLQYVDDLLLAGATKQDCLEGTKALLLELSDLGYRASAKKAQICRREVTYLGYSLRDGQRWLTEARKKTVVQIPAPTTAKQVREFLGKAGFCRLFIPGFATLAAPLYPLTKPKGEFSWAPEHQKAFDAIKKALLSAPALALPDVTKPFTLYVDERKGVARGVLTQTLGPWRRPVAYLSKKLDPVASGWPVCLKAIAAVAILVKDADKLTLGQNITVIAPHALENIVRQPPDRWMTNARMTHYQSLLLTERVTFAPPAALNPATLLPEETDEPVTHDCHQLLIEETGVRKDLTDIPLTGEVLTWFTDGSSYVVEGKRMAGAAVVDGTRTIWASSLPEGTSAQKAELMALTQALRLAEGKSINIYTDSRYAFATAHVHGAIYKQRGWLTSAGREIKNKEEILSLLEALHLPKRLAIIHCPGHQKAKDPISRGNQMADRVAKQAAQGVNLLPAGKRTADGSEFEKRTADGSEFESPKKKAKVE

SEQ ID NO: 59 - protein, 2083 aa, synthetic construct
MPAAKRVKLDGGDKKYSIGLDIGTNSVGWAVITDEYKVPSKKFKVLGNTDRHSIKKNLIGALLFDSGETAEATRLKRTARRRYTRRKNRICYLQEIFSNEMAKVDDSFFHRLEESFLVEEDKKHERHPIFGNIVDEVAYHEKYPTIYHLRKKLVDSTDKADLRLIYLALAHMIKFRGHFLIEGDLNPDNSDVDKLFIQLVQTYNQLFEENPINASGVDAKAILSARLSKSRRLENLIAQLPGEKKNGLFGNLIALSLGLTPNFKSNFDLAEDAKLQLSKDTYDDDLDNLLAQIGDQYADLFLAAKNLSDAILLSDILRVNTEITKAPLSASMIKRYDEHHQDLTLLKALVRQQLPEKYKEIFFDQSKNGYAGYIDGGASQEEFYKFIKPILEKMDGTEELLVKLNREDLLRKQRTFDNGSIPHQIHLGELHAILRRQEDFYPFLKDNREKIEKILTFRIPYYVGPLARGNSRFAWMTRKSEETITPWNFEEVVDKGASAQSFIERMTNFDKNLPNEKVLPKHSLLYEYFTVYNELTKVKYVTEGMRKPAFLSGEQKKAIVDLLFKTNRKVTVKQLKEDYFKKIECFDSVEISGVEDRFNASLGTYHDLLKIIKDKDFLDNEENEDILEDIVLTLTLFEDREMIEERLKTYAHLFDDKVMKQLKRRRYTGWGRLSRKLINGIRDKQSGKTILDFLKSDGFANRNFMQLIHDDSLTFKEDIQKAQVSGQGDSLHEHIANLAGSPAIKKGILQTVKVVDELVKVMGRHKPENIVIEMARENQTTQKGQKNSRERMKRIEEGIKELGSQILKEHPVENTQLQNEKLYLYYLQNGRDMYVDQELDINRLSDYDVDHIVPQSFLKDDSIDNKVLTRSDKARGKSDNVPSEEVVKKMKNYWRQLLNAKLITQRKFDNLTKAERGGLSELDKAGFIKRQLVETRQITKHVAQILDSRMNTKYDENDKLIREVKVITLKSKLVSDFRKDFQFYKVREINNYHHAHDAYLNAVVGTALIKKYPKLESEFVYGDYKVYDVRKMIAKSEQEIGKATAKYFFYSNIMNFFKTEITLANGEIRKRPLIETNGETGEIVWDKGRDFATVRKVLSMPQVNIVKKTEVQTGGFSKESILPKRNSDKLIARKKDWDPKKYGGFDSPTVAYSVLVVAKVEKGKSKKLKSVKELLGITIMERSSFEKNPIDFLEAKGYKEVKKDLIIKLPKYSLFELENGRKRMLASAGELQKGNELALPSKYVNFLYLASHYEKLKGSPEDNEQKQLFVEQHKHYLDEIIEQISEFSKRVILADANLDKVLSAYNKHRDKPIREQAENIIHLFTLTNLGAPAAFKYFDTTIDRKRYTSTKEVLDATLIHQSITGLYETRIDLSQLGGDGGGGGGGGGGLDDEYRLYSPLVKPDQNIQFWLEQFPQAWAETAGMGLAKQVPPQVIQLKASATPVSVRQYPLSKEAQEGIRPHVQRLIQQGILVPVQSPWNTPLLPVRKPGTNDYRPVQDLREVNKRVQDIHPTVPNPYNLLCALPPQRSWYTVLDLKDAFFCLRLHPTSQPLFAFEWRDPGTGRTGQLTWTRLPQGFKNSPTIFNEALHRDLANFRIQHPQVTLLQYVDDLLLAGATKQDCLEGTKALLLELSDLGYRASAKKAQICRREVTYLGYSLRDGQRWLTEARKKTVVQIPAPTTAKQVREFLGKAGFCRLFIPGFATLAAPLYPLTKPKGEFSWAPEHQKAFDAIKKALLSAPALALPDVTKPFTLYVDERKGVARGVLTQTLGPWRRPVAYLSKKLDPVASGWPVCLKAIAAVAILVKDADKLTLGQNITVIAPHALENIVRQPPDRWMTNARMTHYQSLLLTERVTFAPPAALNPATLLPEETDEPVTHDCHQLLIEETGVRKDLTDIPLTGEVLTWFTDGSSYVVEGKRMAGAAVVDGTRTIWASSLPEGTSAQKAELMALTQALRLAEGKSINIYTDSRYAFATAHVHGAIYKQRGWLTSAGREIKNKEEILSLLEALHLPKRLAIIHCPGHQKAKDPISRGNQMADRVAKQAAQGVNLLPAGKRTADGSEFEKRTADGSEFESPKKKAKVE

SEQ ID NO: 60 - protein, 2086 aa, synthetic construct
MPAAKRVKLDGGDKKYSIGLDIGTNSVGWAVITDEYKVPSKKFKVLGNTDRHSIKKNLIGALLFDSGETAEATRLKRTARRRYTRRKNRICYLQEIFSNEMAKVDDSFFHRLEESFLVEEDKKHERHPIFGNIVDEVAYHEKYPTIYHLRKKLVDSTDKADLRLIYLALAHMIKFRGHFLIEGDLNPDNSDVDKLFIQLVQTYNQLFEENPINASGVDAKAILSARLSKSRRLENLIAQLPGEKKNGLFGNLIALSLGLTPNFKSNFDLAEDAKLQLSKDTYDDDLDNLLAQIGDQYADLFLAAKNLSDAILLSDILRVNTEITKAPLSASMIKRYDEHHQDLTLLKALVRQQLPEKYKEIFFDQSKNGYAGYIDGGASQEEFYKFIKPILEKMDGTEELLVKLNREDLLRKQRTFDNGSIPHQIHLGELHAILRRQEDFYPFLKDNREKIEKILTFRIPYYVGPLARGNSRFAWMTRKSEETITPWNFEEVVDKGASAQSFIERMTNFDKNLPNEKVLPKHSLLYEYFTVYNELTKVKYVTEGMRKPAFLSGEQKKAIVDLLFKTNRKVTVKQLKEDYFKKIECFDSVEISGVEDRFNASLGTYHDLLKIIKDKDFLDNEENEDILEDIVLTLTLFEDREMIEERLKTYAHLFDDKVMKQLKRRRYTGWGRLSRKLINGIRDKQSGKTILDFLKSDGFANRNFMQLIHDDSLTFKEDIQKAQVSGQGDSLHEHIANLAGSPAIKKGILQTVKVVDELVKVMGRHKPENIVIEMARENQTTQKGQKNSRERMKRIEEGIKELGSQILKEHPVENTQLQNEKLYLYYLQNGRDMYVDQELDINRLSDYDVDHIVPQSFLKDDSIDNKVLTRSDKARGKSDNVPSEEVVKKMKNYWRQLLNAKLITQRKFDNLTKAERGGLSELDKAGFIKRQLVETRQITKHVAQILDSRMNTKYDENDKLIREVKVITLKSKLVSDFRKDFQFYKVREINNYHHAHDAYLNAVVGTALIKKYPKLESEFVYGDYKVYDVRKMIAKSEQEIGKATAKYFFYSNIMNFFKTEITLANGEIRKRPLIETNGETGEIVWDKGRDFATVRKVLSMPQVNIVKKTEVQTGGFSKESILPKRNSDKLIARKKDWDPKKYGGFDSPTVAYSVLVVAKVEKGKSKKLKSVKELLGITIMERSSFEKNPIDFLEAKGYKEVKKDLIIKLPKYSLFELENGRKRMLASAGELQKGNELALPSKYVNFLYLASHYEKLKGSPEDNEQKQLFVEQHKHYLDEIIEQISEFSKRVILADANLDKVLSAYNKHRDKPIREQAENIIHLFTLTNLGAPAAFKYFDTTIDRKRYTSTKEVLDATLIHQSITGLYETRIDLSQLGGDGGPAPGGSGSSGGLDDEYRLYSPLVKPDQNIQFWLEQFPQAWAETAGMGLAKQVPPQVIQLKASATPVSVRQYPLSKEAQEGIRPHVQRLIQQGILVPVQSPWNTPLLPVRKPGTNDYRPVQDLREVNKRVQDIHPTVPNPYNLLCALPPQRSWYTVLDLKDAFFCLRLHPTSQPLFAFEWRDPGTGRTGQLTWTRLPQGFKNSPTIFNEALHRDLANFRIQHPQVTLLQYVDDLLLAGATKQDCLEGTKALLLELSDLGYRASAKKAQICRREVTYLGYSLRDGQRWLTEARKKTVVQIPAPTTAKQVREFLGKAGFCRLFIPGFATLAAPLYPLTKPKGEFSWAPEHQKAFDAIKKALLSAPALALPDVTKPFTLYVDERKGVARGVLTQTLGPWRRPVAYLSKKLDPVASGWPVCLKAIAAVAILVKDADKLTLGQNITVIAPHALENIVRQPPDRWMTNARMTHYQSLLLTERVTFAPPAALNPATLLPEETDEPVTHDCHQLLIEETGVRKDLTDIPLTGEVLTWFTDGSSYVVEGKRMAGAAVVDGTRTIWASSLPEGTSAQKAELMALTQALRLAEGKSINIYTDSRYAFATAHVHGAIYKQRGWLTSAGREIKNKEEILSLLEALHLPKRLAIIHCPGHQKAKDPISRGNQMADRVAKQAAQGVNLLPAGKRTADGSEFEKRTADGSEFESPKKKAKVE

SEQ ID NO: 61 - protein, 2083 aa, synthetic construct
MPAAKRVKLDGGDKKYSIGLDIGTNSVGWAVITDEYKVPSKKFKVLGNTDRHSIKKNLIGALLFDSGETAEATRLKRTARRRYTRRKNRICYLQEIFSNEMAKVDDSFFHRLEESFLVEEDKKHERHPIFGNIVDEVAYHEKYPTIYHLRKKLVDSTDKADLRLIYLALAHMIKFRGHFLIEGDLNPDNSDVDKLFIQLVQTYNQLFEENPINASGVDAKAILSARLSKSRRLENLIAQLPGEKKNGLFGNLIALSLGLTPNFKSNFDLAEDAKLQLSKDTYDDDLDNLLAQIGDQYADLFLAAKNLSDAILLSDILRVNTEITKAPLSASMIKRYDEHHQDLTLLKALVRQQLPEKYKEIFFDQSKNGYAGYIDGGASQEEFYKFIKPILEKMDGTEELLVKLNREDLLRKQRTFDNGSIPHQIHLGELHAILRRQEDFYPFLKDNREKIEKILTFRIPYYVGPLARGNSRFAWMTRKSEETITPWNFEEVVDKGASAQSFIERMTNFDKNLPNEKVLPKHSLLYEYFTVYNELTKVKYVTEGMRKPAFLSGEQKKAIVDLLFKTNRKVTVKQLKEDYFKKIECFDSVEISGVEDRFNASLGTYHDLLKIIKDKDFLDNEENEDILEDIVLTLTLFEDREMIEERLKTYAHLFDDKVMKQLKRRRYTGWGRLSRKLINGIRDKQSGKTILDFLKSDGFANRNFMQLIHDDSLTFKEDIQKAQVSGQGDSLHEHIANLAGSPAIKKGILQTVKVVDELVKVMGRHKPENIVIEMARENQTTQKGQKNSRERMKRIEEGIKELGSQILKEHPVENTQLQNEKLYLYYLQNGRDMYVDQELDINRLSDYDVDHIVPQSFLKDDSIDNKVLTRSDKARGKSDNVPSEEVVKKMKNYWRQLLNAKLITQRKFDNLTKAERGGLSELDKAGFIKRQLVETRQITKHVAQILDSRMNTKYDENDKLIREVKVITLKSKLVSDFRKDFQFYKVREINNYHHAHDAYLNAVVGTALIKKYPKLESEFVYGDYKVYDVRKMIAKSEQEIGKATAKYFFYSNIMNFFKTEITLANGEIRKRPLIETNGETGEIVWDKGRDFATVRKVLSMPQVNIVKKTEVQTGGFSKESILPKRNSDKLIARKKDWDPKKYGGFDSPTVAYSVLVVAKVEKGKSKKLKSVKELLGITIMERSSFEKNPIDFLEAKGYKEVKKDLIIKLPKYSLFELENGRKRMLASAGELQKGNELALPSKYVNFLYLASHYEKLKGSPEDNEQKQLFVEQHKHYLDEIIEQISEFSKRVILADANLDKVLSAYNKHRDKPIREQAENIIHLFTLTNLGAPAAFKYFDTTIDRKRYTSTKEVLDATLIHQSITGLYETRIDLSQLGGDGGPAPGSSGGLDDEYRLYSPLVKPDQNIQFWLEQFPQAWAETAGMGLAKQVPPQVIQLKASATPVSVRQYPLSKEAQEGIRPHVQRLIQQGILVPVQSPWNTPLLPVRKPGTNDYRPVQDLREVNKRVQDIHPTVPNPYNLLCALPPQRSWYTVLDLKDAFFCLRLHPTSQPLFAFEWRDPGTGRTGQLTWTRLPQGFKNSPTIFNEALHRDLANFRIQHPQVTLLQYVDDLLLAGATKQDCLEGTKALLLELSDLGYRASAKKAQICRREVTYLGYSLRDGQRWLTEARKKTVVQIPAPTTAKQVREFLGKAGFCRLFIPGFATLAAPLYPLTKPKGEFSWAPEHQKAFDAIKKALLSAPALALPDVTKPFTLYVDERKGVARGVLTQTLGPWRRPVAYLSKKLDPVASGWPVCLKAIAAVAILVKDADKLTLGQNITVIAPHALENIVRQPPDRWMTNARMTHYQSLLLTERVTFAPPAALNPATLLPEETDEPVTHDCHQLLIEETGVRKDLTDIPLTGEVLTWFTDGSSYVVEGKRMAGAAVVDGTRTIWASSLPEGTSAQKAELMALTQALRLAEGKSINIYTDSRYAFATAHVHGAIYKQRGWLTSAGREIKNKEEILSLLEALHLPKRLAIIHCPGHQKAKDPISRGNQMADRVAKQAAQGVNLLPAGKRTADGSEFEKRTADGSEFESPKKKAKVE

SEQ ID NO: 62 - protein, 2088 aa, synthetic construct
MPAAKRVKLDGGDKKYSIGLDIGTNSVGWAVITDEYKVPSKKFKVLGNTDRHSIKKNLIGALLFDSGETAEATRLKRTARRRYTRRKNRICYLQEIFSNEMAKVDDSFFHRLEESFLVEEDKKHERHPIFGNIVDEVAYHEKYPTIYHLRKKLVDSTDKADLRLIYLALAHMIKFRGHFLIEGDLNPDNSDVDKLFIQLVQTYNQLFEENPINASGVDAKAILSARLSKSRRLENLIAQLPGEKKNGLFGNLIALSLGLTPNFKSNFDLAEDAKLQLSKDTYDDDLDNLLAQIGDQYADLFLAAKNLSDAILLSDILRVNTEITKAPLSASMIKRYDEHHQDLTLLKALVRQQLPEKYKEIFFDQSKNGYAGYIDGGASQEEFYKFIKPILEKMDGTEELLVKLNREDLLRKQRTFDNGSIPHQIHLGELHAILRRQEDFYPFLKDNREKIEKILTFRIPYYVGPLARGNSRFAWMTRKSEETITPWNFEEVVDKGASAQSFIERMTNFDKNLPNEKVLPKHSLLYEYFTVYNELTKVKYVTEGMRKPAFLSGEQKKAIVDLLFKTNRKVTVKQLKEDYFKKIECFDSVEISGVEDRFNASLGTYHDLLKIIKDKDFLDNEENEDILEDIVLTLTLFEDREMIEERLKTYAHLFDDKVMKQLKRRRYTGWGRLSRKLINGIRDKQSGKTILDFLKSDGFANRNFMQLIHDDSLTFKEDIQKAQVSGQGDSLHEHIANLAGSPAIKKGILQTVKVVDELVKVMGRHKPENIVIEMARENQTTQKGQKNSRERMKRIEEGIKELGSQILKEHPVENTQLQNEKLYLYYLQNGRDMYVDQELDINRLSDYDVDHIVPQSFLKDDSIDNKVLTRSDKARGKSDNVPSEEVVKKMKNYWRQLLNAKLITQRKFDNLTKAERGGLSELDKAGFIKRQLVETRQITKHVAQILDSRMNTKYDENDKLIREVKVITLKSKLVSDFRKDFQFYKVREINNYHHAHDAYLNAVVGTALIKKYPKLESEFVYGDYKVYDVRKMIAKSEQEIGKATAKYFFYSNIMNFFKTEITLANGEIRKRPLIETNGETGEIVWDKGRDFATVRKVLSMPQVNIVKKTEVQTGGFSKESILPKRNSDKLIARKKDWDPKKYGGFDSPTVAYSVLVVAKVEKGKSKKLKSVKELLGITIMERSSFEKNPIDFLEAKGYKEVKKDLIIKLPKYSLFELENGRKRMLASAGELQKGNELALPSKYVNFLYLASHYEKLKGSPEDNEQKQLFVEQHKHYLDEIIEQISEFSKRVILADANLDKVLSAYNKHRDKPIREQAENIIHLFTLTNLGAPAAFKYFDTTIDRKRYTSTKEVLDATLIHQSITGLYETRIDLSQLGGDGGPAPAPAPAPAPGGLDDEYRLYSPLVKPDQNIQFWLEQFPQAWAETAGMGLAKQVPPQVIQLKASATPVSVRQYPLSKEAQEGIRPHVQRLIQQGILVPVQSPWNTPLLPVRKPGTNDYRPVQDLREVNKRVQDIHPTVPNPYNLLCALPPQRSWYTVLDLKDAFFCLRLHPTSQPLFAFEWRDPGTGRTGQLTWTRLPQGFKNSPTIFNEALHRDLANFRIQHPQVTLLQYVDDLLLAGATKQDCLEGTKALLLELSDLGYRASAKKAQICRREVTYLGYSLRDGQRWLTEARKKTVVQIPAPTTAKQVREFLGKAGFCRLFIPGFATLAAPLYPLTKPKGEFSWAPEHQKAFDAIKKALLSAPALALPDVTKPFTLYVDERKGVARGVLTQTLGPWRRPVAYLSKKLDPVASGWPVCLKAIAAVAILVKDADKLTLGQNITVIAPHALENIVRQPPDRWMTNARMTHYQSLLLTERVTFAPPAALNPATLLPEETDEPVTHDCHQLLIEETGVRKDLTDIPLTGEVLTWFTDGSSYVVEGKRMAGAAVVDGTRTIWASSLPEGTSAQKAELMALTQALRLAEGKSINIYTDSRYAFATAHVHGAIYKQRGWLTSAGREIKNKEEILSLLEALHLPKRLAIIHCPGHQKAKDPISRGNQMADRVAKQAAQGVNLLPAGKRTADGSEFEKRTADGSEFESPKKKAKVE

SEQ ID NO: 63 - protein, 2088 aa, synthetic construct
MPAAKRVKLDGGDKKYSIGLDIGTNSVGWAVITDEYKVPSKKFKVLGNTDRHSIKKNLIGALLFDSGETAEATRLKRTARRRYTRRKNRICYLQEIFSNEMAKVDDSFFHRLEESFLVEEDKKHERHPIFGNIVDEVAYHEKYPTIYHLRKKLVDSTDKADLRLIYLALAHMIKFRGHFLIEGDLNPDNSDVDKLFIQLVQTYNQLFEENPINASGVDAKAILSARLSKSRRLENLIAQLPGEKKNGLFGNLIALSLGLTPNFKSNFDLAEDAKLQLSKDTYDDDLDNLLAQIGDQYADLFLAAKNLSDAILLSDILRVNTEITKAPLSASMIKRYDEHHQDLTLLKALVRQQLPEKYKEIFFDQSKNGYAGYIDGGASQEEFYKFIKPILEKMDGTEELLVKLNREDLLRKQRTFDNGSIPHQIHLGELHAILRRQEDFYPFLKDNREKIEKILTFRIPYYVGPLARGNSRFAWMTRKSEETITPWNFEEVVDKGASAQSFIERMTNFDKNLPNEKVLPKHSLLYEYFTVYNELTKVKYVTEGMRKPAFLSGEQKKAIVDLLFKTNRKVTVKQLKEDYFKKIECFDSVEISGVEDRFNASLGTYHDLLKIIKDKDFLDNEENEDILEDIVLTLTLFEDREMIEERLKTYAHLFDDKVMKQLKRRRYTGWGRLSRKLINGIRDKQSGKTILDFLKSDGFANRNFMQLIHDDSLTFKEDIQKAQVSGQGDSLHEHIANLAGSPAIKKGILQTVKVVDELVKVMGRHKPENIVIEMARENQTTQKGQKNSRERMKRIEEGIKELGSQILKEHPVENTQLQNEKLYLYYLQNGRDMYVDQELDINRLSDYDVDHIVPQSFLKDDSIDNKVLTRSDKARGKSDNVPSEEVVKKMKNYWRQLLNAKLITQRKFDNLTKAERGGLSELDKAGFIKRQLVETRQITKHVAQILDSRMNTKYDENDKLIREVKVITLKSKLVSDFRKDFQFYKVREINNYHHAHDAYLNAVVGTALIKKYPKLESEFVYGDYKVYDVRKMIAKSEQEIGKATAKYFFYSNIMNFFKTEITLANGEIRKRPLIETNGETGEIVWDKGRDFATVRKVLSMPQVNIVKKTEVQTGGFSKESILPKRNSDKLIARKKDWDPKKYGGFDSPTVAYSVLVVAKVEKGKSKKLKSVKELLGITIMERSSFEKNPIDFLEAKGYKEVKKDLIIKLPKYSLFELENGRKRMLASAGELQKGNELALPSKYVNFLYLASHYEKLKGSPEDNEQKQLFVEQHKHYLDEIIEQISEFSKRVILADANLDKVLSAYNKHRDKPIREQAENIIHLFTLTNLGAPAAFKYFDTTIDRKRYTSTKEVLDATLIHQSITGLYETRIDLSQLGGDGGGGGEAAAKPAPGGLDDEYRLYSPLVKPDQNIQFWLEQFPQAWAETAGMGLAKQVPPQVIQLKASATPVSVRQYPLSKEAQEGIRPHVQRLIQQGILVPVQSPWNTPLLPVRKPGTNDYRPVQDLREVNKRVQDIHPTVPNPYNLLCALPPQRSWYTVLDLKDAFFCLRLHPTSQPLFAFEWRDPGTGRTGQLTWTRLPQGFKNSPTIFNEALHRDLANFRIQHPQVTLLQYVDDLLLAGATKQDCLEGTKALLLELSDLGYRASAKKAQICRREVTYLGYSLRDGQRWLTEARKKTVVQIPAPTTAKQVREFLGKAGFCRLFIPGFATLAAPLYPLTKPKGEFSWAPEHQKAFDAIKKALLSAPALALPDVTKPFTLYVDERKGVARGVLTQTLGPWRRPVAYLSKKLDPVASGWPVCLKAIAAVAILVKDADKLTLGQNITVIAPHALENIVRQPPDRWMTNARMTHYQSLLLTERVTFAPPAALNPATLLPEETDEPVTHDCHQLLIEETGVRKDLTDIPLTGEVLTWFTDGSSYVVEGKRMAGAAVVDGTRTIWASSLPEGTSAQKAELMALTQALRLAEGKSINIYTDSRYAFATAHVHGAIYKQRGWLTSAGREIKNKEEILSLLEALHLPKRLAIIHCPGHQKAKDPISRGNQMADRVAKQAAQGVNLLPAGKRTADGSEFEKRTADGSEFESPKKKAKVE

SEQ ID NO: 64 - protein, 2086 aa, synthetic construct
MPAAKRVKLDGGDKKYSIGLDIGTNSVGWAVITDEYKVPSKKFKVLGNTDRHSIKKNLIGALLFDSGETAEATRLKRTARRRYTRRKNRICYLQEIFSNEMAKVDDSFFHRLEESFLVEEDKKHERHPIFGNIVDEVAYHEKYPTIYHLRKKLVDSTDKADLRLIYLALAHMIKFRGHFLIEGDLNPDNSDVDKLFIQLVQTYNQLFEENPINASGVDAKAILSARLSKSRRLENLIAQLPGEKKNGLFGNLIALSLGLTPNFKSNFDLAEDAKLQLSKDTYDDDLDNLLAQIGDQYADLFLAAKNLSDAILLSDILRVNTEITKAPLSASMIKRYDEHHQDLTLLKALVRQQLPEKYKEIFFDQSKNGYAGYIDGGASQEEFYKFIKPILEKMDGTEELLVKLNREDLLRKQRTFDNGSIPHQIHLGELHAILRRQEDFYPFLKDNREKIEKILTFRIPYYVGPLARGNSRFAWMTRKSEETITPWNFEEVVDKGASAQSFIERMTNFDKNLPNEKVLPKHSLLYEYFTVYNELTKVKYVTEGMRKPAFLSGEQKKAIVDLLFKTNRKVTVKQLKEDYFKKIECFDSVEISGVEDRFNASLGTYHDLLKIIKDKDFLDNEENEDILEDIVLTLTLFEDREMIEERLKTYAHLFDDKVMKQLKRRRYTGWGRLSRKLINGIRDKQSGKTILDFLKSDGFANRNFMQLIHDDSLTFKEDIQKAQVSGQGDSLHEHIANLAGSPAIKKGILQTVKVVDELVKVMGRHKPENIVIEMARENQTTQKGQKNSRERMKRIEEGIKELGSQILKEHPVENTQLQNEKLYLYYLQNGRDMYVDQELDINRLSDYDVDHIVPQSFLKDDSIDNKVLTRSDKARGKSDNVPSEEVVKKMKNYWRQLLNAKLITQRKFDNLTKAERGGLSELDKAGFIKRQLVETRQITKHVAQILDSRMNTKYDENDKLIREVKVITLKSKLVSDFRKDFQFYKVREINNYHHAHDAYLNAVVGTALIKKYPKLESEFVYGDYKVYDVRKMIAKSEQEIGKATAKYFFYSNIMNFFKTEITLANGEIRKRPLIETNGETGEIVWDKGRDFATVRKVLSMPQVNIVKKTEVQTGGFSKESILPKRNSDKLIARKKDWDPKKYGGFDSPTVAYSVLVVAKVEKGKSKKLKSVKELLGITIMERSSFEKNPIDFLEAKGYKEVKKDLIIKLPKYSLFELENGRKRMLASAGELQKGNELALPSKYVNFLYLASHYEKLKGSPEDNEQKQLFVEQHKHYLDEIIEQISEFSKRVILADANLDKVLSAYNKHRDKPIREQAENIIHLFTLTNLGAPAAFKYFDTTIDRKRYTSTKEVLDATLIHQSITGLYETRIDLSQLGGDGGGSSGGSPAPGGLDDEYRLYSPLVKPDQNIQFWLEQFPQAWAETAGMGLAKQVPPQVIQLKASATPVSVRQYPLSKEAQEGIRPHVQRLIQQGILVPVQSPWNTPLLPVRKPGTNDYRPVQDLREVNKRVQDIHPTVPNPYNLLCALPPQRSWYTVLDLKDAFFCLRLHPTSQPLFAFEWRDPGTGRTGQLTWTRLPQGFKNSPTIFNEALHRDLANFRIQHPQVTLLQYVDDLLLAGATKQDCLEGTKALLLELSDLGYRASAKKAQICRREVTYLGYSLRDGQRWLTEARKKTVVQIPAPTTAKQVREFLGKAGFCRLFIPGFATLAAPLYPLTKPKGEFSWAPEHQKAFDAIKKALLSAPALALPDVTKPFTLYVDERKGVARGVLTQTLGPWRRPVAYLSKKLDPVASGWPVCLKAIAAVAILVKDADKLTLGQNITVIAPHALENIVRQPPDRWMTNARMTHYQSLLLTERVTFAPPAALNPATLLPEETDEPVTHDCHQLLIEETGVRKDLTDIPLTGEVLTWFTDGSSYVVEGKRMAGAAVVDGTRTIWASSLPEGTSAQKAELMALTQALRLAEGKSINIYTDSRYAFATAHVHGAIYKQRGWLTSAGREIKNKEEILSLLEALHLPKRLAIIHCPGHQKAKDPISRGNQMADRVAKQAAQGVNLLPAGKRTADGSEFEKRTADGSEFESPKKKAKVE

SEQ ID NO: 65 - protein, 2088 aa, synthetic construct
MPAAKRVKLDGGDKKYSIGLDIGTNSVGWAVITDEYKVPSKKFKVLGNTDRHSIKKNLIGALLFDSGETAEATRLKRTARRRYTRRKNRICYLQEIFSNEMAKVDDSFFHRLEESFLVEEDKKHERHPIFGNIVDEVAYHEKYPTIYHLRKKLVDSTDKADLRLIYLALAHMIKFRGHFLIEGDLNPDNSDVDKLFIQLVQTYNQLFEENPINASGVDAKAILSARLSKSRRLENLIAQLPGEKKNGLFGNLIALSLGLTPNFKSNFDLAEDAKLQLSKDTYDDDLDNLLAQIGDQYADLFLAAKNLSDAILLSDILRVNTEITKAPLSASMIKRYDEHHQDLTLLKALVRQQLPEKYKEIFFDQSKNGYAGYIDGGASQEEFYKFIKPILEKMDGTEELLVKLNREDLLRKQRTFDNGSIPHQIHLGELHAILRRQEDFYPFLKDNREKIEKILTFRIPYYVGPLARGNSRFAWMTRKSEETITPWNFEEVVDKGASAQSFIERMTNFDKNLPNEKVLPKHSLLYEYFTVYNELTKVKYVTEGMRKPAFLSGEQKKAIVDLLFKTNRKVTVKQLKEDYFKKIECFDSVEISGVEDRFNASLGTYHDLLKIIKDKDFLDNEENEDILEDIVLTLTLFEDREMIEERLKTYAHLFDDKVMKQLKRRRYTGWGRLSRKLINGIRDKQSGKTILDFLKSDGFANRNFMQLIHDDSLTFKEDIQKAQVSGQGDSLHEHIANLAGSPAIKKGILQTVKVVDELVKVMGRHKPENIVIEMARENQTTQKGQKNSRERMKRIEEGIKELGSQILKEHPVENTQLQNEKLYLYYLQNGRDMYVDQELDINRLSDYDVDHIVPQSFLKDDSIDNKVLTRSDKARGKSDNVPSEEVVKKMKNYWRQLLNAKLITQRKFDNLTKAERGGLSELDKAGFIKRQLVETRQITKHVAQILDSRMNTKYDENDKLIREVKVITLKSKLVSDFRKDFQFYKVREINNYHHAHDAYLNAVVGTALIKKYPKLESEFVYGDYKVYDVRKMIAKSEQEIGKATAKYFFYSNIMNFFKTEITLANGEIRKRPLIETNGETGEIVWDKGRDFATVRKVLSMPQVNIVKKTEVQTGGFSKESILPKRNSDKLIARKKDWDPKKYGGFDSPTVAYSVLVVAKVEKGKSKKLKSVKELLGITIMERSSFEKNPIDFLEAKGYKEVKKDLIIKLPKYSLFELENGRKRMLASAGELQKGNELALPSKYVNFLYLASHYEKLKGSPEDNEQKQLFVEQHKHYLDEIIEQISEFSKRVILADANLDKVLSAYNKHRDKPIREQAENIIHLFTLTNLGAPAAFKYFDTTIDRKRYTSTKEVLDATLIHQSITGLYETRIDLSQLGGDGGGGGEAAAKGGSGGLDDEYRLYSPLVKPDQNIQFWLEQFPQAWAETAGMGLAKQVPPQVIQLKASATPVSVRQYPLSKEAQEGIRPHVQRLIQQGILVPVQSPWNTPLLPVRKPGTNDYRPVQDLREVNKRVQDIHPTVPNPYNLLCALPPQRSWYTVLDLKDAFFCLRLHPTSQPLFAFEWRDPGTGRTGQLTWTRLPQGFKNSPTIFNEALHRDLANFRIQHPQVTLLQYVDDLLLAGATKQDCLEGTKALLLELSDLGYRASAKKAQICRREVTYLGYSLRDGQRWLTEARKKTVVQIPAPTTAKQVREFLGKAGFCRLFIPGFATLAAPLYPLTKPKGEFSWAPEHQKAFDAIKKALLSAPALALPDVTKPFTLYVDERKGVARGVLTQTLGPWRRPVAYLSKKLDPVASGWPVCLKAIAAVAILVKDADKLTLGQNITVIAPHALENIVRQPPDRWMTNARMTHYQSLLLTERVTFAPPAALNPATLLPEETDEPVTHDCHQLLIEETGVRKDLTDIPLTGEVLTWFTDGSSYVVEGKRMAGAAVVDGTRTIWASSLPEGTSAQKAELMALTQALRLAEGKSINIYTDSRYAFATAHVHGAIYKQRGWLTSAGREIKNKEEILSLLEALHLPKRLAIIHCPGHQKAKDPISRGNQMADRVAKQAAQGVNLLPAGKRTADGSEFEKRTADGSEFESPKKKAKVE

SEQ ID NO: 66 - protein, 2081 aa, synthetic construct
MPAAKRVKLDGGDKKYSIGLDIGTNSVGWAVITDEYKVPSKKFKVLGNTDRHSIKKNLIGALLFDSGETAEATRLKRTARRRYTRRKNRICYLQEIFSNEMAKVDDSFFHRLEESFLVEEDKKHERHPIFGNIVDEVAYHEKYPTIYHLRKKLVDSTDKADLRLIYLALAHMIKFRGHFLIEGDLNPDNSDVDKLFIQLVQTYNQLFEENPINASGVDAKAILSARLSKSRRLENLIAQLPGEKKNGLFGNLIALSLGLTPNFKSNFDLAEDAKLQLSKDTYDDDLDNLLAQIGDQYADLFLAAKNLSDAILLSDILRVNTEITKAPLSASMIKRYDEHHQDLTLLKALVRQQLPEKYKEIFFDQSKNGYAGYIDGGASQEEFYKFIKPILEKMDGTEELLVKLNREDLLRKQRTFDNGSIPHQIHLGELHAILRRQEDFYPFLKDNREKIEKILTFRIPYYVGPLARGNSRFAWMTRKSEETITPWNFEEVVDKGASAQSFIERMTNFDKNLPNEKVLPKHSLLYEYFTVYNELTKVKYVTEGMRKPAFLSGEQKKAIVDLLFKTNRKVTVKQLKEDYFKKIECFDSVEISGVEDRFNASLGTYHDLLKIIKDKDFLDNEENEDILEDIVLTLTLFEDREMIEERLKTYAHLFDDKVMKQLKRRRYTGWGRLSRKLINGIRDKQSGKTILDFLKSDGFANRNFMQLIHDDSLTFKEDIQKAQVSGQGDSLHEHIANLAGSPAIKKGILQTVKVVDELVKVMGRHKPENIVIEMARENQTTQKGQKNSRERMKRIEEGIKELGSQILKEHPVENTQLQNEKLYLYYLQNGRDMYVDQELDINRLSDYDVDHIVPQSFLKDDSIDNKVLTRSDKARGKSDNVPSEEVVKKMKNYWRQLLNAKLITQRKFDNLTKAERGGLSELDKAGFIKRQLVETRQITKHVAQILDSRMNTKYDENDKLIREVKVITLKSKLVSDFRKDFQFYKVREINNYHHAHDAYLNAVVGTALIKKYPKLESEFVYGDYKVYDVRKMIAKSEQEIGKATAKYFFYSNIMNFFKTEITLANGEIRKRPLIETNGETGEIVWDKGRDFATVRKVLSMPQVNIVKKTEVQTGGFSKESILPKRNSDKLIARKKDWDPKKYGGFDSPTVAYSVLVVAKVEKGKSKKLKSVKELLGITIMERSSFEKNPIDFLEAKGYKEVKKDLIIKLPKYSLFELENGRKRMLASAGELQKGNELALPSKYVNFLYLASHYEKLKGSPEDNEQKQLFVEQHKHYLDEIIEQISEFSKRVILADANLDKVLSAYNKHRDKPIREQAENIIHLFTLTNLGAPAAFKYFDTTIDRKRYTSTKEVLDATLIHQSITGLYETRIDLSQLGGDGGGGGGGGLDDEYRLYSPLVKPDQNIQFWLEQFPQAWAETAGMGLAKQVPPQVIQLKASATPVSVRQYPLSKEAQEGIRPHVQRLIQQGILVPVQSPWNTPLLPVRKPGTNDYRPVQDLREVNKRVQDIHPTVPNPYNLLCALPPQRSWYTVLDLKDAFFCLRLHPTSQPLFAFEWRDPGTGRTGQLTWTRLPQGFKNSPTIFNEALHRDLANFRIQHPQVTLLQYVDDLLLAGATKQDCLEGTKALLLELSDLGYRASAKKAQICRREVTYLGYSLRDGQRWLTEARKKTVVQIPAPTTAKQVREFLGKAGFCRLFIPGFATLAAPLYPLTKPKGEFSWAPEHQKAFDAIKKALLSAPALALPDVTKPFTLYVDERKGVARGVLTQTLGPWRRPVAYLSKKLDPVASGWPVCLKAIAAVAILVKDADKLTLGQNITVIAPHALENIVRQPPDRWMTNARMTHYQSLLLTERVTFAPPAALNPATLLPEETDEPVTHDCHQLLIEETGVRKDLTDIPLTGEVLTWFTDGSSYVVEGKRMAGAAVVDGTRTIWASSLPEGTSAQKAELMALTQALRLAEGKSINIYTDSRYAFATAHVHGAIYKQRGWLTSAGREIKNKEEILSLLEALHLPKRLAIIHCPGHQKAKDPISRGNQMADRVAKQAAQGVNLLPAGKRTADGSEFEKRTADGSEFESPKKKAKVE

SEQ ID NO: 67 - protein, 2089 aa, synthetic construct
MPAAKRVKLDGGDKKYSIGLDIGTNSVGWAVITDEYKVPSKKFKVLGNTDRHSIKKNLIGALLFDSGETAEATRLKRTARRRYTRRKNRICYLQEIFSNEMAKVDDSFFHRLEESFLVEEDKKHERHPIFGNIVDEVAYHEKYPTIYHLRKKLVDSTDKADLRLIYLALAHMIKFRGHFLIEGDLNPDNSDVDKLFIQLVQTYNQLFEENPINASGVDAKAILSARLSKSRRLENLIAQLPGEKKNGLFGNLIALSLGLTPNFKSNFDLAEDAKLQLSKDTYDDDLDNLLAQIGDQYADLFLAAKNLSDAILLSDILRVNTEITKAPLSASMIKRYDEHHQDLTLLKALVRQQLPEKYKEIFFDQSKNGYAGYIDGGASQEEFYKFIKPILEKMDGTEELLVKLNREDLLRKQRTFDNGSIPHQIHLGELHAILRRQEDFYPFLKDNREKIEKILTFRIPYYVGPLARGNSRFAWMTRKSEETITPWNFEEVVDKGASAQSFIERMTNFDKNLPNEKVLPKHSLLYEYFTVYNELTKVKYVTEGMRKPAFLSGEQKKAIVDLLFKTNRKVTVKQLKEDYFKKIECFDSVEISGVEDRFNASLGTYHDLLKIIKDKDFLDNEENEDILEDIVLTLTLFEDREMIEERLKTYAHLFDDKVMKQLKRRRYTGWGRLSRKLINGIRDKQSGKTILDFLKSDGFANRNFMQLIHDDSLTFKEDIQKAQVSGQGDSLHEHIANLAGSPAIKKGILQTVKVVDELVKVMGRHKPENIVIEMARENQTTQKGQKNSRERMKRIEEGIKELGSQILKEHPVENTQLQNEKLYLYYLQNGRDMYVDQELDINRLSDYDVDHIVPQSFLKDDSIDNKVLTRSDKARGKSDNVPSEEVVKKMKNYWRQLLNAKLITQRKFDNLTKAERGGLSELDKAGFIKRQLVETRQITKHVAQILDSRMNTKYDENDKLIREVKVITLKSKLVSDFRKDFQFYKVREINNYHHAHDAYLNAVVGTALIKKYPKLESEFVYGDYKVYDVRKMIAKSEQEIGKATAKYFFYSNIMNFFKTEITLANGEIRKRPLIETNGETGEIVWDKGRDFATVRKVLSMPQVNIVKKTEVQTGGFSKESILPKRNSDKLIARKKDWDPKKYGGFDSPTVAYSVLVVAKVEKGKSKKLKSVKELLGITIMERSSFEKNPIDFLEAKGYKEVKKDLIIKLPKYSLFELENGRKRMLASAGELQKGNELALPSKYVNFLYLASHYEKLKGSPEDNEQKQLFVEQHKHYLDEIIEQISEFSKRVILADANLDKVLSAYNKHRDKPIREQAENIIHLFTLTNLGAPAAFKYFDTTIDRKRYTSTKEVLDATLIHQSITGLYETRIDLSQLGGDGGGGSGGSGGSGGSGGLDDEYRLYSPLVKPDQNIQFWLEQFPQAWAETAGMGLAKQVPPQVIQLKASATPVSVRQYPLSKEAQEGIRPHVQRLIQQGILVPVQSPWNTPLLPVRKPGTNDYRPVQDLREVNKRVQDIHPTVPNPYNLLCALPPQRSWYTVLDLKDAFFCLRLHPTSQPLFAFEWRDPGTGRTGQLTWTRLPQGFKNSPTIFNEALHRDLANFRIQHPQVTLLQYVDDLLLAGATKQDCLEGTKALLLELSDLGYRASAKKAQICRREVTYLGYSLRDGQRWLTEARKKTVVQIPAPTTAKQVREFLGKAGFCRLFIPGFATLAAPLYPLTKPKGEFSWAPEHQKAFDAIKKALLSAPALALPDVTKPFTLYVDERKGVARGVLTQTLGPWRRPVAYLSKKLDPVASGWPVCLKAIAAVAILVKDADKLTLGQNITVIAPHALENIVRQPPDRWMTNARMTHYQSLLLTERVTFAPPAALNPATLLPEETDEPVTHDCHQLLIEETGVRKDLTDIPLTGEVLTWFTDGSSYVVEGKRMAGAAVVDGTRTIWASSLPEGTSAQKAELMALTQALRLAEGKSINIYTDSRYAFATAHVHGAIYKQRGWLTSAGREIKNKEEILSLLEALHLPKRLAIIHCPGHQKAKDPISRGNQMADRVAKQAAQGVNLLPAGKRTADGSEFEKRTADGSEFESPKKKAKVE

SEQ ID NO: 68 - protein, 2088 aa, synthetic construct
MPAAKRVKLDGGDKKYSIGLDIGTNSVGWAVITDEYKVPSKKFKVLGNTDRHSIKKNLIGALLFDSGETAEATRLKRTARRRYTRRKNRICYLQEIFSNEMAKVDDSFFHRLEESFLVEEDKKHERHPIFGNIVDEVAYHEKYPTIYHLRKKLVDSTDKADLRLIYLALAHMIKFRGHFLIEGDLNPDNSDVDKLFIQLVQTYNQLFEENPINASGVDAKAILSARLSKSRRLENLIAQLPGEKKNGLFGNLIALSLGLTPNFKSNFDLAEDAKLQLSKDTYDDDLDNLLAQIGDQYADLFLAAKNLSDAILLSDILRVNTEITKAPLSASMIKRYDEHHQDLTLLKALVRQQLPEKYKEIFFDQSKNGYAGYIDGGASQEEFYKFIKPILEKMDGTEELLVKLNREDLLRKQRTFDNGSIPHQIHLGELHAILRRQEDFYPFLKDNREKIEKILTFRIPYYVGPLARGNSRFAWMTRKSEETITPWNFEEVVDKGASAQSFIERMTNFDKNLPNEKVLPKHSLLYEYFTVYNELTKVKYVTEGMRKPAFLSGEQKKAIVDLLFKTNRKVTVKQLKEDYFKKIECFDSVEISGVEDRFNASLGTYHDLLKIIKDKDFLDNEENEDILEDIVLTLTLFEDREMIEERLKTYAHLFDDKVMKQLKRRRYTGWGRLSRKLINGIRDKQSGKTILDFLKSDGFANRNFMQLIHDDSLTFKEDIQKAQVSGQGDSLHEHIANLAGSPAIKKGILQTVKVVDELVKVMGRHKPENIVIEMARENQTTQKGQKNSRERMKRIEEGIKELGSQILKEHPVENTQLQNEKLYLYYLQNGRDMYVDQELDINRLSDYDVDHIVPQSFLKDDSIDNKVLTRSDKARGKSDNVPSEEVVKKMKNYWRQLLNAKLITQRKFDNLTKAERGGLSELDKAGFIKRQLVETRQITKHVAQILDSRMNTKYDENDKLIREVKVITLKSKLVSDFRKDFQFYKVREINNYHHAHDAYLNAVVGTALIKKYPKLESEFVYGDYKVYDVRKMIAKSEQEIGKATAKYFFYSNIMNFFKTEITLANGEIRKRPLIETNGETGEIVWDKGRDFATVRKVLSMPQVNIVKKTEVQTGGFSKESILPKRNSDKLIARKKDWDPKKYGGFDSPTVAYSVLVVAKVEKGKSKKLKSVKELLGITIMERSSFEKNPIDFLEAKGYKEVKKDLIIKLPKYSLFELENGRKRMLASAGELQKGNELALPSKYVNFLYLASHYEKLKGSPEDNEQKQLFVEQHKHYLDEIIEQISEFSKRVILADANLDKVLSAYNKHRDKPIREQAENIIHLFTLTNLGAPAAFKYFDTTIDRKRYTSTKEVLDATLIHQSITGLYETRIDLSQLGGDGGGGGGGSEAAAKGGLDDEYRLYSPLVKPDQNIQFWLEQFPQAWAETAGMGLAKQVPPQVIQLKASATPVSVRQYPLSKEAQEGIRPHVQRLIQQGILVPVQSPWNTPLLPVRKPGTNDYRPVQDLREVNKRVQDIHPTVPNPYNLLCALPPQRSWYTVLDLKDAFFCLRLHPTSQPLFAFEWRDPGTGRTGQLTWTRLPQGFKNSPTIFNEALHRDLANFRIQHPQVTLLQYVDDLLLAGATKQDCLEGTKALLLELSDLGYRASAKKAQICRREVTYLGYSLRDGQRWLTEARKKTVVQIPAPTTAKQVREFLGKAGFCRLFIPGFATLAAPLYPLTKPKGEFSWAPEHQKAFDAIKKALLSAPALALPDVTKPFTLYVDERKGVARGVLTQTLGPWRRPVAYLSKKLDPVASGWPVCLKAIAAVAILVKDADKLTLGQNITVIAPHALENIVRQPPDRWMTNARMTHYQSLLLTERVTFAPPAALNPATLLPEETDEPVTHDCHQLLIEETGVRKDLTDIPLTGEVLTWFTDGSSYVVEGKRMAGAAVVDGTRTIWASSLPEGTSAQKAELMALTQALRLAEGKSINIYTDSRYAFATAHVHGAIYKQRGWLTSAGREIKNKEEILSLLEALHLPKRLAIIHCPGHQKAKDPISRGNQMADRVAKQAAQGVNLLPAGKRTADGSEFEKRTADGSEFESPKKKAKVE

SEQ ID NO: 69 - protein, 2086 aa, synthetic construct
MPAAKRVKLDGGDKKYSIGLDIGTNSVGWAVITDEYKVPSKKFKVLGNTDRHSIKKNLIGALLFDSGETAEATRLKRTARRRYTRRKNRICYLQEIFSNEMAKVDDSFFHRLEESFLVEEDKKHERHPIFGNIVDEVAYHEKYPTIYHLRKKLVDSTDKADLRLIYLALAHMIKFRGHFLIEGDLNPDNSDVDKLFIQLVQTYNQLFEENPINASGVDAKAILSARLSKSRRLENLIAQLPGEKKNGLFGNLIALSLGLTPNFKSNFDLAEDAKLQLSKDTYDDDLDNLLAQIGDQYADLFLAAKNLSDAILLSDILRVNTEITKAPLSASMIKRYDEHHQDLTLLKALVRQQLPEKYKEIFFDQSKNGYAGYIDGGASQEEFYKFIKPILEKMDGTEELLVKLNREDLLRKQRTFDNGSIPHQIHLGELHAILRRQEDFYPFLKDNREKIEKILTFRIPYYVGPLARGNSRFAWMTRKSEETITPWNFEEVVDKGASAQSFIERMTNFDKNLPNEKVLPKHSLLYEYFTVYNELTKVKYVTEGMRKPAFLSGEQKKAIVDLLFKTNRKVTVKQLKEDYFKKIECFDSVEISGVEDRFNASLGTYHDLLKIIKDKDFLDNEENEDILEDIVLTLTLFEDREMIEERLKTYAHLFDDKVMKQLKRRRYTGWGRLSRKLINGIRDKQSGKTILDFLKSDGFANRNFMQLIHDDSLTFKEDIQKAQVSGQGDSLHEHIANLAGSPAIKKGILQTVKVVDELVKVMGRHKPENIVIEMARENQTTQKGQKNSRERMKRIEEGIKELGSQILKEHPVENTQLQNEKLYLYYLQNGRDMYVDQELDINRLSDYDVDHIVPQSFLKDDSIDNKVLTRSDKARGKSDNVPSEEVVKKMKNYWRQLLNAKLITQRKFDNLTKAERGGLSELDKAGFIKRQLVETRQITKHVAQILDSRMNTKYDENDKLIREVKVITLKSKLVSDFRKDFQFYKVREINNYHHAHDAYLNAVVGTALIKKYPKLESEFVYGDYKVYDVRKMIAKSEQEIGKATAKYFFYSNIMNFFKTEITLANGEIRKRPLIETNGETGEIVWDKGRDFATVRKVLSMPQVNIVKKTEVQTGGFSKESILPKRNSDKLIARKKDWDPKKYGGFDSPTVAYSVLVVAKVEKGKSKKLKSVKELLGITIMERSSFEKNPIDFLEAKGYKEVKKDLIIKLPKYSLFELENGRKRMLASAGELQKGNELALPSKYVNFLYLASHYEKLKGSPEDNEQKQLFVEQHKHYLDEIIEQISEFSKRVILADANLDKVLSAYNKHRDKPIREQAENIIHLFTLTNLGAPAAFKYFDTTIDRKRYTSTKEVLDATLIHQSITGLYETRIDLSQLGGDGGGSSPAPGGSGGLDDEYRLYSPLVKPDQNIQFWLEQFPQAWAETAGMGLAKQVPPQVIQLKASATPVSVRQYPLSKEAQEGIRPHVQRLIQQGILVPVQSPWNTPLLPVRKPGTNDYRPVQDLREVNKRVQDIHPTVPNPYNLLCALPPQRSWYTVLDLKDAFFCLRLHPTSQPLFAFEWRDPGTGRTGQLTWTRLPQGFKNSPTIFNEALHRDLANFRIQHPQVTLLQYVDDLLLAGATKQDCLEGTKALLLELSDLGYRASAKKAQICRREVTYLGYSLRDGQRWLTEARKKTVVQIPAPTTAKQVREFLGKAGFCRLFIPGFATLAAPLYPLTKPKGEFSWAPEHQKAFDAIKKALLSAPALALPDVTKPFTLYVDERKGVARGVLTQTLGPWRRPVAYLSKKLDPVASGWPVCLKAIAAVAILVKDADKLTLGQNITVIAPHALENIVRQPPDRWMTNARMTHYQSLLLTERVTFAPPAALNPATLLPEETDEPVTHDCHQLLIEETGVRKDLTDIPLTGEVLTWFTDGSSYVVEGKRMAGAAVVDGTRTIWASSLPEGTSAQKAELMALTQALRLAEGKSINIYTDSRYAFATAHVHGAIYKQRGWLTSAGREIKNKEEILSLLEALHLPKRLAIIHCPGHQKAKDPISRGNQMADRVAKQAAQGVNLLPAGKRTADGSEFEKRTADGSEFESPKKKAKVE

SEQ ID NO: 70 - protein, 2082 aa, synthetic construct
MPAAKRVKLDGGDKKYSIGLDIGTNSVGWAVITDEYKVPSKKFKVLGNTDRHSIKKNLIGALLFDSGETAEATRLKRTARRRYTRRKNRICYLQEIFSNEMAKVDDSFFHRLEESFLVEEDKKHERHPIFGNIVDEVAYHEKYPTIYHLRKKLVDSTDKADLRLIYLALAHMIKFRGHFLIEGDLNPDNSDVDKLFIQLVQTYNQLFEENPINASGVDAKAILSARLSKSRRLENLIAQLPGEKKNGLFGNLIALSLGLTPNFKSNFDLAEDAKLQLSKDTYDDDLDNLLAQIGDQYADLFLAAKNLSDAILLSDILRVNTEITKAPLSASMIKRYDEHHQDLTLLKALVRQQLPEKYKEIFFDQSKNGYAGYIDGGASQEEFYKFIKPILEKMDGTEELLVKLNREDLLRKQRTFDNGSIPHQIHLGELHAILRRQEDFYPFLKDNREKIEKILTFRIPYYVGPLARGNSRFAWMTRKSEETITPWNFEEVVDKGASAQSFIERMTNFDKNLPNEKVLPKHSLLYEYFTVYNELTKVKYVTEGMRKPAFLSGEQKKAIVDLLFKTNRKVTVKQLKEDYFKKIECFDSVEISGVEDRFNASLGTYHDLLKIIKDKDFLDNEENEDILEDIVLTLTLFEDREMIEERLKTYAHLFDDKVMKQLKRRRYTGWGRLSRKLINGIRDKQSGKTILDFLKSDGFANRNFMQLIHDDSLTFKEDIQKAQVSGQGDSLHEHIANLAGSPAIKKGILQTVKVVDELVKVMGRHKPENIVIEMARENQTTQKGQKNSRERMKRIEEGIKELGSQILKEHPVENTQLQNEKLYLYYLQNGRDMYVDQELDINRLSDYDVDHIVPQSFLKDDSIDNKVLTRSDKARGKSDNVPSEEVVKKMKNYWRQLLNAKLITQRKFDNLTKAERGGLSELDKAGFIKRQLVETRQITKHVAQILDSRMNTKYDENDKLIREVKVITLKSKLVSDFRKDFQFYKVREINNYHHAHDAYLNAVVGTALIKKYPKLESEFVYGDYKVYDVRKMIAKSEQEIGKATAKYFFYSNIMNFFKTEITLANGEIRKRPLIETNGETGEIVWDKGRDFATVRKVLSMPQVNIVKKTEVQTGGFSKESILPKRNSDKLIARKKDWDPKKYGGFDSPTVAYSVLVVAKVEKGKSKKLKSVKELLGITIMERSSFEKNPIDFLEAKGYKEVKKDLIIKLPKYSLFELENGRKRMLASAGELQKGNELALPSKYVNFLYLASHYEKLKGSPEDNEQKQLFVEQHKHYLDEIIEQISEFSKRVILADANLDKVLSAYNKHRDKPIREQAENIIHLFTLTNLGAPAAFKYFDTTIDRKRYTSTKEVLDATLIHQSITGLYETRIDLSQLGGDGGGGGGGGGLDDEYRLYSPLVKPDQNIQFWLEQFPQAWAETAGMGLAKQVPPQVIQLKASATPVSVRQYPLSKEAQEGIRPHVQRLIQQGILVPVQSPWNTPLLPVRKPGTNDYRPVQDLREVNKRVQDIHPTVPNPYNLLCALPPQRSWYTVLDLKDAFFCLRLHPTSQPLFAFEWRDPGTGRTGQLTWTRLPQGFKNSPTIFNEALHRDLANFRIQHPQVTLLQYVDDLLLAGATKQDCLEGTKALLLELSDLGYRASAKKAQICRREVTYLGYSLRDGQRWLTEARKKTVVQIPAPTTAKQVREFLGKAGFCRLFIPGFATLAAPLYPLTKPKGEFSWAPEHQKAFDAIKKALLSAPALALPDVTKPFTLYVDERKGVARGVLTQTLGPWRRPVAYLSKKLDPVASGWPVCLKAIAAVAILVKDADKLTLGQNITVIAPHALENIVRQPPDRWMTNARMTHYQSLLLTERVTFAPPAALNPATLLPEETDEPVTHDCHQLLIEETGVRKDLTDIPLTGEVLTWFTDGSSYVVEGKRMAGAAVVDGTRTIWASSLPEGTSAQKAELMALTQALRLAEGKSINIYTDSRYAFATAHVHGAIYKQRGWLTSAGREIKNKEEILSLLEALHLPKRLAIIHCPGHQKAKDPISRGNQMADRVAKQAAQGVNLLPAGKRTADGSEFEKRTADGSEFESPKKKAKVE

SEQ ID NO: 71 - protein, 2088 aa, synthetic construct
MPAAKRVKLDGGDKKYSIGLDIGTNSVGWAVITDEYKVPSKKFKVLGNTDRHSIKKNLIGALLFDSGETAEATRLKRTARRRYTRRKNRICYLQEIFSNEMAKVDDSFFHRLEESFLVEEDKKHERHPIFGNIVDEVAYHEKYPTIYHLRKKLVDSTDKADLRLIYLALAHMIKFRGHFLIEGDLNPDNSDVDKLFIQLVQTYNQLFEENPINASGVDAKAILSARLSKSRRLENLIAQLPGEKKNGLFGNLIALSLGLTPNFKSNFDLAEDAKLQLSKDTYDDDLDNLLAQIGDQYADLFLAAKNLSDAILLSDILRVNTEITKAPLSASMIKRYDEHHQDLTLLKALVRQQLPEKYKEIFFDQSKNGYAGYIDGGASQEEFYKFIKPILEKMDGTEELLVKLNREDLLRKQRTFDNGSIPHQIHLGELHAILRRQEDFYPFLKDNREKIEKILTFRIPYYVGPLARGNSRFAWMTRKSEETITPWNFEEVVDKGASAQSFIERMTNFDKNLPNEKVLPKHSLLYEYFTVYNELTKVKYVTEGMRKPAFLSGEQKKAIVDLLFKTNRKVTVKQLKEDYFKKIECFDSVEISGVEDRFNASLGTYHDLLKIIKDKDFLDNEENEDILEDIVLTLTLFEDREMIEERLKTYAHLFDDKVMKQLKRRRYTGWGRLSRKLINGIRDKQSGKTILDFLKSDGFANRNFMQLIHDDSLTFKEDIQKAQVSGQGDSLHEHIANLAGSPAIKKGILQTVKVVDELVKVMGRHKPENIVIEMARENQTTQKGQKNSRERMKRIEEGIKELGSQILKEHPVENTQLQNEKLYLYYLQNGRDMYVDQELDINRLSDYDVDHIVPQSFLKDDSIDNKVLTRSDKARGKSDNVPSEEVVKKMKNYWRQLLNAKLITQRKFDNLTKAERGGLSELDKAGFIKRQLVETRQITKHVAQILDSRMNTKYDENDKLIREVKVITLKSKLVSDFRKDFQFYKVREINNYHHAHDAYLNAVVGTALIKKYPKLESEFVYGDYKVYDVRKMIAKSEQEIGKATAKYFFYSNIMNFFKTEITLANGEIRKRPLIETNGETGEIVWDKGRDFATVRKVLSMPQVNIVKKTEVQTGGFSKESILPKRNSDKLIARKKDWDPKKYGGFDSPTVAYSVLVVAKVEKGKSKKLKSVKELLGITIMERSSFEKNPIDFLEAKGYKEVKKDLIIKLPKYSLFELENGRKRMLASAGELQKGNELALPSKYVNFLYLASHYEKLKGSPEDNEQKQLFVEQHKHYLDEIIEQISEFSKRVILADANLDKVLSAYNKHRDKPIREQAENIIHLFTLTNLGAPAAFKYFDTTIDRKRYTSTKEVLDATLIHQSITGLYETRIDLSQLGGDGGEAAAKGGSGSSGGLDDEYRLYSPLVKPDQNIQFWLEQFPQAWAETAGMGLAKQVPPQVIQLKASATPVSVRQYPLSKEAQEGIRPHVQRLIQQGILVPVQSPWNTPLLPVRKPGTNDYRPVQDLREVNKRVQDIHPTVPNPYNLLCALPPQRSWYTVLDLKDAFFCLRLHPTSQPLFAFEWRDPGTGRTGQLTWTRLPQGFKNSPTIFNEALHRDLANFRIQHPQVTLLQYVDDLLLAGATKQDCLEGTKALLLELSDLGYRASAKKAQICRREVTYLGYSLRDGQRWLTEARKKTVVQIPAPTTAKQVREFLGKAGFCRLFIPGFATLAAPLYPLTKPKGEFSWAPEHQKAFDAIKKALLSAPALALPDVTKPFTLYVDERKGVARGVLTQTLGPWRRPVAYLSKKLDPVASGWPVCLKAIAAVAILVKDADKLTLGQNITVIAPHALENIVRQPPDRWMTNARMTHYQSLLLTERVTFAPPAALNPATLLPEETDEPVTHDCHQLLIEETGVRKDLTDIPLTGEVLTWFTDGSSYVVEGKRMAGAAVVDGTRTIWASSLPEGTSAQKAELMALTQALRLAEGKSINIYTDSRYAFATAHVHGAIYKQRGWLTSAGREIKNKEEILSLLEALHLPKRLAIIHCPGHQKAKDPISRGNQMADRVAKQAAQGVNLLPAGKRTADGSEFEKRTADGSEFESPKKKAKVE

SEQ ID NO: 72 - protein, 2088 aa, synthetic construct
MPAAKRVKLDGGDKKYSIGLDIGTNSVGWAVITDEYKVPSKKFKVLGNTDRHSIKKNLIGALLFDSGETAEATRLKRTARRRYTRRKNRICYLQEIFSNEMAKVDDSFFHRLEESFLVEEDKKHERHPIFGNIVDEVAYHEKYPTIYHLRKKLVDSTDKADLRLIYLALAHMIKFRGHFLIEGDLNPDNSDVDKLFIQLVQTYNQLFEENPINASGVDAKAILSARLSKSRRLENLIAQLPGEKKNGLFGNLIALSLGLTPNFKSNFDLAEDAKLQLSKDTYDDDLDNLLAQIGDQYADLFLAAKNLSDAILLSDILRVNTEITKAPLSASMIKRYDEHHQDLTLLKALVRQQLPEKYKEIFFDQSKNGYAGYIDGGASQEEFYKFIKPILEKMDGTEELLVKLNREDLLRKQRTFDNGSIPHQIHLGELHAILRRQEDFYPFLKDNREKIEKILTFRIPYYVGPLARGNSRFAWMTRKSEETITPWNFEEVVDKGASAQSFIERMTNFDKNLPNEKVLPKHSLLYEYFTVYNELTKVKYVTEGMRKPAFLSGEQKKAIVDLLFKTNRKVTVKQLKEDYFKKIECFDSVEISGVEDRFNASLGTYHDLLKIIKDKDFLDNEENEDILEDIVLTLTLFEDREMIEERLKTYAHLFDDKVMKQLKRRRYTGWGRLSRKLINGIRDKQSGKTILDFLKSDGFANRNFMQLIHDDSLTFKEDIQKAQVSGQGDSLHEHIANLAGSPAIKKGILQTVKVVDELVKVMGRHKPENIVIEMARENQTTQKGQKNSRERMKRIEEGIKELGSQILKEHPVENTQLQNEKLYLYYLQNGRDMYVDQELDINRLSDYDVDHIVPQSFLKDDSIDNKVLTRSDKARGKSDNVPSEEVVKKMKNYWRQLLNAKLITQRKFDNLTKAERGGLSELDKAGFIKRQLVETRQITKHVAQILDSRMNTKYDENDKLIREVKVITLKSKLVSDFRKDFQFYKVREINNYHHAHDAYLNAVVGTALIKKYPKLESEFVYGDYKVYDVRKMIAKSEQEIGKATAKYFFYSNIMNFFKTEITLANGEIRKRPLIETNGETGEIVWDKGRDFATVRKVLSMPQVNIVKKTEVQTGGFSKESILPKRNSDKLIARKKDWDPKKYGGFDSPTVAYSVLVVAKVEKGKSKKLKSVKELLGITIMERSSFEKNPIDFLEAKGYKEVKKDLIIKLPKYSLFELENGRKRMLASAGELQKGNELALPSKYVNFLYLASHYEKLKGSPEDNEQKQLFVEQHKHYLDEIIEQISEFSKRVILADANLDKVLSAYNKHRDKPIREQAENIIHLFTLTNLGAPAAFKYFDTTIDRKRYTSTKEVLDATLIHQSITGLYETRIDLSQLGGDGGEAAAKGGSGGGGGLDDEYRLYSPLVKPDQNIQFWLEQFPQAWAETAGMGLAKQVPPQVIQLKASATPVSVRQYPLSKEAQEGIRPHVQRLIQQGILVPVQSPWNTPLLPVRKPGTNDYRPVQDLREVNKRVQDIHPTVPNPYNLLCALPPQRSWYTVLDLKDAFFCLRLHPTSQPLFAFEWRDPGTGRTGQLTWTRLPQGFKNSPTIFNEALHRDLANFRIQHPQVTLLQYVDDLLLAGATKQDCLEGTKALLLELSDLGYRASAKKAQICRREVTYLGYSLRDGQRWLTEARKKTVVQIPAPTTAKQVREFLGKAGFCRLFIPGFATLAAPLYPLTKPKGEFSWAPEHQKAFDAIKKALLSAPALALPDVTKPFTLYVDERKGVARGVLTQTLGPWRRPVAYLSKKLDPVASGWPVCLKAIAAVAILVKDADKLTLGQNITVIAPHALENIVRQPPDRWMTNARMTHYQSLLLTERVTFAPPAALNPATLLPEETDEPVTHDCHQLLIEETGVRKDLTDIPLTGEVLTWFTDGSSYVVEGKRMAGAAVVDGTRTIWASSLPEGTSAQKAELMALTQALRLAEGKSINIYTDSRYAFATAHVHGAIYKQRGWLTSAGREIKNKEEILSLLEALHLPKRLAIIHCPGHQKAKDPISRGNQMADRVAKQAAQGVNLLPAGKRTADGSEFEKRTADGSEFESPKKKAKVE

SEQ ID NO: 73 - protein, 2086 aa, synthetic construct
MPAAKRVKLDGGDKKYSIGLDIGTNSVGWAVITDEYKVPSKKFKVLGNTDRHSIKKNLIGALLFDSGETAEATRLKRTARRRYTRRKNRICYLQEIFSNEMAKVDDSFFHRLEESFLVEEDKKHERHPIFGNIVDEVAYHEKYPTIYHLRKKLVDSTDKADLRLIYLALAHMIKFRGHFLIEGDLNPDNSDVDKLFIQLVQTYNQLFEENPINASGVDAKAILSARLSKSRRLENLIAQLPGEKKNGLFGNLIALSLGLTPNFKSNFDLAEDAKLQLSKDTYDDDLDNLLAQIGDQYADLFLAAKNLSDAILLSDILRVNTEITKAPLSASMIKRYDEHHQDLTLLKALVRQQLPEKYKEIFFDQSKNGYAGYIDGGASQEEFYKFIKPILEKMDGTEELLVKLNREDLLRKQRTFDNGSIPHQIHLGELHAILRRQEDFYPFLKDNREKIEKILTFRIPYYVGPLARGNSRFAWMTRKSEETITPWNFEEVVDKGASAQSFIERMTNFDKNLPNEKVLPKHSLLYEYFTVYNELTKVKYVTEGMRKPAFLSGEQKKAIVDLLFKTNRKVTVKQLKEDYFKKIECFDSVEISGVEDRFNASLGTYHDLLKIIKDKDFLDNEENEDILEDIVLTLTLFEDREMIEERLKTYAHLFDDKVMKQLKRRRYTGWGRLSRKLINGIRDKQSGKTILDFLKSDGFANRNFMQLIHDDSLTFKEDIQKAQVSGQGDSLHEHIANLAGSPAIKKGILQTVKVVDELVKVMGRHKPENIVIEMARENQTTQKGQKNSRERMKRIEEGIKELGSQILKEHPVENTQLQNEKLYLYYLQNGRDMYVDQELDINRLSDYDVDHIVPQSFLKDDSIDNKVLTRSDKARGKSDNVPSEEVVKKMKNYWRQLLNAKLITQRKFDNLTKAERGGLSELDKAGFIKRQLVETRQITKHVAQILDSRMNTKYDENDKLIREVKVITLKSKLVSDFRKDFQFYKVREINNYHHAHDAYLNAVVGTALIKKYPKLESEFVYGDYKVYDVRKMIAKSEQEIGKATAKYFFYSNIMNFFKTEITLANGEIRKRPLIETNGETGEIVWDKGRDFATVRKVLSMPQVNIVKKTEVQTGGFSKESILPKRNSDKLIARKKDWDPKKYGGFDSPTVAYSVLVVAKVEKGKSKKLKSVKELLGITIMERSSFEKNPIDFLEAKGYKEVKKDLIIKLPKYSLFELENGRKRMLASAGELQKGNELALPSKYVNFLYLASHYEKLKGSPEDNEQKQLFVEQHKHYLDEIIEQISEFSKRVILADANLDKVLSAYNKHRDKPIREQAENIIHLFTLTNLGAPAAFKYFDTTIDRKRYTSTKEVLDATLIHQSITGLYETRIDLSQLGGDGGGSSPAPGGGGGLDDEYRLYSPLVKPDQNIQFWLEQFPQAWAETAGMGLAKQVPPQVIQLKASATPVSVRQYPLSKEAQEGIRPHVQRLIQQGILVPVQSPWNTPLLPVRKPGTNDYRPVQDLREVNKRVQDIHPTVPNPYNLLCALPPQRSWYTVLDLKDAFFCLRLHPTSQPLFAFEWRDPGTGRTGQLTWTRLPQGFKNSPTIFNEALHRDLANFRIQHPQVTLLQYVDDLLLAGATKQDCLEGTKALLLELSDLGYRASAKKAQICRREVTYLGYSLRDGQRWLTEARKKTVVQIPAPTTAKQVREFLGKAGFCRLFIPGFATLAAPLYPLTKPKGEFSWAPEHQKAFDAIKKALLSAPALALPDVTKPFTLYVDERKGVARGVLTQTLGPWRRPVAYLSKKLDPVASGWPVCLKAIAAVAILVKDADKLTLGQNITVIAPHALENIVRQPPDRWMTNARMTHYQSLLLTERVTFAPPAALNPATLLPEETDEPVTHDCHQLLIEETGVRKDLTDIPLTGEVLTWFTDGSSYVVEGKRMAGAAVVDGTRTIWASSLPEGTSAQKAELMALTQALRLAEGKSINIYTDSRYAFATAHVHGAIYKQRGWLTSAGREIKNKEEILSLLEALHLPKRLAIIHCPGHQKAKDPISRGNQMADRVAKQAAQGVNLLPAGKRTADGSEFEKRTADGSEFESPKKKAKVE

SEQ ID NO: 74 - protein, 2089 aa, synthetic construct
MPAAKRVKLDGGDKKYSIGLDIGTNSVGWAVITDEYKVPSKKFKVLGNTDRHSIKKNLIGALLFDSGETAEATRLKRTARRRYTRRKNRICYLQEIFSNEMAKVDDSFFHRLEESFLVEEDKKHERHPIFGNIVDEVAYHEKYPTIYHLRKKLVDSTDKADLRLIYLALAHMIKFRGHFLIEGDLNPDNSDVDKLFIQLVQTYNQLFEENPINASGVDAKAILSARLSKSRRLENLIAQLPGEKKNGLFGNLIALSLGLTPNFKSNFDLAEDAKLQLSKDTYDDDLDNLLAQIGDQYADLFLAAKNLSDAILLSDILRVNTEITKAPLSASMIKRYDEHHQDLTLLKALVRQQLPEKYKEIFFDQSKNGYAGYIDGGASQEEFYKFIKPILEKMDGTEELLVKLNREDLLRKQRTFDNGSIPHQIHLGELHAILRRQEDFYPFLKDNREKIEKILTFRIPYYVGPLARGNSRFAWMTRKSEETITPWNFEEVVDKGASAQSFIERMTNFDKNLPNEKVLPKHSLLYEYFTVYNELTKVKYVTEGMRKPAFLSGEQKKAIVDLLFKTNRKVTVKQLKEDYFKKIECFDSVEISGVEDRFNASLGTYHDLLKIIKDKDFLDNEENEDILEDIVLTLTLFEDREMIEERLKTYAHLFDDKVMKQLKRRRYTGWGRLSRKLINGIRDKQSGKTILDFLKSDGFANRNFMQLIHDDSLTFKEDIQKAQVSGQGDSLHEHIANLAGSPAIKKGILQTVKVVDELVKVMGRHKPENIVIEMARENQTTQKGQKNSRERMKRIEEGIKELGSQILKEHPVENTQLQNEKLYLYYLQNGRDMYVDQELDINRLSDYDVDHIVPQSFLKDDSIDNKVLTRSDKARGKSDNVPSEEVVKKMKNYWRQLLNAKLITQRKFDNLTKAERGGLSELDKAGFIKRQLVETRQITKHVAQILDSRMNTKYDENDKLIREVKVITLKSKLVSDFRKDFQFYKVREINNYHHAHDAYLNAVVGTALIKKYPKLESEFVYGDYKVYDVRKMIAKSEQEIGKATAKYFFYSNIMNFFKTEITLANGEIRKRPLIETNGETGEIVWDKGRDFATVRKVLSMPQVNIVKKTEVQTGGFSKESILPKRNSDKLIARKKDWDPKKYGGFDSPTVAYSVLVVAKVEKGKSKKLKSVKELLGITIMERSSFEKNPIDFLEAKGYKEVKKDLIIKLPKYSLFELENGRKRMLASAGELQKGNELALPSKYVNFLYLASHYEKLKGSPEDNEQKQLFVEQHKHYLDEIIEQISEFSKRVILADANLDKVLSAYNKHRDKPIREQAENIIHLFTLTNLGAPAAFKYFDTTIDRKRYTSTKEVLDATLIHQSITGLYETRIDLSQLGGDGGGSAGSAAGSGEFGGLDDEYRLYSPLVKPDQNIQFWLEQFPQAWAETAGMGLAKQVPPQVIQLKASATPVSVRQYPLSKEAQEGIRPHVQRLIQQGILVPVQSPWNTPLLPVRKPGTNDYRPVQDLREVNKRVQDIHPTVPNPYNLLCALPPQRSWYTVLDLKDAFFCLRLHPTSQPLFAFEWRDPGTGRTGQLTWTRLPQGFKNSPTIFNEALHRDLANFRIQHPQVTLLQYVDDLLLAGATKQDCLEGTKALLLELSDLGYRASAKKAQICRREVTYLGYSLRDGQRWLTEARKKTVVQIPAPTTAKQVREFLGKAGFCRLFIPGFATLAAPLYPLTKPKGEFSWAPEHQKAFDAIKKALLSAPALALPDVTKPFTLYVDERKGVARGVLTQTLGPWRRPVAYLSKKLDPVASGWPVCLKAIAAVAILVKDADKLTLGQNITVIAPHALENIVRQPPDRWMTNARMTHYQSLLLTERVTFAPPAALNPATLLPEETDEPVTHDCHQLLIEETGVRKDLTDIPLTGEVLTWFTDGSSYVVEGKRMAGAAVVDGTRTIWASSLPEGTSAQKAELMALTQALRLAEGKSINIYTDSRYAFATAHVHGAIYKQRGWLTSAGREIKNKEEILSLLEALHLPKRLAIIHCPGHQKAKDPISRGNQMADRVAKQAAQGVNLLPAGKRTADGSEFEKRTADGSEFESPKKKAKVE

SEQ ID NO: 75 - protein, 2092 aa, synthetic construct
MPAAKRVKLDGGDKKYSIGLDIGTNSVGWAVITDEYKVPSKKFKVLGNTDRHSIKKNLIGALLFDSGETAEATRLKRTARRRYTRRKNRICYLQEIFSNEMAKVDDSFFHRLEESFLVEEDKKHERHPIFGNIVDEVAYHEKYPTIYHLRKKLVDSTDKADLRLIYLALAHMIKFRGHFLIEGDLNPDNSDVDKLFIQLVQTYNQLFEENPINASGVDAKAILSARLSKSRRLENLIAQLPGEKKNGLFGNLIALSLGLTPNFKSNFDLAEDAKLQLSKDTYDDDLDNLLAQIGDQYADLFLAAKNLSDAILLSDILRVNTEITKAPLSASMIKRYDEHHQDLTLLKALVRQQLPEKYKEIFFDQSKNGYAGYIDGGASQEEFYKFIKPILEKMDGTEELLVKLNREDLLRKQRTFDNGSIPHQIHLGELHAILRRQEDFYPFLKDNREKIEKILTFRIPYYVGPLARGNSRFAWMTRKSEETITPWNFEEVVDKGASAQSFIERMTNFDKNLPNEKVLPKHSLLYEYFTVYNELTKVKYVTEGMRKPAFLSGEQKKAIVDLLFKTNRKVTVKQLKEDYFKKIECFDSVEISGVEDRFNASLGTYHDLLKIIKDKDFLDNEENEDILEDIVLTLTLFEDREMIEERLKTYAHLFDDKVMKQLKRRRYTGWGRLSRKLINGIRDKQSGKTILDFLKSDGFANRNFMQLIHDDSLTFKEDIQKAQVSGQGDSLHEHIANLAGSPAIKKGILQTVKVVDELVKVMGRHKPENIVIEMARENQTTQKGQKNSRERMKRIEEGIKELGSQILKEHPVENTQLQNEKLYLYYLQNGRDMYVDQELDINRLSDYDVDHIVPQSFLKDDSIDNKVLTRSDKARGKSDNVPSEEVVKKMKNYWRQLLNAKLITQRKFDNLTKAERGGLSELDKAGFIKRQLVETRQITKHVAQILDSRMNTKYDENDKLIREVKVITLKSKLVSDFRKDFQFYKVREINNYHHAHDAYLNAVVGTALIKKYPKLESEFVYGDYKVYDVRKMIAKSEQEIGKATAKYFFYSNIMNFFKTEITLANGEIRKRPLIETNGETGEIVWDKGRDFATVRKVLSMPQVNIVKKTEVQTGGFSKESILPKRNSDKLIARKKDWDPKKYGGFDSPTVAYSVLVVAKVEKGKSKKLKSVKELLGITIMERSSFEKNPIDFLEAKGYKEVKKDLIIKLPKYSLFELENGRKRMLASAGELQKGNELALPSKYVNFLYLASHYEKLKGSPEDNEQKQLFVEQHKHYLDEIIEQISEFSKRVILADANLDKVLSAYNKHRDKPIREQAENIIHLFTLTNLGAPAAFKYFDTTIDRKRYTSTKEVLDATLIHQSITGLYETRIDLSQLGGDGGGGGGSEAAAKGGGGSGGLDDEYRLYSPLVKPDQNIQFWLEQFPQAWAETAGMGLAKQVPPQVIQLKASATPVSVRQYPLSKEAQEGIRPHVQRLIQQGILVPVQSPWNTPLLPVRKPGTNDYRPVQDLREVNKRVQDIHPTVPNPYNLLCALPPQRSWYTVLDLKDAFFCLRLHPTSQPLFAFEWRDPGTGRTGQLTWTRLPQGFKNSPTIFNEALHRDLANFRIQHPQVTLLQYVDDLLLAGATKQDCLEGTKALLLELSDLGYRASAKKAQICRREVTYLGYSLRDGQRWLTEARKKTVVQIPAPTTAKQVREFLGKAGFCRLFIPGFATLAAPLYPLTKPKGEFSWAPEHQKAFDAIKKALLSAPALALPDVTKPFTLYVDERKGVARGVLTQTLGPWRRPVAYLSKKLDPVASGWPVCLKAIAAVAILVKDADKLTLGQNITVIAPHALENIVRQPPDRWMTNARMTHYQSLLLTERVTFAPPAALNPATLLPEETDEPVTHDCHQLLIEETGVRKDLTDIPLTGEVLTWFTDGSSYVVEGKRMAGAAVVDGTRTIWASSLPEGTSAQKAELMALTQALRLAEGKSINIYTDSRYAFATAHVHGAIYKQRGWLTSAGREIKNKEEILSLLEALHLPKRLAIIHCPGHQKAKDPISRGNQMADRVAKQAAQGVNLLPAGKRTADGSEFEKRTADGSEFESPKKKAKVE

SEQ ID NO: 76 - protein, 2083 aa, synthetic construct
MPAAKRVKLDGGDKKYSIGLDIGTNSVGWAVITDEYKVPSKKFKVLGNTDRHSIKKNLIGALLFDSGETAEATRLKRTARRRYTRRKNRICYLQEIFSNEMAKVDDSFFHRLEESFLVEEDKKHERHPIFGNIVDEVAYHEKYPTIYHLRKKLVDSTDKADLRLIYLALAHMIKFRGHFLIEGDLNPDNSDVDKLFIQLVQTYNQLFEENPINASGVDAKAILSARLSKSRRLENLIAQLPGEKKNGLFGNLIALSLGLTPNFKSNFDLAEDAKLQLSKDTYDDDLDNLLAQIGDQYADLFLAAKNLSDAILLSDILRVNTEITKAPLSASMIKRYDEHHQDLTLLKALVRQQLPEKYKEIFFDQSKNGYAGYIDGGASQEEFYKFIKPILEKMDGTEELLVKLNREDLLRKQRTFDNGSIPHQIHLGELHAILRRQEDFYPFLKDNREKIEKILTFRIPYYVGPLARGNSRFAWMTRKSEETITPWNFEEVVDKGASAQSFIERMTNFDKNLPNEKVLPKHSLLYEYFTVYNELTKVKYVTEGMRKPAFLSGEQKKAIVDLLFKTNRKVTVKQLKEDYFKKIECFDSVEISGVEDRFNASLGTYHDLLKIIKDKDFLDNEENEDILEDIVLTLTLFEDREMIEERLKTYAHLFDDKVMKQLKRRRYTGWGRLSRKLINGIRDKQSGKTILDFLKSDGFANRNFMQLIHDDSLTFKEDIQKAQVSGQGDSLHEHIANLAGSPAIKKGILQTVKVVDELVKVMGRHKPENIVIEMARENQTTQKGQKNSRERMKRIEEGIKELGSQILKEHPVENTQLQNEKLYLYYLQNGRDMYVDQELDINRLSDYDVDHIVPQSFLKDDSIDNKVLTRSDKARGKSDNVPSEEVVKKMKNYWRQLLNAKLITQRKFDNLTKAERGGLSELDKAGFIKRQLVETRQITKHVAQILDSRMNTKYDENDKLIREVKVITLKSKLVSDFRKDFQFYKVREINNYHHAHDAYLNAVVGTALIKKYPKLESEFVYGDYKVYDVRKMIAKSEQEIGKATAKYFFYSNIMNFFKTEITLANGEIRKRPLIETNGETGEIVWDKGRDFATVRKVLSMPQVNIVKKTEVQTGGFSKESILPKRNSDKLIARKKDWDPKKYGGFDSPTVAYSVLVVAKVEKGKSKKLKSVKELLGITIMERSSFEKNPIDFLEAKGYKEVKKDLIIKLPKYSLFELENGRKRMLASAGELQKGNELALPSKYVNFLYLASHYEKLKGSPEDNEQKQLFVEQHKHYLDEIIEQISEFSKRVILADANLDKVLSAYNKHRDKPIREQAENIIHLFTLTNLGAPAAFKYFDTTIDRKRYTSTKEVLDATLIHQSITGLYETRIDLSQLGGDGGGGGPAPGGLDDEYRLYSPLVKPDQNIQFWLEQFPQAWAETAGMGLAKQVPPQVIQLKASATPVSVRQYPLSKEAQEGIRPHVQRLIQQGILVPVQSPWNTPLLPVRKPGTNDYRPVQDLREVNKRVQDIHPTVPNPYNLLCALPPQRSWYTVLDLKDAFFCLRLHPTSQPLFAFEWRDPGTGRTGQLTWTRLPQGFKNSPTIFNEALHRDLANFRIQHPQVTLLQYVDDLLLAGATKQDCLEGTKALLLELSDLGYRASAKKAQICRREVTYLGYSLRDGQRWLTEARKKTVVQIPAPTTAKQVREFLGKAGFCRLFIPGFATLAAPLYPLTKPKGEFSWAPEHQKAFDAIKKALLSAPALALPDVTKPFTLYVDERKGVARGVLTQTLGPWRRPVAYLSKKLDPVASGWPVCLKAIAAVAILVKDADKLTLGQNITVIAPHALENIVRQPPDRWMTNARMTHYQSLLLTERVTFAPPAALNPATLLPEETDEPVTHDCHQLLIEETGVRKDLTDIPLTGEVLTWFTDGSSYVVEGKRMAGAAVVDGTRTIWASSLPEGTSAQKAELMALTQALRLAEGKSINIYTDSRYAFATAHVHGAIYKQRGWLTSAGREIKNKEEILSLLEALHLPKRLAIIHCPGHQKAKDPISRGNQMADRVAKQAAQGVNLLPAGKRTADGSEFEKRTADGSEFESPKKKAKVE

SEQ ID NO: 77 - protein, 2084 aa, synthetic construct
MPAAKRVKLDGGDKKYSIGLDIGTNSVGWAVITDEYKVPSKKFKVLGNTDRHSIKKNLIGALLFDSGETAEATRLKRTARRRYTRRKNRICYLQEIFSNEMAKVDDSFFHRLEESFLVEEDKKHERHPIFGNIVDEVAYHEKYPTIYHLRKKLVDSTDKADLRLIYLALAHMIKFRGHFLIEGDLNPDNSDVDKLFIQLVQTYNQLFEENPINASGVDAKAILSARLSKSRRLENLIAQLPGEKKNGLFGNLIALSLGLTPNFKSNFDLAEDAKLQLSKDTYDDDLDNLLAQIGDQYADLFLAAKNLSDAILLSDILRVNTEITKAPLSASMIKRYDEHHQDLTLLKALVRQQLPEKYKEIFFDQSKNGYAGYIDGGASQEEFYKFIKPILEKMDGTEELLVKLNREDLLRKQRTFDNGSIPHQIHLGELHAILRRQEDFYPFLKDNREKIEKILTFRIPYYVGPLARGNSRFAWMTRKSEETITPWNFEEVVDKGASAQSFIERMTNFDKNLPNEKVLPKHSLLYEYFTVYNELTKVKYVTEGMRKPAFLSGEQKKAIVDLLFKTNRKVTVKQLKEDYFKKIECFDSVEISGVEDRFNASLGTYHDLLKIIKDKDFLDNEENEDILEDIVLTLTLFEDREMIEERLKTYAHLFDDKVMKQLKRRRYTGWGRLSRKLINGIRDKQSGKTILDFLKSDGFANRNFMQLIHDDSLTFKEDIQKAQVSGQGDSLHEHIANLAGSPAIKKGILQTVKVVDELVKVMGRHKPENIVIEMARENQTTQKGQKNSRERMKRIEEGIKELGSQILKEHPVENTQLQNEKLYLYYLQNGRDMYVDQELDINRLSDYDVDHIVPQSFLKDDSIDNKVLTRSDKARGKSDNVPSEEVVKKMKNYWRQLLNAKLITQRKFDNLTKAERGGLSELDKAGFIKRQLVETRQITKHVAQILDSRMNTKYDENDKLIREVKVITLKSKLVSDFRKDFQFYKVREINNYHHAHDAYLNAVVGTALIKKYPKLESEFVYGDYKVYDVRKMIAKSEQEIGKATAKYFFYSNIMNFFKTEITLANGEIRKRPLIETNGETGEIVWDKGRDFATVRKVLSMPQVNIVKKTEVQTGGFSKESILPKRNSDKLIARKKDWDPKKYGGFDSPTVAYSVLVVAKVEKGKSKKLKSVKELLGITIMERSSFEKNPIDFLEAKGYKEVKKDLIIKLPKYSLFELENGRKRMLASAGELQKGNELALPSKYVNFLYLASHYEKLKGSPEDNEQKQLFVEQHKHYLDEIIEQISEFSKRVILADANLDKVLSAYNKHRDKPIREQAENIIHLFTLTNLGAPAAFKYFDTTIDRKRYTSTKEVLDATLIHQSITGLYETRIDLSQLGGDGGGGGGGGGGGLDDEYRLYSPLVKPDQNIQFWLEQFPQAWAETAGMGLAKQVPPQVIQLKASATPVSVRQYPLSKEAQEGIRPHVQRLIQQGILVPVQSPWNTPLLPVRKPGTNDYRPVQDLREVNKRVQDIHPTVPNPYNLLCALPPQRSWYTVLDLKDAFFCLRLHPTSQPLFAFEWRDPGTGRTGQLTWTRLPQGFKNSPTIFNEALHRDLANFRIQHPQVTLLQYVDDLLLAGATKQDCLEGTKALLLELSDLGYRASAKKAQICRREVTYLGYSLRDGQRWLTEARKKTVVQIPAPTTAKQVREFLGKAGFCRLFIPGFATLAAPLYPLTKPKGEFSWAPEHQKAFDAIKKALLSAPALALPDVTKPFTLYVDERKGVARGVLTQTLGPWRRPVAYLSKKLDPVASGWPVCLKAIAAVAILVKDADKLTLGQNITVIAPHALENIVRQPPDRWMTNARMTHYQSLLLTERVTFAPPAALNPATLLPEETDEPVTHDCHQLLIEETGVRKDLTDIPLTGEVLTWFTDGSSYVVEGKRMAGAAVVDGTRTIWASSLPEGTSAQKAELMALTQALRLAEGKSINIYTDSRYAFATAHVHGAIYKQRGWLTSAGREIKNKEEILSLLEALHLPKRLAIIHCPGHQKAKDPISRGNQMADRVAKQAAQGVNLLPAGKRTADGSEFEKRTADGSEFESPKKKAKVE

SEQ ID NO: 78 - protein, 2083 aa, synthetic construct
MPAAKRVKLDGGDKKYSIGLDIGTNSVGWAVITDEYKVPSKKFKVLGNTDRHSIKKNLIGALLFDSGETAEATRLKRTARRRYTRRKNRICYLQEIFSNEMAKVDDSFFHRLEESFLVEEDKKHERHPIFGNIVDEVAYHEKYPTIYHLRKKLVDSTDKADLRLIYLALAHMIKFRGHFLIEGDLNPDNSDVDKLFIQLVQTYNQLFEENPINASGVDAKAILSARLSKSRRLENLIAQLPGEKKNGLFGNLIALSLGLTPNFKSNFDLAEDAKLQLSKDTYDDDLDNLLAQIGDQYADLFLAAKNLSDAILLSDILRVNTEITKAPLSASMIKRYDEHHQDLTLLKALVRQQLPEKYKEIFFDQSKNGYAGYIDGGASQEEFYKFIKPILEKMDGTEELLVKLNREDLLRKQRTFDNGSIPHQIHLGELHAILRRQEDFYPFLKDNREKIEKILTFRIPYYVGPLARGNSRFAWMTRKSEETITPWNFEEVVDKGASAQSFIERMTNFDKNLPNEKVLPKHSLLYEYFTVYNELTKVKYVTEGMRKPAFLSGEQKKAIVDLLFKTNRKVTVKQLKEDYFKKIECFDSVEISGVEDRFNASLGTYHDLLKIIKDKDFLDNEENEDILEDIVLTLTLFEDREMIEERLKTYAHLFDDKVMKQLKRRRYTGWGRLSRKLINGIRDKQSGKTILDFLKSDGFANRNFMQLIHDDSLTFKEDIQKAQVSGQGDSLHEHIANLAGSPAIKKGILQTVKVVDELVKVMGRHKPENIVIEMARENQTTQKGQKNSRERMKRIEEGIKELGSQILKEHPVENTQLQNEKLYLYYLQNGRDMYVDQELDINRLSDYDVDHIVPQSFLKDDSIDNKVLTRSDKARGKSDNVPSEEVVKKMKNYWRQLLNAKLITQRKFDNLTKAERGGLSELDKAGFIKRQLVETRQITKHVAQILDSRMNTKYDENDKLIREVKVITLKSKLVSDFRKDFQFYKVREINNYHHAHDAYLNAVVGTALIKKYPKLESEFVYGDYKVYDVRKMIAKSEQEIGKATAKYFFYSNIMNFFKTEITLANGEIRKRPLIETNGETGEIVWDKGRDFATVRKVLSMPQVNIVKKTEVQTGGFSKESILPKRNSDKLIARKKDWDPKKYGGFDSPTVAYSVLVVAKVEKGKSKKLKSVKELLGITIMERSSFEKNPIDFLEAKGYKEVKKDLIIKLPKYSLFELENGRKRMLASAGELQKGNELALPSKYVNFLYLASHYEKLKGSPEDNEQKQLFVEQHKHYLDEIIEQISEFSKRVILADANLDKVLSAYNKHRDKPIREQAENIIHLFTLTNLGAPAAFKYFDTTIDRKRYTSTKEVLDATLIHQSITGLYETRIDLSQLGGDGGGGSPAPGGLDDEYRLYSPLVKPDQNIQFWLEQFPQAWAETAGMGLAKQVPPQVIQLKASATPVSVRQYPLSKEAQEGIRPHVQRLIQQGILVPVQSPWNTPLLPVRKPGTNDYRPVQDLREVNKRVQDIHPTVPNPYNLLCALPPQRSWYTVLDLKDAFFCLRLHPTSQPLFAFEWRDPGTGRTGQLTWTRLPQGFKNSPTIFNEALHRDLANFRIQHPQVTLLQYVDDLLLAGATKQDCLEGTKALLLELSDLGYRASAKKAQICRREVTYLGYSLRDGQRWLTEARKKTVVQIPAPTTAKQVREFLGKAGFCRLFIPGFATLAAPLYPLTKPKGEFSWAPEHQKAFDAIKKALLSAPALALPDVTKPFTLYVDERKGVARGVLTQTLGPWRRPVAYLSKKLDPVASGWPVCLKAIAAVAILVKDADKLTLGQNITVIAPHALENIVRQPPDRWMTNARMTHYQSLLLTERVTFAPPAALNPATLLPEETDEPVTHDCHQLLIEETGVRKDLTDIPLTGEVLTWFTDGSSYVVEGKRMAGAAVVDGTRTIWASSLPEGTSAQKAELMALTQALRLAEGKSINIYTDSRYAFATAHVHGAIYKQRGWLTSAGREIKNKEEILSLLEALHLPKRLAIIHCPGHQKAKDPISRGNQMADRVAKQAAQGVNLLPAGKRTADGSEFEKRTADGSEFESPKKKAKVE

SEQ ID NO: 79 - protein, 2083 aa, synthetic construct
MPAAKRVKLDGGDKKYSIGLDIGTNSVGWAVITDEYKVPSKKFKVLGNTDRHSIKKNLIGALLFDSGETAEATRLKRTARRRYTRRKNRICYLQEIFSNEMAKVDDSFFHRLEESFLVEEDKKHERHPIFGNIVDEVAYHEKYPTIYHLRKKLVDSTDKADLRLIYLALAHMIKFRGHFLIEGDLNPDNSDVDKLFIQLVQTYNQLFEENPINASGVDAKAILSARLSKSRRLENLIAQLPGEKKNGLFGNLIALSLGLTPNFKSNFDLAEDAKLQLSKDTYDDDLDNLLAQIGDQYADLFLAAKNLSDAILLSDILRVNTEITKAPLSASMIKRYDEHHQDLTLLKALVRQQLPEKYKEIFFDQSKNGYAGYIDGGASQEEFYKFIKPILEKMDGTEELLVKLNREDLLRKQRTFDNGSIPHQIHLGELHAILRRQEDFYPFLKDNREKIEKILTFRIPYYVGPLARGNSRFAWMTRKSEETITPWNFEEVVDKGASAQSFIERMTNFDKNLPNEKVLPKHSLLYEYFTVYNELTKVKYVTEGMRKPAFLSGEQKKAIVDLLFKTNRKVTVKQLKEDYFKKIECFDSVEISGVEDRFNASLGTYHDLLKIIKDKDFLDNEENEDILEDIVLTLTLFEDREMIEERLKTYAHLFDDKVMKQLKRRRYTGWGRLSRKLINGIRDKQSGKTILDFLKSDGFANRNFMQLIHDDSLTFKEDIQKAQVSGQGDSLHEHIANLAGSPAIKKGILQTVKVVDELVKVMGRHKPENIVIEMARENQTTQKGQKNSRERMKRIEEGIKELGSQILKEHPVENTQLQNEKLYLYYLQNGRDMYVDQELDINRLSDYDVDHIVPQSFLKDDSIDNKVLTRSDKARGKSDNVPSEEVVKKMKNYWRQLLNAKLITQRKFDNLTKAERGGLSELDKAGFIKRQLVETRQITKHVAQILDSRMNTKYDENDKLIREVKVITLKSKLVSDFRKDFQFYKVREINNYHHAHDAYLNAVVGTALIKKYPKLESEFVYGDYKVYDVRKMIAKSEQEIGKATAKYFFYSNIMNFFKTEITLANGEIRKRPLIETNGETGEIVWDKGRDFATVRKVLSMPQVNIVKKTEVQTGGFSKESILPKRNSDKLIARKKDWDPKKYGGFDSPTVAYSVLVVAKVEKGKSKKLKSVKELLGITIMERSSFEKNPIDFLEAKGYKEVKKDLIIKLPKYSLFELENGRKRMLASAGELQKGNELALPSKYVNFLYLASHYEKLKGSPEDNEQKQLFVEQHKHYLDEIIEQISEFSKRVILADANLDKVLSAYNKHRDKPIREQAENIIHLFTLTNLGAPAAFKYFDTTIDRKRYTSTKEVLDATLIHQSITGLYETRIDLSQLGGDGGPAPGGGGGLDDEYRLYSPLVKPDQNIQFWLEQFPQAWAETAGMGLAKQVPPQVIQLKASATPVSVRQYPLSKEAQEGIRPHVQRLIQQGILVPVQSPWNTPLLPVRKPGTNDYRPVQDLREVNKRVQDIHPTVPNPYNLLCALPPQRSWYTVLDLKDAFFCLRLHPTSQPLFAFEWRDPGTGRTGQLTWTRLPQGFKNSPTIFNEALHRDLANFRIQHPQVTLLQYVDDLLLAGATKQDCLEGTKALLLELSDLGYRASAKKAQICRREVTYLGYSLRDGQRWLTEARKKTVVQIPAPTTAKQVREFLGKAGFCRLFIPGFATLAAPLYPLTKPKGEFSWAPEHQKAFDAIKKALLSAPALALPDVTKPFTLYVDERKGVARGVLTQTLGPWRRPVAYLSKKLDPVASGWPVCLKAIAAVAILVKDADKLTLGQNITVIAPHALENIVRQPPDRWMTNARMTHYQSLLLTERVTFAPPAALNPATLLPEETDEPVTHDCHQLLIEETGVRKDLTDIPLTGEVLTWFTDGSSYVVEGKRMAGAAVVDGTRTIWASSLPEGTSAQKAELMALTQALRLAEGKSINIYTDSRYAFATAHVHGAIYKQRGWLTSAGREIKNKEEILSLLEALHLPKRLAIIHCPGHQKAKDPISRGNQMADRVAKQAAQGVNLLPAGKRTADGSEFEKRTADGSEFESPKKKAKVE

SEQ ID NO: 80 - protein, 2088 aa, synthetic construct
MPAAKRVKLDGGDKKYSIGLDIGTNSVGWAVITDEYKVPSKKFKVLGNTDRHSIKKNLIGALLFDSGETAEATRLKRTARRRYTRRKNRICYLQEIFSNEMAKVDDSFFHRLEESFLVEEDKKHERHPIFGNIVDEVAYHEKYPTIYHLRKKLVDSTDKADLRLIYLALAHMIKFRGHFLIEGDLNPDNSDVDKLFIQLVQTYNQLFEENPINASGVDAKAILSARLSKSRRLENLIAQLPGEKKNGLFGNLIALSLGLTPNFKSNFDLAEDAKLQLSKDTYDDDLDNLLAQIGDQYADLFLAAKNLSDAILLSDILRVNTEITKAPLSASMIKRYDEHHQDLTLLKALVRQQLPEKYKEIFFDQSKNGYAGYIDGGASQEEFYKFIKPILEKMDGTEELLVKLNREDLLRKQRTFDNGSIPHQIHLGELHAILRRQEDFYPFLKDNREKIEKILTFRIPYYVGPLARGNSRFAWMTRKSEETITPWNFEEVVDKGASAQSFIERMTNFDKNLPNEKVLPKHSLLYEYFTVYNELTKVKYVTEGMRKPAFLSGEQKKAIVDLLFKTNRKVTVKQLKEDYFKKIECFDSVEISGVEDRFNASLGTYHDLLKIIKDKDFLDNEENEDILEDIVLTLTLFEDREMIEERLKTYAHLFDDKVMKQLKRRRYTGWGRLSRKLINGIRDKQSGKTILDFLKSDGFANRNFMQLIHDDSLTFKEDIQKAQVSGQGDSLHEHIANLAGSPAIKKGILQTVKVVDELVKVMGRHKPENIVIEMARENQTTQKGQKNSRERMKRIEEGIKELGSQILKEHPVENTQLQNEKLYLYYLQNGRDMYVDQELDINRLSDYDVDHIVPQSFLKDDSIDNKVLTRSDKARGKSDNVPSEEVVKKMKNYWRQLLNAKLITQRKFDNLTKAERGGLSELDKAGFIKRQLVETRQITKHVAQILDSRMNTKYDENDKLIREVKVITLKSKLVSDFRKDFQFYKVREINNYHHAHDAYLNAVVGTALIKKYPKLESEFVYGDYKVYDVRKMIAKSEQEIGKATAKYFFYSNIMNFFKTEITLANGEIRKRPLIETNGETGEIVWDKGRDFATVRKVLSMPQVNIVKKTEVQTGGFSKESILPKRNSDKLIARKKDWDPKKYGGFDSPTVAYSVLVVAKVEKGKSKKLKSVKELLGITIMERSSFEKNPIDFLEAKGYKEVKKDLIIKLPKYSLFELENGRKRMLASAGELQKGNELALPSKYVNFLYLASHYEKLKGSPEDNEQKQLFVEQHKHYLDEIIEQISEFSKRVILADANLDKVLSAYNKHRDKPIREQAENIIHLFTLTNLGAPAAFKYFDTTIDRKRYTSTKEVLDATLIHQSITGLYETRIDLSQLGGDGGGGSGSSEAAAKGGLDDEYRLYSPLVKPDQNIQFWLEQFPQAWAETAGMGLAKQVPPQVIQLKASATPVSVRQYPLSKEAQEGIRPHVQRLIQQGILVPVQSPWNTPLLPVRKPGTNDYRPVQDLREVNKRVQDIHPTVPNPYNLLCALPPQRSWYTVLDLKDAFFCLRLHPTSQPLFAFEWRDPGTGRTGQLTWTRLPQGFKNSPTIFNEALHRDLANFRIQHPQVTLLQYVDDLLLAGATKQDCLEGTKALLLELSDLGYRASAKKAQICRREVTYLGYSLRDGQRWLTEARKKTVVQIPAPTTAKQVREFLGKAGFCRLFIPGFATLAAPLYPLTKPKGEFSWAPEHQKAFDAIKKALLSAPALALPDVTKPFTLYVDERKGVARGVLTQTLGPWRRPVAYLSKKLDPVASGWPVCLKAIAAVAILVKDADKLTLGQNITVIAPHALENIVRQPPDRWMTNARMTHYQSLLLTERVTFAPPAALNPATLLPEETDEPVTHDCHQLLIEETGVRKDLTDIPLTGEVLTWFTDGSSYVVEGKRMAGAAVVDGTRTIWASSLPEGTSAQKAELMALTQALRLAEGKSINIYTDSRYAFATAHVHGAIYKQRGWLTSAGREIKNKEEILSLLEALHLPKRLAIIHCPGHQKAKDPISRGNQMADRVAKQAAQGVNLLPAGKRTADGSEFEKRTADGSEFESPKKKAKVE

SEQ ID NO: 81 - protein, 2083 aa, synthetic construct
MPAAKRVKLDGGDKKYSIGLDIGTNSVGWAVITDEYKVPSKKFKVLGNTDRHSIKKNLIGALLFDSGETAEATRLKRTARRRYTRRKNRICYLQEIFSNEMAKVDDSFFHRLEESFLVEEDKKHERHPIFGNIVDEVAYHEKYPTIYHLRKKLVDSTDKADLRLIYLALAHMIKFRGHFLIEGDLNPDNSDVDKLFIQLVQTYNQLFEENPINASGVDAKAILSARLSKSRRLENLIAQLPGEKKNGLFGNLIALSLGLTPNFKSNFDLAEDAKLQLSKDTYDDDLDNLLAQIGDQYADLFLAAKNLSDAILLSDILRVNTEITKAPLSASMIKRYDEHHQDLTLLKALVRQQLPEKYKEIFFDQSKNGYAGYIDGGASQEEFYKFIKPILEKMDGTEELLVKLNREDLLRKQRTFDNGSIPHQIHLGELHAILRRQEDFYPFLKDNREKIEKILTFRIPYYVGPLARGNSRFAWMTRKSEETITPWNFEEVVDKGASAQSFIERMTNFDKNLPNEKVLPKHSLLYEYFTVYNELTKVKYVTEGMRKPAFLSGEQKKAIVDLLFKTNRKVTVKQLKEDYFKKIECFDSVEISGVEDRFNASLGTYHDLLKIIKDKDFLDNEENEDILEDIVLTLTLFEDREMIEERLKTYAHLFDDKVMKQLKRRRYTGWGRLSRKLINGIRDKQSGKTILDFLKSDGFANRNFMQLIHDDSLTFKEDIQKAQVSGQGDSLHEHIANLAGSPAIKKGILQTVKVVDELVKVMGRHKPENIVIEMARENQTTQKGQKNSRERMKRIEEGIKELGSQILKEHPVENTQLQNEKLYLYYLQNGRDMYVDQELDINRLSDYDVDHIVPQSFLKDDSIDNKVLTRSDKARGKSDNVPSEEVVKKMKNYWRQLLNAKLITQRKFDNLTKAERGGLSELDKAGFIKRQLVETRQITKHVAQILDSRMNTKYDENDKLIREVKVITLKSKLVSDFRKDFQFYKVREINNYHHAHDAYLNAVVGTALIKKYPKLESEFVYGDYKVYDVRKMIAKSEQEIGKATAKYFFYSNIMNFFKTEITLANGEIRKRPLIETNGETGEIVWDKGRDFATVRKVLSMPQVNIVKKTEVQTGGFSKESILPKRNSDKLIARKKDWDPKKYGGFDSPTVAYSVLVVAKVEKGKSKKLKSVKELLGITIMERSSFEKNPIDFLEAKGYKEVKKDLIIKLPKYSLFELENGRKRMLASAGELQKGNELALPSKYVNFLYLASHYEKLKGSPEDNEQKQLFVEQHKHYLDEIIEQISEFSKRVILADANLDKVLSAYNKHRDKPIREQAENIIHLFTLTNLGAPAAFKYFDTTIDRKRYTSTKEVLDATLIHQSITGLYETRIDLSQLGGDGGGSSGGGGGLDDEYRLYSPLVKPDQNIQFWLEQFPQAWAETAGMGLAKQVPPQVIQLKASATPVSVRQYPLSKEAQEGIRPHVQRLIQQGILVPVQSPWNTPLLPVRKPGTNDYRPVQDLREVNKRVQDIHPTVPNPYNLLCALPPQRSWYTVLDLKDAFFCLRLHPTSQPLFAFEWRDPGTGRTGQLTWTRLPQGFKNSPTIFNEALHRDLANFRIQHPQVTLLQYVDDLLLAGATKQDCLEGTKALLLELSDLGYRASAKKAQICRREVTYLGYSLRDGQRWLTEARKKTVVQIPAPTTAKQVREFLGKAGFCRLFIPGFATLAAPLYPLTKPKGEFSWAPEHQKAFDAIKKALLSAPALALPDVTKPFTLYVDERKGVARGVLTQTLGPWRRPVAYLSKKLDPVASGWPVCLKAIAAVAILVKDADKLTLGQNITVIAPHALENIVRQPPDRWMTNARMTHYQSLLLTERVTFAPPAALNPATLLPEETDEPVTHDCHQLLIEETGVRKDLTDIPLTGEVLTWFTDGSSYVVEGKRMAGAAVVDGTRTIWASSLPEGTSAQKAELMALTQALRLAEGKSINIYTDSRYAFATAHVHGAIYKQRGWLTSAGREIKNKEEILSLLEALHLPKRLAIIHCPGHQKAKDPISRGNQMADRVAKQAAQGVNLLPAGKRTADGSEFEKRTADGSEFESPKKKAKVE

SEQ ID NO: 82 - protein, 2086 aa, synthetic construct
MPAAKRVKLDGGDKKYSIGLDIGTNSVGWAVITDEYKVPSKKFKVLGNTDRHSIKKNLIGALLFDSGETAEATRLKRTARRRYTRRKNRICYLQEIFSNEMAKVDDSFFHRLEESFLVEEDKKHERHPIFGNIVDEVAYHEKYPTIYHLRKKLVDSTDKADLRLIYLALAHMIKFRGHFLIEGDLNPDNSDVDKLFIQLVQTYNQLFEENPINASGVDAKAILSARLSKSRRLENLIAQLPGEKKNGLFGNLIALSLGLTPNFKSNFDLAEDAKLQLSKDTYDDDLDNLLAQIGDQYADLFLAAKNLSDAILLSDILRVNTEITKAPLSASMIKRYDEHHQDLTLLKALVRQQLPEKYKEIFFDQSKNGYAGYIDGGASQEEFYKFIKPILEKMDGTEELLVKLNREDLLRKQRTFDNGSIPHQIHLGELHAILRRQEDFYPFLKDNREKIEKILTFRIPYYVGPLARGNSRFAWMTRKSEETITPWNFEEVVDKGASAQSFIERMTNFDKNLPNEKVLPKHSLLYEYFTVYNELTKVKYVTEGMRKPAFLSGEQKKAIVDLLFKTNRKVTVKQLKEDYFKKIECFDSVEISGVEDRFNASLGTYHDLLKIIKDKDFLDNEENEDILEDIVLTLTLFEDREMIEERLKTYAHLFDDKVMKQLKRRRYTGWGRLSRKLINGIRDKQSGKTILDFLKSDGFANRNFMQLIHDDSLTFKEDIQKAQVSGQGDSLHEHIANLAGSPAIKKGILQTVKVVDELVKVMGRHKPENIVIEMARENQTTQKGQKNSRERMKRIEEGIKELGSQILKEHPVENTQLQNEKLYLYYLQNGRDMYVDQELDINRLSDYDVDHIVPQSFLKDDSIDNKVLTRSDKARGKSDNVPSEEVVKKMKNYWRQLLNAKLITQRKFDNLTKAERGGLSELDKAGFIKRQLVETRQITKHVAQILDSRMNTKYDENDKLIREVKVITLKSKLVSDFRKDFQFYKVREINNYHHAHDAYLNAVVGTALIKKYPKLESEFVYGDYKVYDVRKMIAKSEQEIGKATAKYFFYSNIMNFFKTEITLANGEIRKRPLIETNGETGEIVWDKGRDFATVRKVLSMPQVNIVKKTEVQTGGFSKESILPKRNSDKLIARKKDWDPKKYGGFDSPTVAYSVLVVAKVEKGKSKKLKSVKELLGITIMERSSFEKNPIDFLEAKGYKEVKKDLIIKLPKYSLFELENGRKRMLASAGELQKGNELALPSKYVNFLYLASHYEKLKGSPEDNEQKQLFVEQHKHYLDEIIEQISEFSKRVILADANLDKVLSAYNKHRDKPIREQAENIIHLFTLTNLGAPAAFKYFDTTIDRKRYTSTKEVLDATLIHQSITGLYETRIDLSQLGGDGGPAPGSSGGSGGLDDEYRLYSPLVKPDQNIQFWLEQFPQAWAETAGMGLAKQVPPQVIQLKASATPVSVRQYPLSKEAQEGIRPHVQRLIQQGILVPVQSPWNTPLLPVRKPGTNDYRPVQDLREVNKRVQDIHPTVPNPYNLLCALPPQRSWYTVLDLKDAFFCLRLHPTSQPLFAFEWRDPGTGRTGQLTWTRLPQGFKNSPTIFNEALHRDLANFRIQHPQVTLLQYVDDLLLAGATKQDCLEGTKALLLELSDLGYRASAKKAQICRREVTYLGYSLRDGQRWLTEARKKTVVQIPAPTTAKQVREFLGKAGFCRLFIPGFATLAAPLYPLTKPKGEFSWAPEHQKAFDAIKKALLSAPALALPDVTKPFTLYVDERKGVARGVLTQTLGPWRRPVAYLSKKLDPVASGWPVCLKAIAAVAILVKDADKLTLGQNITVIAPHALENIVRQPPDRWMTNARMTHYQSLLLTERVTFAPPAALNPATLLPEETDEPVTHDCHQLLIEETGVRKDLTDIPLTGEVLTWFTDGSSYVVEGKRMAGAAVVDGTRTIWASSLPEGTSAQKAELMALTQALRLAEGKSINIYTDSRYAFATAHVHGAIYKQRGWLTSAGREIKNKEEILSLLEALHLPKRLAIIHCPGHQKAKDPISRGNQMADRVAKQAAQGVNLLPAGKRTADGSEFEKRTADGSEFESPKKKAKVE

SEQ ID NO: 83 - protein, 2088 aa, synthetic construct
MPAAKRVKLDGGDKKYSIGLDIGTNSVGWAVITDEYKVPSKKFKVLGNTDRHSIKKNLIGALLFDSGETAEATRLKRTARRRYTRRKNRICYLQEIFSNEMAKVDDSFFHRLEESFLVEEDKKHERHPIFGNIVDEVAYHEKYPTIYHLRKKLVDSTDKADLRLIYLALAHMIKFRGHFLIEGDLNPDNSDVDKLFIQLVQTYNQLFEENPINASGVDAKAILSARLSKSRRLENLIAQLPGEKKNGLFGNLIALSLGLTPNFKSNFDLAEDAKLQLSKDTYDDDLDNLLAQIGDQYADLFLAAKNLSDAILLSDILRVNTEITKAPLSASMIKRYDEHHQDLTLLKALVRQQLPEKYKEIFFDQSKNGYAGYIDGGASQEEFYKFIKPILEKMDGTEELLVKLNREDLLRKQRTFDNGSIPHQIHLGELHAILRRQEDFYPFLKDNREKIEKILTFRIPYYVGPLARGNSRFAWMTRKSEETITPWNFEEVVDKGASAQSFIERMTNFDKNLPNEKVLPKHSLLYEYFTVYNELTKVKYVTEGMRKPAFLSGEQKKAIVDLLFKTNRKVTVKQLKEDYFKKIECFDSVEISGVEDRFNASLGTYHDLLKIIKDKDFLDNEENEDILEDIVLTLTLFEDREMIEERLKTYAHLFDDKVMKQLKRRRYTGWGRLSRKLINGIRDKQSGKTILDFLKSDGFANRNFMQLIHDDSLTFKEDIQKAQVSGQGDSLHEHIANLAGSPAIKKGILQTVKVVDELVKVMGRHKPENIVIEMARENQTTQKGQKNSRERMKRIEEGIKELGSQILKEHPVENTQLQNEKLYLYYLQNGRDMYVDQELDINRLSDYDVDHIVPQSFLKDDSIDNKVLTRSDKARGKSDNVPSEEVVKKMKNYWRQLLNAKLITQRKFDNLTKAERGGLSELDKAGFIKRQLVETRQITKHVAQILDSRMNTKYDENDKLIREVKVITLKSKLVSDFRKDFQFYKVREINNYHHAHDAYLNAVVGTALIKKYPKLESEFVYGDYKVYDVRKMIAKSEQEIGKATAKYFFYSNIMNFFKTEITLANGEIRKRPLIETNGETGEIVWDKGRDFATVRKVLSMPQVNIVKKTEVQTGGFSKESILPKRNSDKLIARKKDWDPKKYGGFDSPTVAYSVLVVAKVEKGKSKKLKSVKELLGITIMERSSFEKNPIDFLEAKGYKEVKKDLIIKLPKYSLFELENGRKRMLASAGELQKGNELALPSKYVNFLYLASHYEKLKGSPEDNEQKQLFVEQHKHYLDEIIEQISEFSKRVILADANLDKVLSAYNKHRDKPIREQAENIIHLFTLTNLGAPAAFKYFDTTIDRKRYTSTKEVLDATLIHQSITGLYETRIDLSQLGGDGGEAAAKGSSGGSGGLDDEYRLYSPLVKPDQNIQFWLEQFPQAWAETAGMGLAKQVPPQVIQLKASATPVSVRQYPLSKEAQEGIRPHVQRLIQQGILVPVQSPWNTPLLPVRKPGTNDYRPVQDLREVNKRVQDIHPTVPNPYNLLCALPPQRSWYTVLDLKDAFFCLRLHPTSQPLFAFEWRDPGTGRTGQLTWTRLPQGFKNSPTIFNEALHRDLANFRIQHPQVTLLQYVDDLLLAGATKQDCLEGTKALLLELSDLGYRASAKKAQICRREVTYLGYSLRDGQRWLTEARKKTVVQIPAPTTAKQVREFLGKAGFCRLFIPGFATLAAPLYPLTKPKGEFSWAPEHQKAFDAIKKALLSAPALALPDVTKPFTLYVDERKGVARGVLTQTLGPWRRPVAYLSKKLDPVASGWPVCLKAIAAVAILVKDADKLTLGQNITVIAPHALENIVRQPPDRWMTNARMTHYQSLLLTERVTFAPPAALNPATLLPEETDEPVTHDCHQLLIEETGVRKDLTDIPLTGEVLTWFTDGSSYVVEGKRMAGAAVVDGTRTIWASSLPEGTSAQKAELMALTQALRLAEGKSINIYTDSRYAFATAHVHGAIYKQRGWLTSAGREIKNKEEILSLLEALHLPKRLAIIHCPGHQKAKDPISRGNQMADRVAKQAAQGVNLLPAGKRTADGSEFEKRTADGSEFESPKKKAKVE

SEQ ID NO: 84 - protein, 2082 aa, synthetic construct
MPAAKRVKLDGGDKKYSIGLDIGTNSVGWAVITDEYKVPSKKFKVLGNTDRHSIKKNLIGALLFDSGETAEATRLKRTARRRYTRRKNRICYLQEIFSNEMAKVDDSFFHRLEESFLVEEDKKHERHPIFGNIVDEVAYHEKYPTIYHLRKKLVDSTDKADLRLIYLALAHMIKFRGHFLIEGDLNPDNSDVDKLFIQLVQTYNQLFEENPINASGVDAKAILSARLSKSRRLENLIAQLPGEKKNGLFGNLIALSLGLTPNFKSNFDLAEDAKLQLSKDTYDDDLDNLLAQIGDQYADLFLAAKNLSDAILLSDILRVNTEITKAPLSASMIKRYDEHHQDLTLLKALVRQQLPEKYKEIFFDQSKNGYAGYIDGGASQEEFYKFIKPILEKMDGTEELLVKLNREDLLRKQRTFDNGSIPHQIHLGELHAILRRQEDFYPFLKDNREKIEKILTFRIPYYVGPLARGNSRFAWMTRKSEETITPWNFEEVVDKGASAQSFIERMTNFDKNLPNEKVLPKHSLLYEYFTVYNELTKVKYVTEGMRKPAFLSGEQKKAIVDLLFKTNRKVTVKQLKEDYFKKIECFDSVEISGVEDRFNASLGTYHDLLKIIKDKDFLDNEENEDILEDIVLTLTLFEDREMIEERLKTYAHLFDDKVMKQLKRRRYTGWGRLSRKLINGIRDKQSGKTILDFLKSDGFANRNFMQLIHDDSLTFKEDIQKAQVSGQGDSLHEHIANLAGSPAIKKGILQTVKVVDELVKVMGRHKPENIVIEMARENQTTQKGQKNSRERMKRIEEGIKELGSQILKEHPVENTQLQNEKLYLYYLQNGRDMYVDQELDINRLSDYDVDHIVPQSFLKDDSIDNKVLTRSDKARGKSDNVPSEEVVKKMKNYWRQLLNAKLITQRKFDNLTKAERGGLSELDKAGFIKRQLVETRQITKHVAQILDSRMNTKYDENDKLIREVKVITLKSKLVSDFRKDFQFYKVREINNYHHAHDAYLNAVVGTALIKKYPKLESEFVYGDYKVYDVRKMIAKSEQEIGKATAKYFFYSNIMNFFKTEITLANGEIRKRPLIETNGETGEIVWDKGRDFATVRKVLSMPQVNIVKKTEVQTGGFSKESILPKRNSDKLIARKKDWDPKKYGGFDSPTVAYSVLVVAKVEKGKSKKLKSVKELLGITIMERSSFEKNPIDFLEAKGYKEVKKDLIIKLPKYSLFELENGRKRMLASAGELQKGNELALPSKYVNFLYLASHYEKLKGSPEDNEQKQLFVEQHKHYLDEIIEQISEFSKRVILADANLDKVLSAYNKHRDKPIREQAENIIHLFTLTNLGAPAAFKYFDTTIDRKRYTSTKEVLDATLIHQSITGLYETRIDLSQLGGDGGGGGGSGGLDDEYRLYSPLVKPDQNIQFWLEQFPQAWAETAGMGLAKQVPPQVIQLKASATPVSVRQYPLSKEAQEGIRPHVQRLIQQGILVPVQSPWNTPLLPVRKPGTNDYRPVQDLREVNKRVQDIHPTVPNPYNLLCALPPQRSWYTVLDLKDAFFCLRLHPTSQPLFAFEWRDPGTGRTGQLTWTRLPQGFKNSPTIFNEALHRDLANFRIQHPQVTLLQYVDDLLLAGATKQDCLEGTKALLLELSDLGYRASAKKAQICRREVTYLGYSLRDGQRWLTEARKKTVVQIPAPTTAKQVREFLGKAGFCRLFIPGFATLAAPLYPLTKPKGEFSWAPEHQKAFDAIKKALLSAPALALPDVTKPFTLYVDERKGVARGVLTQTLGPWRRPVAYLSKKLDPVASGWPVCLKAIAAVAILVKDADKLTLGQNITVIAPHALENIVRQPPDRWMTNARMTHYQSLLLTERVTFAPPAALNPATLLPEETDEPVTHDCHQLLIEETGVRKDLTDIPLTGEVLTWFTDGSSYVVEGKRMAGAAVVDGTRTIWASSLPEGTSAQKAELMALTQALRLAEGKSINIYTDSRYAFATAHVHGAIYKQRGWLTSAGREIKNKEEILSLLEALHLPKRLAIIHCPGHQKAKDPISRGNQMADRVAKQAAQGVNLLPAGKRTADGSEFEKRTADGSEFESPKKKAKVE

SEQ ID NO: 85 - protein, 2086 aa, synthetic construct
MPAAKRVKLDGGDKKYSIGLDIGTNSVGWAVITDEYKVPSKKFKVLGNTDRHSIKKNLIGALLFDSGETAEATRLKRTARRRYTRRKNRICYLQEIFSNEMAKVDDSFFHRLEESFLVEEDKKHERHPIFGNIVDEVAYHEKYPTIYHLRKKLVDSTDKADLRLIYLALAHMIKFRGHFLIEGDLNPDNSDVDKLFIQLVQTYNQLFEENPINASGVDAKAILSARLSKSRRLENLIAQLPGEKKNGLFGNLIALSLGLTPNFKSNFDLAEDAKLQLSKDTYDDDLDNLLAQIGDQYADLFLAAKNLSDAILLSDILRVNTEITKAPLSASMIKRYDEHHQDLTLLKALVRQQLPEKYKEIFFDQSKNGYAGYIDGGASQEEFYKFIKPILEKMDGTEELLVKLNREDLLRKQRTFDNGSIPHQIHLGELHAILRRQEDFYPFLKDNREKIEKILTFRIPYYVGPLARGNSRFAWMTRKSEETITPWNFEEVVDKGASAQSFIERMTNFDKNLPNEKVLPKHSLLYEYFTVYNELTKVKYVTEGMRKPAFLSGEQKKAIVDLLFKTNRKVTVKQLKEDYFKKIECFDSVEISGVEDRFNASLGTYHDLLKIIKDKDFLDNEENEDILEDIVLTLTLFEDREMIEERLKTYAHLFDDKVMKQLKRRRYTGWGRLSRKLINGIRDKQSGKTILDFLKSDGFANRNFMQLIHDDSLTFKEDIQKAQVSGQGDSLHEHIANLAGSPAIKKGILQTVKVVDELVKVMGRHKPENIVIEMARENQTTQKGQKNSRERMKRIEEGIKELGSQILKEHPVENTQLQNEKLYLYYLQNGRDMYVDQELDINRLSDYDVDHIVPQSFLKDDSIDNKVLTRSDKARGKSDNVPSEEVVKKMKNYWRQLLNAKLITQRKFDNLTKAERGGLSELDKAGFIKRQLVETRQITKHVAQILDSRMNTKYDENDKLIREVKVITLKSKLVSDFRKDFQFYKVREINNYHHAHDAYLNAVVGTALIKKYPKLESEFVYGDYKVYDVRKMIAKSEQEIGKATAKYFFYSNIMNFFKTEITLANGEIRKRPLIETNGETGEIVWDKGRDFATVRKVLSMPQVNIVKKTEVQTGGFSKESILPKRNSDKLIARKKDWDPKKYGGFDSPTVAYSVLVVAKVEKGKSKKLKSVKELLGITIMERSSFEKNPIDFLEAKGYKEVKKDLIIKLPKYSLFELENGRKRMLASAGELQKGNELALPSKYVNFLYLASHYEKLKGSPEDNEQKQLFVEQHKHYLDEIIEQISEFSKRVILADANLDKVLSAYNKHRDKPIREQAENIIHLFTLTNLGAPAAFKYFDTTIDRKRYTSTKEVLDATLIHQSITGLYETRIDLSQLGGDGGGSSGGSGGGGGLDDEYRLYSPLVKPDQNIQFWLEQFPQAWAETAGMGLAKQVPPQVIQLKASATPVSVRQYPLSKEAQEGIRPHVQRLIQQGILVPVQSPWNTPLLPVRKPGTNDYRPVQDLREVNKRVQDIHPTVPNPYNLLCALPPQRSWYTVLDLKDAFFCLRLHPTSQPLFAFEWRDPGTGRTGQLTWTRLPQGFKNSPTIFNEALHRDLANFRIQHPQVTLLQYVDDLLLAGATKQDCLEGTKALLLELSDLGYRASAKKAQICRREVTYLGYSLRDGQRWLTEARKKTVVQIPAPTTAKQVREFLGKAGFCRLFIPGFATLAAPLYPLTKPKGEFSWAPEHQKAFDAIKKALLSAPALALPDVTKPFTLYVDERKGVARGVLTQTLGPWRRPVAYLSKKLDPVASGWPVCLKAIAAVAILVKDADKLTLGQNITVIAPHALENIVRQPPDRWMTNARMTHYQSLLLTERVTFAPPAALNPATLLPEETDEPVTHDCHQLLIEETGVRKDLTDIPLTGEVLTWFTDGSSYVVEGKRMAGAAVVDGTRTIWASSLPEGTSAQKAELMALTQALRLAEGKSINIYTDSRYAFATAHVHGAIYKQRGWLTSAGREIKNKEEILSLLEALHLPKRLAIIHCPGHQKAKDPISRGNQMADRVAKQAAQGVNLLPAGKRTADGSEFEKRTADGSEFESPKKKAKVE

SEQ ID NO: 86 - protein, 2088 aa, synthetic construct
MPAAKRVKLDGGDKKYSIGLDIGTNSVGWAVITDEYKVPSKKFKVLGNTDRHSIKKNLIGALLFDSGETAEATRLKRTARRRYTRRKNRICYLQEIFSNEMAKVDDSFFHRLEESFLVEEDKKHERHPIFGNIVDEVAYHEKYPTIYHLRKKLVDSTDKADLRLIYLALAHMIKFRGHFLIEGDLNPDNSDVDKLFIQLVQTYNQLFEENPINASGVDAKAILSARLSKSRRLENLIAQLPGEKKNGLFGNLIALSLGLTPNFKSNFDLAEDAKLQLSKDTYDDDLDNLLAQIGDQYADLFLAAKNLSDAILLSDILRVNTEITKAPLSASMIKRYDEHHQDLTLLKALVRQQLPEKYKEIFFDQSKNGYAGYIDGGASQEEFYKFIKPILEKMDGTEELLVKLNREDLLRKQRTFDNGSIPHQIHLGELHAILRRQEDFYPFLKDNREKIEKILTFRIPYYVGPLARGNSRFAWMTRKSEETITPWNFEEVVDKGASAQSFIERMTNFDKNLPNEKVLPKHSLLYEYFTVYNELTKVKYVTEGMRKPAFLSGEQKKAIVDLLFKTNRKVTVKQLKEDYFKKIECFDSVEISGVEDRFNASLGTYHDLLKIIKDKDFLDNEENEDILEDIVLTLTLFEDREMIEERLKTYAHLFDDKVMKQLKRRRYTGWGRLSRKLINGIRDKQSGKTILDFLKSDGFANRNFMQLIHDDSLTFKEDIQKAQVSGQGDSLHEHIANLAGSPAIKKGILQTVKVVDELVKVMGRHKPENIVIEMARENQTTQKGQKNSRERMKRIEEGIKELGSQILKEHPVENTQLQNEKLYLYYLQNGRDMYVDQELDINRLSDYDVDHIVPQSFLKDDSIDNKVLTRSDKARGKSDNVPSEEVVKKMKNYWRQLLNAKLITQRKFDNLTKAERGGLSELDKAGFIKRQLVETRQITKHVAQILDSRMNTKYDENDKLIREVKVITLKSKLVSDFRKDFQFYKVREINNYHHAHDAYLNAVVGTALIKKYPKLESEFVYGDYKVYDVRKMIAKSEQEIGKATAKYFFYSNIMNFFKTEITLANGEIRKRPLIETNGETGEIVWDKGRDFATVRKVLSMPQVNIVKKTEVQTGGFSKESILPKRNSDKLIARKKDWDPKKYGGFDSPTVAYSVLVVAKVEKGKSKKLKSVKELLGITIMERSSFEKNPIDFLEAKGYKEVKKDLIIKLPKYSLFELENGRKRMLASAGELQKGNELALPSKYVNFLYLASHYEKLKGSPEDNEQKQLFVEQHKHYLDEIIEQISEFSKRVILADANLDKVLSAYNKHRDKPIREQAENIIHLFTLTNLGAPAAFKYFDTTIDRKRYTSTKEVLDATLIHQSITGLYETRIDLSQLGGDGGGSSPAPEAAAKGGLDDEYRLYSPLVKPDQNIQFWLEQFPQAWAETAGMGLAKQVPPQVIQLKASATPVSVRQYPLSKEAQEGIRPHVQRLIQQGILVPVQSPWNTPLLPVRKPGTNDYRPVQDLREVNKRVQDIHPTVPNPYNLLCALPPQRSWYTVLDLKDAFFCLRLHPTSQPLFAFEWRDPGTGRTGQLTWTRLPQGFKNSPTIFNEALHRDLANFRIQHPQVTLLQYVDDLLLAGATKQDCLEGTKALLLELSDLGYRASAKKAQICRREVTYLGYSLRDGQRWLTEARKKTVVQIPAPTTAKQVREFLGKAGFCRLFIPGFATLAAPLYPLTKPKGEFSWAPEHQKAFDAIKKALLSAPALALPDVTKPFTLYVDERKGVARGVLTQTLGPWRRPVAYLSKKLDPVASGWPVCLKAIAAVAILVKDADKLTLGQNITVIAPHALENIVRQPPDRWMTNARMTHYQSLLLTERVTFAPPAALNPATLLPEETDEPVTHDCHQLLIEETGVRKDLTDIPLTGEVLTWFTDGSSYVVEGKRMAGAAVVDGTRTIWASSLPEGTSAQKAELMALTQALRLAEGKSINIYTDSRYAFATAHVHGAIYKQRGWLTSAGREIKNKEEILSLLEALHLPKRLAIIHCPGHQKAKDPISRGNQMADRVAKQAAQGVNLLPAGKRTADGSEFEKRTADGSEFESPKKKAKVE

SEQ ID NO: 87 - protein, 2083 aa, synthetic construct
MPAAKRVKLDGGDKKYSIGLDIGTNSVGWAVITDEYKVPSKKFKVLGNTDRHSIKKNLIGALLFDSGETAEATRLKRTARRRYTRRKNRICYLQEIFSNEMAKVDDSFFHRLEESFLVEEDKKHERHPIFGNIVDEVAYHEKYPTIYHLRKKLVDSTDKADLRLIYLALAHMIKFRGHFLIEGDLNPDNSDVDKLFIQLVQTYNQLFEENPINASGVDAKAILSARLSKSRRLENLIAQLPGEKKNGLFGNLIALSLGLTPNFKSNFDLAEDAKLQLSKDTYDDDLDNLLAQIGDQYADLFLAAKNLSDAILLSDILRVNTEITKAPLSASMIKRYDEHHQDLTLLKALVRQQLPEKYKEIFFDQSKNGYAGYIDGGASQEEFYKFIKPILEKMDGTEELLVKLNREDLLRKQRTFDNGSIPHQIHLGELHAILRRQEDFYPFLKDNREKIEKILTFRIPYYVGPLARGNSRFAWMTRKSEETITPWNFEEVVDKGASAQSFIERMTNFDKNLPNEKVLPKHSLLYEYFTVYNELTKVKYVTEGMRKPAFLSGEQKKAIVDLLFKTNRKVTVKQLKEDYFKKIECFDSVEISGVEDRFNASLGTYHDLLKIIKDKDFLDNEENEDILEDIVLTLTLFEDREMIEERLKTYAHLFDDKVMKQLKRRRYTGWGRLSRKLINGIRDKQSGKTILDFLKSDGFANRNFMQLIHDDSLTFKEDIQKAQVSGQGDSLHEHIANLAGSPAIKKGILQTVKVVDELVKVMGRHKPENIVIEMARENQTTQKGQKNSRERMKRIEEGIKELGSQILKEHPVENTQLQNEKLYLYYLQNGRDMYVDQELDINRLSDYDVDHIVPQSFLKDDSIDNKVLTRSDKARGKSDNVPSEEVVKKMKNYWRQLLNAKLITQRKFDNLTKAERGGLSELDKAGFIKRQLVETRQITKHVAQILDSRMNTKYDENDKLIREVKVITLKSKLVSDFRKDFQFYKVREINNYHHAHDAYLNAVVGTALIKKYPKLESEFVYGDYKVYDVRKMIAKSEQEIGKATAKYFFYSNIMNFFKTEITLANGEIRKRPLIETNGETGEIVWDKGRDFATVRKVLSMPQVNIVKKTEVQTGGFSKESILPKRNSDKLIARKKDWDPKKYGGFDSPTVAYSVLVVAKVEKGKSKKLKSVKELLGITIMERSSFEKNPIDFLEAKGYKEVKKDLIIKLPKYSLFELENGRKRMLASAGELQKGNELALPSKYVNFLYLASHYEKLKGSPEDNEQKQLFVEQHKHYLDEIIEQISEFSKRVILADANLDKVLSAYNKHRDKPIREQAENIIHLFTLTNLGAPAAFKYFDTTIDRKRYTSTKEVLDATLIHQSITGLYETRIDLSQLGGDGGGGGGGSGGLDDEYRLYSPLVKPDQNIQFWLEQFPQAWAETAGMGLAKQVPPQVIQLKASATPVSVRQYPLSKEAQEGIRPHVQRLIQQGILVPVQSPWNTPLLPVRKPGTNDYRPVQDLREVNKRVQDIHPTVPNPYNLLCALPPQRSWYTVLDLKDAFFCLRLHPTSQPLFAFEWRDPGTGRTGQLTWTRLPQGFKNSPTIFNEALHRDLANFRIQHPQVTLLQYVDDLLLAGATKQDCLEGTKALLLELSDLGYRASAKKAQICRREVTYLGYSLRDGQRWLTEARKKTVVQIPAPTTAKQVREFLGKAGFCRLFIPGFATLAAPLYPLTKPKGEFSWAPEHQKAFDAIKKALLSAPALALPDVTKPFTLYVDERKGVARGVLTQTLGPWRRPVAYLSKKLDPVASGWPVCLKAIAAVAILVKDADKLTLGQNITVIAPHALENIVRQPPDRWMTNARMTHYQSLLLTERVTFAPPAALNPATLLPEETDEPVTHDCHQLLIEETGVRKDLTDIPLTGEVLTWFTDGSSYVVEGKRMAGAAVVDGTRTIWASSLPEGTSAQKAELMALTQALRLAEGKSINIYTDSRYAFATAHVHGAIYKQRGWLTSAGREIKNKEEILSLLEALHLPKRLAIIHCPGHQKAKDPISRGNQMADRVAKQAAQGVNLLPAGKRTADGSEFEKRTADGSEFESPKKKAKVE

SEQ ID NO: 88 - protein, 2083 aa, synthetic construct
MPAAKRVKLDGGDKKYSIGLDIGTNSVGWAVITDEYKVPSKKFKVLGNTDRHSIKKNLIGALLFDSGETAEATRLKRTARRRYTRRKNRICYLQEIFSNEMAKVDDSFFHRLEESFLVEEDKKHERHPIFGNIVDEVAYHEKYPTIYHLRKKLVDSTDKADLRLIYLALAHMIKFRGHFLIEGDLNPDNSDVDKLFIQLVQTYNQLFEENPINASGVDAKAILSARLSKSRRLENLIAQLPGEKKNGLFGNLIALSLGLTPNFKSNFDLAEDAKLQLSKDTYDDDLDNLLAQIGDQYADLFLAAKNLSDAILLSDILRVNTEITKAPLSASMIKRYDEHHQDLTLLKALVRQQLPEKYKEIFFDQSKNGYAGYIDGGASQEEFYKFIKPILEKMDGTEELLVKLNREDLLRKQRTFDNGSIPHQIHLGELHAILRRQEDFYPFLKDNREKIEKILTFRIPYYVGPLARGNSRFAWMTRKSEETITPWNFEEVVDKGASAQSFIERMTNFDKNLPNEKVLPKHSLLYEYFTVYNELTKVKYVTEGMRKPAFLSGEQKKAIVDLLFKTNRKVTVKQLKEDYFKKIECFDSVEISGVEDRFNASLGTYHDLLKIIKDKDFLDNEENEDILEDIVLTLTLFEDREMIEERLKTYAHLFDDKVMKQLKRRRYTGWGRLSRKLINGIRDKQSGKTILDFLKSDGFANRNFMQLIHDDSLTFKEDIQKAQVSGQGDSLHEHIANLAGSPAIKKGILQTVKVVDELVKVMGRHKPENIVIEMARENQTTQKGQKNSRERMKRIEEGIKELGSQILKEHPVENTQLQNEKLYLYYLQNGRDMYVDQELDINRLSDYDVDHIVPQSFLKDDSIDNKVLTRSDKARGKSDNVPSEEVVKKMKNYWRQLLNAKLITQRKFDNLTKAERGGLSELDKAGFIKRQLVETRQITKHVAQILDSRMNTKYDENDKLIREVKVITLKSKLVSDFRKDFQFYKVREINNYHHAHDAYLNAVVGTALIKKYPKLESEFVYGDYKVYDVRKMIAKSEQEIGKATAKYFFYSNIMNFFKTEITLANGEIRKRPLIETNGETGEIVWDKGRDFATVRKVLSMPQVNIVKKTEVQTGGFSKESILPKRNSDKLIARKKDWDPKKYGGFDSPTVAYSVLVVAKVEKGKSKKLKSVKELLGITIMERSSFEKNPIDFLEAKGYKEVKKDLIIKLPKYSLFELENGRKRMLASAGELQKGNELALPSKYVNFLYLASHYEKLKGSPEDNEQKQLFVEQHKHYLDEIIEQISEFSKRVILADANLDKVLSAYNKHRDKPIREQAENIIHLFTLTNLGAPAAFKYFDTTIDRKRYTSTKEVLDATLIHQSITGLYETRIDLSQLGGDGGGSSGGSGGLDDEYRLYSPLVKPDQNIQFWLEQFPQAWAETAGMGLAKQVPPQVIQLKASATPVSVRQYPLSKEAQEGIRPHVQRLIQQGILVPVQSPWNTPLLPVRKPGTNDYRPVQDLREVNKRVQDIHPTVPNPYNLLCALPPQRSWYTVLDLKDAFFCLRLHPTSQPLFAFEWRDPGTGRTGQLTWTRLPQGFKNSPTIFNEALHRDLANFRIQHPQVTLLQYVDDLLLAGATKQDCLEGTKALLLELSDLGYRASAKKAQICRREVTYLGYSLRDGQRWLTEARKKTVVQIPAPTTAKQVREFLGKAGFCRLFIPGFATLAAPLYPLTKPKGEFSWAPEHQKAFDAIKKALLSAPALALPDVTKPFTLYVDERKGVARGVLTQTLGPWRRPVAYLSKKLDPVASGWPVCLKAIAAVAILVKDADKLTLGQNITVIAPHALENIVRQPPDRWMTNARMTHYQSLLLTERVTFAPPAALNPATLLPEETDEPVTHDCHQLLIEETGVRKDLTDIPLTGEVLTWFTDGSSYVVEGKRMAGAAVVDGTRTIWASSLPEGTSAQKAELMALTQALRLAEGKSINIYTDSRYAFATAHVHGAIYKQRGWLTSAGREIKNKEEILSLLEALHLPKRLAIIHCPGHQKAKDPISRGNQMADRVAKQAAQGVNLLPAGKRTADGSEFEKRTADGSEFESPKKKAKVE

SEQ ID NO: 89 - protein, 2086 aa, synthetic construct
MPAAKRVKLDGGDKKYSIGLDIGTNSVGWAVITDEYKVPSKKFKVLGNTDRHSIKKNLIGALLFDSGETAEATRLKRTARRRYTRRKNRICYLQEIFSNEMAKVDDSFFHRLEESFLVEEDKKHERHPIFGNIVDEVAYHEKYPTIYHLRKKLVDSTDKADLRLIYLALAHMIKFRGHFLIEGDLNPDNSDVDKLFIQLVQTYNQLFEENPINASGVDAKAILSARLSKSRRLENLIAQLPGEKKNGLFGNLIALSLGLTPNFKSNFDLAEDAKLQLSKDTYDDDLDNLLAQIGDQYADLFLAAKNLSDAILLSDILRVNTEITKAPLSASMIKRYDEHHQDLTLLKALVRQQLPEKYKEIFFDQSKNGYAGYIDGGASQEEFYKFIKPILEKMDGTEELLVKLNREDLLRKQRTFDNGSIPHQIHLGELHAILRRQEDFYPFLKDNREKIEKILTFRIPYYVGPLARGNSRFAWMTRKSEETITPWNFEEVVDKGASAQSFIERMTNFDKNLPNEKVLPKHSLLYEYFTVYNELTKVKYVTEGMRKPAFLSGEQKKAIVDLLFKTNRKVTVKQLKEDYFKKIECFDSVEISGVEDRFNASLGTYHDLLKIIKDKDFLDNEENEDILEDIVLTLTLFEDREMIEERLKTYAHLFDDKVMKQLKRRRYTGWGRLSRKLINGIRDKQSGKTILDFLKSDGFANRNFMQLIHDDSLTFKEDIQKAQVSGQGDSLHEHIANLAGSPAIKKGILQTVKVVDELVKVMGRHKPENIVIEMARENQTTQKGQKNSRERMKRIEEGIKELGSQILKEHPVENTQLQNEKLYLYYLQNGRDMYVDQELDINRLSDYDVDHIVPQSFLKDDSIDNKVLTRSDKARGKSDNVPSEEVVKKMKNYWRQLLNAKLITQRKFDNLTKAERGGLSELDKAGFIKRQLVETRQITKHVAQILDSRMNTKYDENDKLIREVKVITLKSKLVSDFRKDFQFYKVREINNYHHAHDAYLNAVVGTALIKKYPKLESEFVYGDYKVYDVRKMIAKSEQEIGKATAKYFFYSNIMNFFKTEITLANGEIRKRPLIETNGETGEIVWDKGRDFATVRKVLSMPQVNIVKKTEVQTGGFSKESILPKRNSDKLIARKKDWDPKKYGGFDSPTVAYSVLVVAKVEKGKSKKLKSVKELLGITIMERSSFEKNPIDFLEAKGYKEVKKDLIIKLPKYSLFELENGRKRMLASAGELQKGNELALPSKYVNFLYLASHYEKLKGSPEDNEQKQLFVEQHKHYLDEIIEQISEFSKRVILADANLDKVLSAYNKHRDKPIREQAENIIHLFTLTNLGAPAAFKYFDTTIDRKRYTSTKEVLDATLIHQSITGLYETRIDLSQLGGDGGPAPGSSGGGGGLDDEYRLYSPLVKPDQNIQFWLEQFPQAWAETAGMGLAKQVPPQVIQLKASATPVSVRQYPLSKEAQEGIRPHVQRLIQQGILVPVQSPWNTPLLPVRKPGTNDYRPVQDLREVNKRVQDIHPTVPNPYNLLCALPPQRSWYTVLDLKDAFFCLRLHPTSQPLFAFEWRDPGTGRTGQLTWTRLPQGFKNSPTIFNEALHRDLANFRIQHPQVTLLQYVDDLLLAGATKQDCLEGTKALLLELSDLGYRASAKKAQICRREVTYLGYSLRDGQRWLTEARKKTVVQIPAPTTAKQVREFLGKAGFCRLFIPGFATLAAPLYPLTKPKGEFSWAPEHQKAFDAIKKALLSAPALALPDVTKPFTLYVDERKGVARGVLTQTLGPWRRPVAYLSKKLDPVASGWPVCLKAIAAVAILVKDADKLTLGQNITVIAPHALENIVRQPPDRWMTNARMTHYQSLLLTERVTFAPPAALNPATLLPEETDEPVTHDCHQLLIEETGVRKDLTDIPLTGEVLTWFTDGSSYVVEGKRMAGAAVVDGTRTIWASSLPEGTSAQKAELMALTQALRLAEGKSINIYTDSRYAFATAHVHGAIYKQRGWLTSAGREIKNKEEILSLLEALHLPKRLAIIHCPGHQKAKDPISRGNQMADRVAKQAAQGVNLLPAGKRTADGSEFEKRTADGSEFESPKKKAKVE

SEQ ID NO: 90 - protein, 2093 aa, synthetic construct
MPAAKRVKLDGGDKKYSIGLDIGTNSVGWAVITDEYKVPSKKFKVLGNTDRHSIKKNLIGALLFDSGETAEATRLKRTARRRYTRRKNRICYLQEIFSNEMAKVDDSFFHRLEESFLVEEDKKHERHPIFGNIVDEVAYHEKYPTIYHLRKKLVDSTDKADLRLIYLALAHMIKFRGHFLIEGDLNPDNSDVDKLFIQLVQTYNQLFEENPINASGVDAKAILSARLSKSRRLENLIAQLPGEKKNGLFGNLIALSLGLTPNFKSNFDLAEDAKLQLSKDTYDDDLDNLLAQIGDQYADLFLAAKNLSDAILLSDILRVNTEITKAPLSASMIKRYDEHHQDLTLLKALVRQQLPEKYKEIFFDQSKNGYAGYIDGGASQEEFYKFIKPILEKMDGTEELLVKLNREDLLRKQRTFDNGSIPHQIHLGELHAILRRQEDFYPFLKDNREKIEKILTFRIPYYVGPLARGNSRFAWMTRKSEETITPWNFEEVVDKGASAQSFIERMTNFDKNLPNEKVLPKHSLLYEYFTVYNELTKVKYVTEGMRKPAFLSGEQKKAIVDLLFKTNRKVTVKQLKEDYFKKIECFDSVEISGVEDRFNASLGTYHDLLKIIKDKDFLDNEENEDILEDIVLTLTLFEDREMIEERLKTYAHLFDDKVMKQLKRRRYTGWGRLSRKLINGIRDKQSGKTILDFLKSDGFANRNFMQLIHDDSLTFKEDIQKAQVSGQGDSLHEHIANLAGSPAIKKGILQTVKVVDELVKVMGRHKPENIVIEMARENQTTQKGQKNSRERMKRIEEGIKELGSQILKEHPVENTQLQNEKLYLYYLQNGRDMYVDQELDINRLSDYDVDHIVPQSFLKDDSIDNKVLTRSDKARGKSDNVPSEEVVKKMKNYWRQLLNAKLITQRKFDNLTKAERGGLSELDKAGFIKRQLVETRQITKHVAQILDSRMNTKYDENDKLIREVKVITLKSKLVSDFRKDFQFYKVREINNYHHAHDAYLNAVVGTALIKKYPKLESEFVYGDYKVYDVRKMIAKSEQEIGKATAKYFFYSNIMNFFKTEITLANGEIRKRPLIETNGETGEIVWDKGRDFATVRKVLSMPQVNIVKKTEVQTGGFSKESILPKRNSDKLIARKKDWDPKKYGGFDSPTVAYSVLVVAKVEKGKSKKLKSVKELLGITIMERSSFEKNPIDFLEAKGYKEVKKDLIIKLPKYSLFELENGRKRMLASAGELQKGNELALPSKYVNFLYLASHYEKLKGSPEDNEQKQLFVEQHKHYLDEIIEQISEFSKRVILADANLDKVLSAYNKHRDKPIREQAENIIHLFTLTNLGAPAAFKYFDTTIDRKRYTSTKEVLDATLIHQSITGLYETRIDLSQLGGDGGSGSETPGTSESATPESGGLDDEYRLYSPLVKPDQNIQFWLEQFPQAWAETAGMGLAKQVPPQVIQLKASATPVSVRQYPLSKEAQEGIRPHVQRLIQQGILVPVQSPWNTPLLPVRKPGTNDYRPVQDLREVNKRVQDIHPTVPNPYNLLCALPPQRSWYTVLDLKDAFFCLRLHPTSQPLFAFEWRDPGTGRTGQLTWTRLPQGFKNSPTIFNEALHRDLANFRIQHPQVTLLQYVDDLLLAGATKQDCLEGTKALLLELSDLGYRASAKKAQICRREVTYLGYSLRDGQRWLTEARKKTVVQIPAPTTAKQVREFLGKAGFCRLFIPGFATLAAPLYPLTKPKGEFSWAPEHQKAFDAIKKALLSAPALALPDVTKPFTLYVDERKGVARGVLTQTLGPWRRPVAYLSKKLDPVASGWPVCLKAIAAVAILVKDADKLTLGQNITVIAPHALENIVRQPPDRWMTNARMTHYQSLLLTERVTFAPPAALNPATLLPEETDEPVTHDCHQLLIEETGVRKDLTDIPLTGEVLTWFTDGSSYVVEGKRMAGAAVVDGTRTIWASSLPEGTSAQKAELMALTQALRLAEGKSINIYTDSRYAFATAHVHGAIYKQRGWLTSAGREIKNKEEILSLLEALHLPKRLAIIHCPGHQKAKDPISRGNQMADRVAKQAAQGVNLLPAGKRTADGSEFEKRTADGSEFESPKKKAKVE

SEQ ID NO: 91 - protein, 2086 aa, synthetic construct
MPAAKRVKLDGGDKKYSIGLDIGTNSVGWAVITDEYKVPSKKFKVLGNTDRHSIKKNLIGALLFDSGETAEATRLKRTARRRYTRRKNRICYLQEIFSNEMAKVDDSFFHRLEESFLVEEDKKHERHPIFGNIVDEVAYHEKYPTIYHLRKKLVDSTDKADLRLIYLALAHMIKFRGHFLIEGDLNPDNSDVDKLFIQLVQTYNQLFEENPINASGVDAKAILSARLSKSRRLENLIAQLPGEKKNGLFGNLIALSLGLTPNFKSNFDLAEDAKLQLSKDTYDDDLDNLLAQIGDQYADLFLAAKNLSDAILLSDILRVNTEITKAPLSASMIKRYDEHHQDLTLLKALVRQQLPEKYKEIFFDQSKNGYAGYIDGGASQEEFYKFIKPILEKMDGTEELLVKLNREDLLRKQRTFDNGSIPHQIHLGELHAILRRQEDFYPFLKDNREKIEKILTFRIPYYVGPLARGNSRFAWMTRKSEETITPWNFEEVVDKGASAQSFIERMTNFDKNLPNEKVLPKHSLLYEYFTVYNELTKVKYVTEGMRKPAFLSGEQKKAIVDLLFKTNRKVTVKQLKEDYFKKIECFDSVEISGVEDRFNASLGTYHDLLKIIKDKDFLDNEENEDILEDIVLTLTLFEDREMIEERLKTYAHLFDDKVMKQLKRRRYTGWGRLSRKLINGIRDKQSGKTILDFLKSDGFANRNFMQLIHDDSLTFKEDIQKAQVSGQGDSLHEHIANLAGSPAIKKGILQTVKVVDELVKVMGRHKPENIVIEMARENQTTQKGQKNSRERMKRIEEGIKELGSQILKEHPVENTQLQNEKLYLYYLQNGRDMYVDQELDINRLSDYDVDHIVPQSFLKDDSIDNKVLTRSDKARGKSDNVPSEEVVKKMKNYWRQLLNAKLITQRKFDNLTKAERGGLSELDKAGFIKRQLVETRQITKHVAQILDSRMNTKYDENDKLIREVKVITLKSKLVSDFRKDFQFYKVREINNYHHAHDAYLNAVVGTALIKKYPKLESEFVYGDYKVYDVRKMIAKSEQEIGKATAKYFFYSNIMNFFKTEITLANGEIRKRPLIETNGETGEIVWDKGRDFATVRKVLSMPQVNIVKKTEVQTGGFSKESILPKRNSDKLIARKKDWDPKKYGGFDSPTVAYSVLVVAKVEKGKSKKLKSVKELLGITIMERSSFEKNPIDFLEAKGYKEVKKDLIIKLPKYSLFELENGRKRMLASAGELQKGNELALPSKYVNFLYLASHYEKLKGSPEDNEQKQLFVEQHKHYLDEIIEQISEFSKRVILADANLDKVLSAYNKHRDKPIREQAENIIHLFTLTNLGAPAAFKYFDTTIDRKRYTSTKEVLDATLIHQSITGLYETRIDLSQLGGDGGGSSGGGPAPGGLDDEYRLYSPLVKPDQNIQFWLEQFPQAWAETAGMGLAKQVPPQVIQLKASATPVSVRQYPLSKEAQEGIRPHVQRLIQQGILVPVQSPWNTPLLPVRKPGTNDYRPVQDLREVNKRVQDIHPTVPNPYNLLCALPPQRSWYTVLDLKDAFFCLRLHPTSQPLFAFEWRDPGTGRTGQLTWTRLPQGFKNSPTIFNEALHRDLANFRIQHPQVTLLQYVDDLLLAGATKQDCLEGTKALLLELSDLGYRASAKKAQICRREVTYLGYSLRDGQRWLTEARKKTVVQIPAPTTAKQVREFLGKAGFCRLFIPGFATLAAPLYPLTKPKGEFSWAPEHQKAFDAIKKALLSAPALALPDVTKPFTLYVDERKGVARGVLTQTLGPWRRPVAYLSKKLDPVASGWPVCLKAIAAVAILVKDADKLTLGQNITVIAPHALENIVRQPPDRWMTNARMTHYQSLLLTERVTFAPPAALNPATLLPEETDEPVTHDCHQLLIEETGVRKDLTDIPLTGEVLTWFTDGSSYVVEGKRMAGAAVVDGTRTIWASSLPEGTSAQKAELMALTQALRLAEGKSINIYTDSRYAFATAHVHGAIYKQRGWLTSAGREIKNKEEILSLLEALHLPKRLAIIHCPGHQKAKDPISRGNQMADRVAKQAAQGVNLLPAGKRTADGSEFEKRTADGSEFESPKKKAKVE

SEQ ID NO: 92 - protein, 2088 aa, synthetic construct
MPAAKRVKLDGGDKKYSIGLDIGTNSVGWAVITDEYKVPSKKFKVLGNTDRHSIKKNLIGALLFDSGETAEATRLKRTARRRYTRRKNRICYLQEIFSNEMAKVDDSFFHRLEESFLVEEDKKHERHPIFGNIVDEVAYHEKYPTIYHLRKKLVDSTDKADLRLIYLALAHMIKFRGHFLIEGDLNPDNSDVDKLFIQLVQTYNQLFEENPINASGVDAKAILSARLSKSRRLENLIAQLPGEKKNGLFGNLIALSLGLTPNFKSNFDLAEDAKLQLSKDTYDDDLDNLLAQIGDQYADLFLAAKNLSDAILLSDILRVNTEITKAPLSASMIKRYDEHHQDLTLLKALVRQQLPEKYKEIFFDQSKNGYAGYIDGGASQEEFYKFIKPILEKMDGTEELLVKLNREDLLRKQRTFDNGSIPHQIHLGELHAILRRQEDFYPFLKDNREKIEKILTFRIPYYVGPLARGNSRFAWMTRKSEETITPWNFEEVVDKGASAQSFIERMTNFDKNLPNEKVLPKHSLLYEYFTVYNELTKVKYVTEGMRKPAFLSGEQKKAIVDLLFKTNRKVTVKQLKEDYFKKIECFDSVEISGVEDRFNASLGTYHDLLKIIKDKDFLDNEENEDILEDIVLTLTLFEDREMIEERLKTYAHLFDDKVMKQLKRRRYTGWGRLSRKLINGIRDKQSGKTILDFLKSDGFANRNFMQLIHDDSLTFKEDIQKAQVSGQGDSLHEHIANLAGSPAIKKGILQTVKVVDELVKVMGRHKPENIVIEMARENQTTQKGQKNSRERMKRIEEGIKELGSQILKEHPVENTQLQNEKLYLYYLQNGRDMYVDQELDINRLSDYDVDHIVPQSFLKDDSIDNKVLTRSDKARGKSDNVPSEEVVKKMKNYWRQLLNAKLITQRKFDNLTKAERGGLSELDKAGFIKRQLVETRQITKHVAQILDSRMNTKYDENDKLIREVKVITLKSKLVSDFRKDFQFYKVREINNYHHAHDAYLNAVVGTALIKKYPKLESEFVYGDYKVYDVRKMIAKSEQEIGKATAKYFFYSNIMNFFKTEITLANGEIRKRPLIETNGETGEIVWDKGRDFATVRKVLSMPQVNIVKKTEVQTGGFSKESILPKRNSDKLIARKKDWDPKKYGGFDSPTVAYSVLVVAKVEKGKSKKLKSVKELLGITIMERSSFEKNPIDFLEAKGYKEVKKDLIIKLPKYSLFELENGRKRMLASAGELQKGNELALPSKYVNFLYLASHYEKLKGSPEDNEQKQLFVEQHKHYLDEIIEQISEFSKRVILADANLDKVLSAYNKHRDKPIREQAENIIHLFTLTNLGAPAAFKYFDTTIDRKRYTSTKEVLDATLIHQSITGLYETRIDLSQLGGDGGGGSEAAAKGSSGGLDDEYRLYSPLVKPDQNIQFWLEQFPQAWAETAGMGLAKQVPPQVIQLKASATPVSVRQYPLSKEAQEGIRPHVQRLIQQGILVPVQSPWNTPLLPVRKPGTNDYRPVQDLREVNKRVQDIHPTVPNPYNLLCALPPQRSWYTVLDLKDAFFCLRLHPTSQPLFAFEWRDPGTGRTGQLTWTRLPQGFKNSPTIFNEALHRDLANFRIQHPQVTLLQYVDDLLLAGATKQDCLEGTKALLLELSDLGYRASAKKAQICRREVTYLGYSLRDGQRWLTEARKKTVVQIPAPTTAKQVREFLGKAGFCRLFIPGFATLAAPLYPLTKPKGEFSWAPEHQKAFDAIKKALLSAPALALPDVTKPFTLYVDERKGVARGVLTQTLGPWRRPVAYLSKKLDPVASGWPVCLKAIAAVAILVKDADKLTLGQNITVIAPHALENIVRQPPDRWMTNARMTHYQSLLLTERVTFAPPAALNPATLLPEETDEPVTHDCHQLLIEETGVRKDLTDIPLTGEVLTWFTDGSSYVVEGKRMAGAAVVDGTRTIWASSLPEGTSAQKAELMALTQALRLAEGKSINIYTDSRYAFATAHVHGAIYKQRGWLTSAGREIKNKEEILSLLEALHLPKRLAIIHCPGHQKAKDPISRGNQMADRVAKQAAQGVNLLPAGKRTADGSEFEKRTADGSEFESPKKKAKVE

SEQ ID NO: 93 - protein, 2088 aa, synthetic construct
MPAAKRVKLDGGDKKYSIGLDIGTNSVGWAVITDEYKVPSKKFKVLGNTDRHSIKKNLIGALLFDSGETAEATRLKRTARRRYTRRKNRICYLQEIFSNEMAKVDDSFFHRLEESFLVEEDKKHERHPIFGNIVDEVAYHEKYPTIYHLRKKLVDSTDKADLRLIYLALAHMIKFRGHFLIEGDLNPDNSDVDKLFIQLVQTYNQLFEENPINASGVDAKAILSARLSKSRRLENLIAQLPGEKKNGLFGNLIALSLGLTPNFKSNFDLAEDAKLQLSKDTYDDDLDNLLAQIGDQYADLFLAAKNLSDAILLSDILRVNTEITKAPLSASMIKRYDEHHQDLTLLKALVRQQLPEKYKEIFFDQSKNGYAGYIDGGASQEEFYKFIKPILEKMDGTEELLVKLNREDLLRKQRTFDNGSIPHQIHLGELHAILRRQEDFYPFLKDNREKIEKILTFRIPYYVGPLARGNSRFAWMTRKSEETITPWNFEEVVDKGASAQSFIERMTNFDKNLPNEKVLPKHSLLYEYFTVYNELTKVKYVTEGMRKPAFLSGEQKKAIVDLLFKTNRKVTVKQLKEDYFKKIECFDSVEISGVEDRFNASLGTYHDLLKIIKDKDFLDNEENEDILEDIVLTLTLFEDREMIEERLKTYAHLFDDKVMKQLKRRRYTGWGRLSRKLINGIRDKQSGKTILDFLKSDGFANRNFMQLIHDDSLTFKEDIQKAQVSGQGDSLHEHIANLAGSPAIKKGILQTVKVVDELVKVMGRHKPENIVIEMARENQTTQKGQKNSRERMKRIEEGIKELGSQILKEHPVENTQLQNEKLYLYYLQNGRDMYVDQELDINRLSDYDVDHIVPQSFLKDDSIDNKVLTRSDKARGKSDNVPSEEVVKKMKNYWRQLLNAKLITQRKFDNLTKAERGGLSELDKAGFIKRQLVETRQITKHVAQILDSRMNTKYDENDKLIREVKVITLKSKLVSDFRKDFQFYKVREINNYHHAHDAYLNAVVGTALIKKYPKLESEFVYGDYKVYDVRKMIAKSEQEIGKATAKYFFYSNIMNFFKTEITLANGEIRKRPLIETNGETGEIVWDKGRDFATVRKVLSMPQVNIVKKTEVQTGGFSKESILPKRNSDKLIARKKDWDPKKYGGFDSPTVAYSVLVVAKVEKGKSKKLKSVKELLGITIMERSSFEKNPIDFLEAKGYKEVKKDLIIKLPKYSLFELENGRKRMLASAGELQKGNELALPSKYVNFLYLASHYEKLKGSPEDNEQKQLFVEQHKHYLDEIIEQISEFSKRVILADANLDKVLSAYNKHRDKPIREQAENIIHLFTLTNLGAPAAFKYFDTTIDRKRYTSTKEVLDATLIHQSITGLYETRIDLSQLGGDGGPAPEAAAKGSSGGLDDEYRLYSPLVKPDQNIQFWLEQFPQAWAETAGMGLAKQVPPQVIQLKASATPVSVRQYPLSKEAQEGIRPHVQRLIQQGILVPVQSPWNTPLLPVRKPGTNDYRPVQDLREVNKRVQDIHPTVPNPYNLLCALPPQRSWYTVLDLKDAFFCLRLHPTSQPLFAFEWRDPGTGRTGQLTWTRLPQGFKNSPTIFNEALHRDLANFRIQHPQVTLLQYVDDLLLAGATKQDCLEGTKALLLELSDLGYRASAKKAQICRREVTYLGYSLRDGQRWLTEARKKTVVQIPAPTTAKQVREFLGKAGFCRLFIPGFATLAAPLYPLTKPKGEFSWAPEHQKAFDAIKKALLSAPALALPDVTKPFTLYVDERKGVARGVLTQTLGPWRRPVAYLSKKLDPVASGWPVCLKAIAAVAILVKDADKLTLGQNITVIAPHALENIVRQPPDRWMTNARMTHYQSLLLTERVTFAPPAALNPATLLPEETDEPVTHDCHQLLIEETGVRKDLTDIPLTGEVLTWFTDGSSYVVEGKRMAGAAVVDGTRTIWASSLPEGTSAQKAELMALTQALRLAEGKSINIYTDSRYAFATAHVHGAIYKQRGWLTSAGREIKNKEEILSLLEALHLPKRLAIIHCPGHQKAKDPISRGNQMADRVAKQAAQGVNLLPAGKRTADGSEFEKRTADGSEFESPKKKAKVE

SEQ ID NO: 94 - protein, 2088 aa, synthetic construct
MPAAKRVKLDGGDKKYSIGLDIGTNSVGWAVITDEYKVPSKKFKVLGNTDRHSIKKNLIGALLFDSGETAEATRLKRTARRRYTRRKNRICYLQEIFSNEMAKVDDSFFHRLEESFLVEEDKKHERHPIFGNIVDEVAYHEKYPTIYHLRKKLVDSTDKADLRLIYLALAHMIKFRGHFLIEGDLNPDNSDVDKLFIQLVQTYNQLFEENPINASGVDAKAILSARLSKSRRLENLIAQLPGEKKNGLFGNLIALSLGLTPNFKSNFDLAEDAKLQLSKDTYDDDLDNLLAQIGDQYADLFLAAKNLSDAILLSDILRVNTEITKAPLSASMIKRYDEHHQDLTLLKALVRQQLPEKYKEIFFDQSKNGYAGYIDGGASQEEFYKFIKPILEKMDGTEELLVKLNREDLLRKQRTFDNGSIPHQIHLGELHAILRRQEDFYPFLKDNREKIEKILTFRIPYYVGPLARGNSRFAWMTRKSEETITPWNFEEVVDKGASAQSFIERMTNFDKNLPNEKVLPKHSLLYEYFTVYNELTKVKYVTEGMRKPAFLSGEQKKAIVDLLFKTNRKVTVKQLKEDYFKKIECFDSVEISGVEDRFNASLGTYHDLLKIIKDKDFLDNEENEDILEDIVLTLTLFEDREMIEERLKTYAHLFDDKVMKQLKRRRYTGWGRLSRKLINGIRDKQSGKTILDFLKSDGFANRNFMQLIHDDSLTFKEDIQKAQVSGQGDSLHEHIANLAGSPAIKKGILQTVKVVDELVKVMGRHKPENIVIEMARENQTTQKGQKNSRERMKRIEEGIKELGSQILKEHPVENTQLQNEKLYLYYLQNGRDMYVDQELDINRLSDYDVDHIVPQSFLKDDSIDNKVLTRSDKARGKSDNVPSEEVVKKMKNYWRQLLNAKLITQRKFDNLTKAERGGLSELDKAGFIKRQLVETRQITKHVAQILDSRMNTKYDENDKLIREVKVITLKSKLVSDFRKDFQFYKVREINNYHHAHDAYLNAVVGTALIKKYPKLESEFVYGDYKVYDVRKMIAKSEQEIGKATAKYFFYSNIMNFFKTEITLANGEIRKRPLIETNGETGEIVWDKGRDFATVRKVLSMPQVNIVKKTEVQTGGFSKESILPKRNSDKLIARKKDWDPKKYGGFDSPTVAYSVLVVAKVEKGKSKKLKSVKELLGITIMERSSFEKNPIDFLEAKGYKEVKKDLIIKLPKYSLFELENGRKRMLASAGELQKGNELALPSKYVNFLYLASHYEKLKGSPEDNEQKQLFVEQHKHYLDEIIEQISEFSKRVILADANLDKVLSAYNKHRDKPIREQAENIIHLFTLTNLGAPAAFKYFDTTIDRKRYTSTKEVLDATLIHQSITGLYETRIDLSQLGGDGGGGSGGGEAAAKGGLDDEYRLYSPLVKPDQNIQFWLEQFPQAWAETAGMGLAKQVPPQVIQLKASATPVSVRQYPLSKEAQEGIRPHVQRLIQQGILVPVQSPWNTPLLPVRKPGTNDYRPVQDLREVNKRVQDIHPTVPNPYNLLCALPPQRSWYTVLDLKDAFFCLRLHPTSQPLFAFEWRDPGTGRTGQLTWTRLPQGFKNSPTIFNEALHRDLANFRIQHPQVTLLQYVDDLLLAGATKQDCLEGTKALLLELSDLGYRASAKKAQICRREVTYLGYSLRDGQRWLTEARKKTVVQIPAPTTAKQVREFLGKAGFCRLFIPGFATLAAPLYPLTKPKGEFSWAPEHQKAFDAIKKALLSAPALALPDVTKPFTLYVDERKGVARGVLTQTLGPWRRPVAYLSKKLDPVASGWPVCLKAIAAVAILVKDADKLTLGQNITVIAPHALENIVRQPPDRWMTNARMTHYQSLLLTERVTFAPPAALNPATLLPEETDEPVTHDCHQLLIEETGVRKDLTDIPLTGEVLTWFTDGSSYVVEGKRMAGAAVVDGTRTIWASSLPEGTSAQKAELMALTQALRLAEGKSINIYTDSRYAFATAHVHGAIYKQRGWLTSAGREIKNKEEILSLLEALHLPKRLAIIHCPGHQKAKDPISRGNQMADRVAKQAAQGVNLLPAGKRTADGSEFEKRTADGSEFESPKKKAKVE

SEQ ID NO: 95 - protein, 2086 aa, synthetic construct
MPAAKRVKLDGGDKKYSIGLDIGTNSVGWAVITDEYKVPSKKFKVLGNTDRHSIKKNLIGALLFDSGETAEATRLKRTARRRYTRRKNRICYLQEIFSNEMAKVDDSFFHRLEESFLVEEDKKHERHPIFGNIVDEVAYHEKYPTIYHLRKKLVDSTDKADLRLIYLALAHMIKFRGHFLIEGDLNPDNSDVDKLFIQLVQTYNQLFEENPINASGVDAKAILSARLSKSRRLENLIAQLPGEKKNGLFGNLIALSLGLTPNFKSNFDLAEDAKLQLSKDTYDDDLDNLLAQIGDQYADLFLAAKNLSDAILLSDILRVNTEITKAPLSASMIKRYDEHHQDLTLLKALVRQQLPEKYKEIFFDQSKNGYAGYIDGGASQEEFYKFIKPILEKMDGTEELLVKLNREDLLRKQRTFDNGSIPHQIHLGELHAILRRQEDFYPFLKDNREKIEKILTFRIPYYVGPLARGNSRFAWMTRKSEETITPWNFEEVVDKGASAQSFIERMTNFDKNLPNEKVLPKHSLLYEYFTVYNELTKVKYVTEGMRKPAFLSGEQKKAIVDLLFKTNRKVTVKQLKEDYFKKIECFDSVEISGVEDRFNASLGTYHDLLKIIKDKDFLDNEENEDILEDIVLTLTLFEDREMIEERLKTYAHLFDDKVMKQLKRRRYTGWGRLSRKLINGIRDKQSGKTILDFLKSDGFANRNFMQLIHDDSLTFKEDIQKAQVSGQGDSLHEHIANLAGSPAIKKGILQTVKVVDELVKVMGRHKPENIVIEMARENQTTQKGQKNSRERMKRIEEGIKELGSQILKEHPVENTQLQNEKLYLYYLQNGRDMYVDQELDINRLSDYDVDHIVPQSFLKDDSIDNKVLTRSDKARGKSDNVPSEEVVKKMKNYWRQLLNAKLITQRKFDNLTKAERGGLSELDKAGFIKRQLVETRQITKHVAQILDSRMNTKYDENDKLIREVKVITLKSKLVSDFRKDFQFYKVREINNYHHAHDAYLNAVVGTALIKKYPKLESEFVYGDYKVYDVRKMIAKSEQEIGKATAKYFFYSNIMNFFKTEITLANGEIRKRPLIETNGETGEIVWDKGRDFATVRKVLSMPQVNIVKKTEVQTGGFSKESILPKRNSDKLIARKKDWDPKKYGGFDSPTVAYSVLVVAKVEKGKSKKLKSVKELLGITIMERSSFEKNPIDFLEAKGYKEVKKDLIIKLPKYSLFELENGRKRMLASAGELQKGNELALPSKYVNFLYLASHYEKLKGSPEDNEQKQLFVEQHKHYLDEIIEQISEFSKRVILADANLDKVLSAYNKHRDKPIREQAENIIHLFTLTNLGAPAAFKYFDTTIDRKRYTSTKEVLDATLIHQSITGLYETRIDLSQLGGDGGGGGGSSGGSGGLDDEYRLYSPLVKPDQNIQFWLEQFPQAWAETAGMGLAKQVPPQVIQLKASATPVSVRQYPLSKEAQEGIRPHVQRLIQQGILVPVQSPWNTPLLPVRKPGTNDYRPVQDLREVNKRVQDIHPTVPNPYNLLCALPPQRSWYTVLDLKDAFFCLRLHPTSQPLFAFEWRDPGTGRTGQLTWTRLPQGFKNSPTIFNEALHRDLANFRIQHPQVTLLQYVDDLLLAGATKQDCLEGTKALLLELSDLGYRASAKKAQICRREVTYLGYSLRDGQRWLTEARKKTVVQIPAPTTAKQVREFLGKAGFCRLFIPGFATLAAPLYPLTKPKGEFSWAPEHQKAFDAIKKALLSAPALALPDVTKPFTLYVDERKGVARGVLTQTLGPWRRPVAYLSKKLDPVASGWPVCLKAIAAVAILVKDADKLTLGQNITVIAPHALENIVRQPPDRWMTNARMTHYQSLLLTERVTFAPPAALNPATLLPEETDEPVTHDCHQLLIEETGVRKDLTDIPLTGEVLTWFTDGSSYVVEGKRMAGAAVVDGTRTIWASSLPEGTSAQKAELMALTQALRLAEGKSINIYTDSRYAFATAHVHGAIYKQRGWLTSAGREIKNKEEILSLLEALHLPKRLAIIHCPGHQKAKDPISRGNQMADRVAKQAAQGVNLLPAGKRTADGSEFEKRTADGSEFESPKKKAKVE

SEQ ID NO: 96 - protein, 2104 aa, synthetic construct
MPAAKRVKLDGGDKKYSIGLDIGTNSVGWAVITDEYKVPSKKFKVLGNTDRHSIKKNLIGALLFDSGETAEATRLKRTARRRYTRRKNRICYLQEIFSNEMAKVDDSFFHRLEESFLVEEDKKHERHPIFGNIVDEVAYHEKYPTIYHLRKKLVDSTDKADLRLIYLALAHMIKFRGHFLIEGDLNPDNSDVDKLFIQLVQTYNQLFEENPINASGVDAKAILSARLSKSRRLENLIAQLPGEKKNGLFGNLIALSLGLTPNFKSNFDLAEDAKLQLSKDTYDDDLDNLLAQIGDQYADLFLAAKNLSDAILLSDILRVNTEITKAPLSASMIKRYDEHHQDLTLLKALVRQQLPEKYKEIFFDQSKNGYAGYIDGGASQEEFYKFIKPILEKMDGTEELLVKLNREDLLRKQRTFDNGSIPHQIHLGELHAILRRQEDFYPFLKDNREKIEKILTFRIPYYVGPLARGNSRFAWMTRKSEETITPWNFEEVVDKGASAQSFIERMTNFDKNLPNEKVLPKHSLLYEYFTVYNELTKVKYVTEGMRKPAFLSGEQKKAIVDLLFKTNRKVTVKQLKEDYFKKIECFDSVEISGVEDRFNASLGTYHDLLKIIKDKDFLDNEENEDILEDIVLTLTLFEDREMIEERLKTYAHLFDDKVMKQLKRRRYTGWGRLSRKLINGIRDKQSGKTILDFLKSDGFANRNFMQLIHDDSLTFKEDIQKAQVSGQGDSLHEHIANLAGSPAIKKGILQTVKVVDELVKVMGRHKPENIVIEMARENQTTQKGQKNSRERMKRIEEGIKELGSQILKEHPVENTQLQNEKLYLYYLQNGRDMYVDQELDINRLSDYDVDHIVPQSFLKDDSIDNKVLTRSDKARGKSDNVPSEEVVKKMKNYWRQLLNAKLITQRKFDNLTKAERGGLSELDKAGFIKRQLVETRQITKHVAQILDSRMNTKYDENDKLIREVKVITLKSKLVSDFRKDFQFYKVREINNYHHAHDAYLNAVVGTALIKKYPKLESEFVYGDYKVYDVRKMIAKSEQEIGKATAKYFFYSNIMNFFKTEITLANGEIRKRPLIETNGETGEIVWDKGRDFATVRKVLSMPQVNIVKKTEVQTGGFSKESILPKRNSDKLIARKKDWDPKKYGGFDSPTVAYSVLVVAKVEKGKSKKLKSVKELLGITIMERSSFEKNPIDFLEAKGYKEVKKDLIIKLPKYSLFELENGRKRMLASAGELQKGNELALPSKYVNFLYLASHYEKLKGSPEDNEQKQLFVEQHKHYLDEIIEQISEFSKRVILADANLDKVLSAYNKHRDKPIREQAENIIHLFTLTNLGAPAAFKYFDTTIDRKRYTSTKEVLDATLIHQSITGLYETRIDLSQLGGDGGEAAAKEAAAKEAAAKEAAAKEAAAKGGTLQLDDEYRLYSPLVKPDQNIQFWLEQFPQAWAETAGMGLAKQVPPQVIQLKASATPVSVRQYPLSKEAQEGIRPHVQRLIQQGILVPVQSPWNTPLLPVRKPGTNDYRPVQDLREVNKRVQDIHPTVPNPYNLLCALPPQRSWYTVLDLKDAFFCLRLHPTSQPLFAFEWRDPGTGRTGQLTWTRLPQGFKNSPTIFDEALHRDLANFRIQHPQVTLLQYVDDLLLAGATKQDCLEGTKALLLELSDLGYRASAKKAQICRREVTYLGYSLRDGQRWLTEARKKTVVQIPAPTTAKQVREFLGTAGFCRLWIPGFATLAAPLYPLTKEKGEFSWAPEHQKAFDAIKKALLSAPALALPDVTKPFTLYVDERKGVARGVLTQTLGPWRRPVAYLSKKLDPVASGWPVCLKAIAAVAILVKDADKLTLGQNITVIAPHALENIVRQPPDRWMTNARMTHYQSLLLTERVTFAPPAALNPATLLPEETDEPVTHDCHQLLIEETGVRKDLTDIPLTGEVLTWFTDGSSYVVEGKRMAGAAVVDGTRTIWASSLPEGTSAQKAELMALTQALRLAEGKSINIYTDSRYAFATAHVHGAIYKQRGLLTSAGREIKNKEEILSLLEALHLPKRLAIIHCPGHQKAKDPISRGNQMADRVAKQAAQGVNLLAGKRTADGSEFEKRTADGSEFESPKKKAKVE

SEQ ID NO: 97 - protein, 2094 aa, synthetic construct
MPAAKRVKLDGGDKKYSIGLDIGTNSVGWAVITDEYKVPSKKFKVLGNTDRHSIKKNLIGALLFDSGETAEATRLKRTARRRYTRRKNRICYLQEIFSNEMAKVDDSFFHRLEESFLVEEDKKHERHPIFGNIVDEVAYHEKYPTIYHLRKKLVDSTDKADLRLIYLALAHMIKFRGHFLIEGDLNPDNSDVDKLFIQLVQTYNQLFEENPINASGVDAKAILSARLSKSRRLENLIAQLPGEKKNGLFGNLIALSLGLTPNFKSNFDLAEDAKLQLSKDTYDDDLDNLLAQIGDQYADLFLAAKNLSDAILLSDILRVNTEITKAPLSASMIKRYDEHHQDLTLLKALVRQQLPEKYKEIFFDQSKNGYAGYIDGGASQEEFYKFIKPILEKMDGTEELLVKLNREDLLRKQRTFDNGSIPHQIHLGELHAILRRQEDFYPFLKDNREKIEKILTFRIPYYVGPLARGNSRFAWMTRKSEETITPWNFEEVVDKGASAQSFIERMTNFDKNLPNEKVLPKHSLLYEYFTVYNELTKVKYVTEGMRKPAFLSGEQKKAIVDLLFKTNRKVTVKQLKEDYFKKIECFDSVEISGVEDRFNASLGTYHDLLKIIKDKDFLDNEENEDILEDIVLTLTLFEDREMIEERLKTYAHLFDDKVMKQLKRRRYTGWGRLSRKLINGIRDKQSGKTILDFLKSDGFANRNFMQLIHDDSLTFKEDIQKAQVSGQGDSLHEHIANLAGSPAIKKGILQTVKVVDELVKVMGRHKPENIVIEMARENQTTQKGQKNSRERMKRIEEGIKELGSQILKEHPVENTQLQNEKLYLYYLQNGRDMYVDQELDINRLSDYDVDHIVPQSFLKDDSIDNKVLTRSDKARGKSDNVPSEEVVKKMKNYWRQLLNAKLITQRKFDNLTKAERGGLSELDKAGFIKRQLVETRQITKHVAQILDSRMNTKYDENDKLIREVKVITLKSKLVSDFRKDFQFYKVREINNYHHAHDAYLNAVVGTALIKKYPKLESEFVYGDYKVYDVRKMIAKSEQEIGKATAKYFFYSNIMNFFKTEITLANGEIRKRPLIETNGETGEIVWDKGRDFATVRKVLSMPQVNIVKKTEVQTGGFSKESILPKRNSDKLIARKKDWDPKKYGGFDSPTVAYSVLVVAKVEKGKSKKLKSVKELLGITIMERSSFEKNPIDFLEAKGYKEVKKDLIIKLPKYSLFELENGRKRMLASAGELQKGNELALPSKYVNFLYLASHYEKLKGSPEDNEQKQLFVEQHKHYLDEIIEQISEFSKRVILADANLDKVLSAYNKHRDKPIREQAENIIHLFTLTNLGAPAAFKYFDTTIDRKRYTSTKEVLDATLIHQSITGLYETRIDLSQLGGDGGEAAAKGGGGSEAAAKGGTLQLDDEYRLYSPLVKPDQNIQFWLEQFPQAWAETAGMGLAKQVPPQVIQLKASATPVSVRQYPLSKEAQEGIRPHVQRLIQQGILVPVQSPWNTPLLPVRKPGTNDYRPVQDLREVNKRVQDIHPTVPNPYNLLCALPPQRSWYTVLDLKDAFFCLRLHPTSQPLFAFEWRDPGTGRTGQLTWTRLPQGFKNSPTIFDEALHRDLANFRIQHPQVTLLQYVDDLLLAGATKQDCLEGTKALLLELSDLGYRASAKKAQICRREVTYLGYSLRDGQRWLTEARKKTVVQIPAPTTAKQVREFLGTAGFCRLWIPGFATLAAPLYPLTKEKGEFSWAPEHQKAFDAIKKALLSAPALALPDVTKPFTLYVDERKGVARGVLTQTLGPWRRPVAYLSKKLDPVASGWPVCLKAIAAVAILVKDADKLTLGQNITVIAPHALENIVRQPPDRWMTNARMTHYQSLLLTERVTFAPPAALNPATLLPEETDEPVTHDCHQLLIEETGVRKDLTDIPLTGEVLTWFTDGSSYVVEGKRMAGAAVVDGTRTIWASSLPEGTSAQKAELMALTQALRLAEGKSINIYTDSRYAFATAHVHGAIYKQRGLLTSAGREIKNKEEILSLLEALHLPKRLAIIHCPGHQKAKDPISRGNQMADRVAKQAAQGVNLLAGKRTADGSEFEKRTADGSEFESPKKKAKVE

SEQ ID NO: 98 - protein, 2125 aa, synthetic construct
MPAAKRVKLDGGDKKYSIGLDIGTNSVGWAVITDEYKVPSKKFKVLGNTDRHSIKKNLIGALLFDSGETAEATRLKRTARRRYTRRKNRICYLQEIFSNEMAKVDDSFFHRLEESFLVEEDKKHERHPIFGNIVDEVAYHEKYPTIYHLRKKLVDSTDKADLRLIYLALAHMIKFRGHFLIEGDLNPDNSDVDKLFIQLVQTYNQLFEENPINASGVDAKAILSARLSKSRRLENLIAQLPGEKKNGLFGNLIALSLGLTPNFKSNFDLAEDAKLQLSKDTYDDDLDNLLAQIGDQYADLFLAAKNLSDAILLSDILRVNTEITKAPLSASMIKRYDEHHQDLTLLKALVRQQLPEKYKEIFFDQSKNGYAGYIDGGASQEEFYKFIKPILEKMDGTEELLVKLNREDLLRKQRTFDNGSIPHQIHLGELHAILRRQEDFYPFLKDNREKIEKILTFRIPYYVGPLARGNSRFAWMTRKSEETITPWNFEEVVDKGASAQSFIERMTNFDKNLPNEKVLPKHSLLYEYFTVYNELTKVKYVTEGMRKPAFLSGEQKKAIVDLLFKTNRKVTVKQLKEDYFKKIECFDSVEISGVEDRFNASLGTYHDLLKIIKDKDFLDNEENEDILEDIVLTLTLFEDREMIEERLKTYAHLFDDKVMKQLKRRRYTGWGRLSRKLINGIRDKQSGKTILDFLKSDGFANRNFMQLIHDDSLTFKEDIQKAQVSGQGDSLHEHIANLAGSPAIKKGILQTVKVVDELVKVMGRHKPENIVIEMARENQTTQKGQKNSRERMKRIEEGIKELGSQILKEHPVENTQLQNEKLYLYYLQNGRDMYVDQELDINRLSDYDVDHIVPQSFLKDDSIDNKVLTRSDKARGKSDNVPSEEVVKKMKNYWRQLLNAKLITQRKFDNLTKAERGGLSELDKAGFIKRQLVETRQITKHVAQILDSRMNTKYDENDKLIREVKVITLKSKLVSDFRKDFQFYKVREINNYHHAHDAYLNAVVGTALIKKYPKLESEFVYGDYKVYDVRKMIAKSEQEIGKATAKYFFYSNIMNFFKTEITLANGEIRKRPLIETNGETGEIVWDKGRDFATVRKVLSMPQVNIVKKTEVQTGGFSKESILPKRNSDKLIARKKDWDPKKYGGFDSPTVAYSVLVVAKVEKGKSKKLKSVKELLGITIMERSSFEKNPIDFLEAKGYKEVKKDLIIKLPKYSLFELENGRKRMLASAGELQKGNELALPSKYVNFLYLASHYEKLKGSPEDNEQKQLFVEQHKHYLDEIIEQISEFSKRVILADANLDKVLSAYNKHRDKPIREQAENIIHLFTLTNLGAPAAFKYFDTTIDRKRYTSTKEVLDATLIHQSITGLYETRIDLSQLGGDGGAEAAAKEAAAKEAAAKEAAAKALEAEAAAKEAAAKEAAAKEAAAKAGGTLQLDDEYRLYSPLVKPDQNIQFWLEQFPQAWAETAGMGLAKQVPPQVIQLKASATPVSVRQYPLSKEAQEGIRPHVQRLIQQGILVPVQSPWNTPLLPVRKPGTNDYRPVQDLREVNKRVQDIHPTVPNPYNLLCALPPQRSWYTVLDLKDAFFCLRLHPTSQPLFAFEWRDPGTGRTGQLTWTRLPQGFKNSPTIFDEALHRDLANFRIQHPQVTLLQYVDDLLLAGATKQDCLEGTKALLLELSDLGYRASAKKAQICRREVTYLGYSLRDGQRWLTEARKKTVVQIPAPTTAKQVREFLGTAGFCRLWIPGFATLAAPLYPLTKEKGEFSWAPEHQKAFDAIKKALLSAPALALPDVTKPFTLYVDERKGVARGVLTQTLGPWRRPVAYLSKKLDPVASGWPVCLKAIAAVAILVKDADKLTLGQNITVIAPHALENIVRQPPDRWMTNARMTHYQSLLLTERVTFAPPAALNPATLLPEETDEPVTHDCHQLLIEETGVRKDLTDIPLTGEVLTWFTDGSSYVVEGKRMAGAAVVDGTRTIWASSLPEGTSAQKAELMALTQALRLAEGKSINIYTDSRYAFATAHVHGAIYKQRGLLTSAGREIKNKEEILSLLEALHLPKRLAIIHCPGHQKAKDPISRGNQMADRVAKQAAQGVNLLAGKRTADGSEFEKRTADGSEFESPKKKAKVE

SEQ ID NO: 99 - protein, 2094 aa, synthetic construct
MPAAKRVKLDGGDKKYSIGLDIGTNSVGWAVITDEYKVPSKKFKVLGNTDRHSIKKNLIGALLFDSGETAEATRLKRTARRRYTRRKNRICYLQEIFSNEMAKVDDSFFHRLEESFLVEEDKKHERHPIFGNIVDEVAYHEKYPTIYHLRKKLVDSTDKADLRLIYLALAHMIKFRGHFLIEGDLNPDNSDVDKLFIQLVQTYNQLFEENPINASGVDAKAILSARLSKSRRLENLIAQLPGEKKNGLFGNLIALSLGLTPNFKSNFDLAEDAKLQLSKDTYDDDLDNLLAQIGDQYADLFLAAKNLSDAILLSDILRVNTEITKAPLSASMIKRYDEHHQDLTLLKALVRQQLPEKYKEIFFDQSKNGYAGYIDGGASQEEFYKFIKPILEKMDGTEELLVKLNREDLLRKQRTFDNGSIPHQIHLGELHAILRRQEDFYPFLKDNREKIEKILTFRIPYYVGPLARGNSRFAWMTRKSEETITPWNFEEVVDKGASAQSFIERMTNFDKNLPNEKVLPKHSLLYEYFTVYNELTKVKYVTEGMRKPAFLSGEQKKAIVDLLFKTNRKVTVKQLKEDYFKKIECFDSVEISGVEDRFNASLGTYHDLLKIIKDKDFLDNEENEDILEDIVLTLTLFEDREMIEERLKTYAHLFDDKVMKQLKRRRYTGWGRLSRKLINGIRDKQSGKTILDFLKSDGFANRNFMQLIHDDSLTFKEDIQKAQVSGQGDSLHEHIANLAGSPAIKKGILQTVKVVDELVKVMGRHKPENIVIEMARENQTTQKGQKNSRERMKRIEEGIKELGSQILKEHPVENTQLQNEKLYLYYLQNGRDMYVDQELDINRLSDYDVDHIVPQSFLKDDSIDNKVLTRSDKARGKSDNVPSEEVVKKMKNYWRQLLNAKLITQRKFDNLTKAERGGLSELDKAGFIKRQLVETRQITKHVAQILDSRMNTKYDENDKLIREVKVITLKSKLVSDFRKDFQFYKVREINNYHHAHDAYLNAVVGTALIKKYPKLESEFVYGDYKVYDVRKMIAKSEQEIGKATAKYFFYSNIMNFFKTEITLANGEIRKRPLIETNGETGEIVWDKGRDFATVRKVLSMPQVNIVKKTEVQTGGFSKESILPKRNSDKLIARKKDWDPKKYGGFDSPTVAYSVLVVAKVEKGKSKKLKSVKELLGITIMERSSFEKNPIDFLEAKGYKEVKKDLIIKLPKYSLFELENGRKRMLASAGELQKGNELALPSKYVNFLYLASHYEKLKGSPEDNEQKQLFVEQHKHYLDEIIEQISEFSKRVILADANLDKVLSAYNKHRDKPIREQAENIIHLFTLTNLGAPAAFKYFDTTIDRKRYTSTKEVLDATLIHQSITGLYETRIDLSQLGGDGGGSSGSSGSSGSSGSSGGTLQLDDEYRLYSPLVKPDQNIQFWLEQFPQAWAETAGMGLAKQVPPQVIQLKASATPVSVRQYPLSKEAQEGIRPHVQRLIQQGILVPVQSPWNTPLLPVRKPGTNDYRPVQDLREVNKRVQDIHPTVPNPYNLLCALPPQRSWYTVLDLKDAFFCLRLHPTSQPLFAFEWRDPGTGRTGQLTWTRLPQGFKNSPTIFDEALHRDLANFRIQHPQVTLLQYVDDLLLAGATKQDCLEGTKALLLELSDLGYRASAKKAQICRREVTYLGYSLRDGQRWLTEARKKTVVQIPAPTTAKQVREFLGTAGFCRLWIPGFATLAAPLYPLTKEKGEFSWAPEHQKAFDAIKKALLSAPALALPDVTKPFTLYVDERKGVARGVLTQTLGPWRRPVAYLSKKLDPVASGWPVCLKAIAAVAILVKDADKLTLGQNITVIAPHALENIVRQPPDRWMTNARMTHYQSLLLTERVTFAPPAALNPATLLPEETDEPVTHDCHQLLIEETGVRKDLTDIPLTGEVLTWFTDGSSYVVEGKRMAGAAVVDGTRTIWASSLPEGTSAQKAELMALTQALRLAEGKSINIYTDSRYAFATAHVHGAIYKQRGLLTSAGREIKNKEEILSLLEALHLPKRLAIIHCPGHQKAKDPISRGNQMADRVAKQAAQGVNLLAGKRTADGSEFEKRTADGSEFESPKKKAKVE

SEQ ID NO: 100 - protein, 2085 aa, synthetic construct
MPAAKRVKLDGGDKKYSIGLDIGTNSVGWAVITDEYKVPSKKFKVLGNTDRHSIKKNLIGALLFDSGETAEATRLKRTARRRYTRRKNRICYLQEIFSNEMAKVDDSFFHRLEESFLVEEDKKHERHPIFGNIVDEVAYHEKYPTIYHLRKKLVDSTDKADLRLIYLALAHMIKFRGHFLIEGDLNPDNSDVDKLFIQLVQTYNQLFEENPINASGVDAKAILSARLSKSRRLENLIAQLPGEKKNGLFGNLIALSLGLTPNFKSNFDLAEDAKLQLSKDTYDDDLDNLLAQIGDQYADLFLAAKNLSDAILLSDILRVNTEITKAPLSASMIKRYDEHHQDLTLLKALVRQQLPEKYKEIFFDQSKNGYAGYIDGGASQEEFYKFIKPILEKMDGTEELLVKLNREDLLRKQRTFDNGSIPHQIHLGELHAILRRQEDFYPFLKDNREKIEKILTFRIPYYVGPLARGNSRFAWMTRKSEETITPWNFEEVVDKGASAQSFIERMTNFDKNLPNEKVLPKHSLLYEYFTVYNELTKVKYVTEGMRKPAFLSGEQKKAIVDLLFKTNRKVTVKQLKEDYFKKIECFDSVEISGVEDRFNASLGTYHDLLKIIKDKDFLDNEENEDILEDIVLTLTLFEDREMIEERLKTYAHLFDDKVMKQLKRRRYTGWGRLSRKLINGIRDKQSGKTILDFLKSDGFANRNFMQLIHDDSLTFKEDIQKAQVSGQGDSLHEHIANLAGSPAIKKGILQTVKVVDELVKVMGRHKPENIVIEMARENQTTQKGQKNSRERMKRIEEGIKELGSQILKEHPVENTQLQNEKLYLYYLQNGRDMYVDQELDINRLSDYDVDHIVPQSFLKDDSIDNKVLTRSDKARGKSDNVPSEEVVKKMKNYWRQLLNAKLITQRKFDNLTKAERGGLSELDKAGFIKRQLVETRQITKHVAQILDSRMNTKYDENDKLIREVKVITLKSKLVSDFRKDFQFYKVREINNYHHAHDAYLNAVVGTALIKKYPKLESEFVYGDYKVYDVRKMIAKSEQEIGKATAKYFFYSNIMNFFKTEITLANGEIRKRPLIETNGETGEIVWDKGRDFATVRKVLSMPQVNIVKKTEVQTGGFSKESILPKRNSDKLIARKKDWDPKKYGGFDSPTVAYSVLVVAKVEKGKSKKLKSVKELLGITIMERSSFEKNPIDFLEAKGYKEVKKDLIIKLPKYSLFELENGRKRMLASAGELQKGNELALPSKYVNFLYLASHYEKLKGSPEDNEQKQLFVEQHKHYLDEIIEQISEFSKRVILADANLDKVLSAYNKHRDKPIREQAENIIHLFTLTNLGAPAAFKYFDTTIDRKRYTSTKEVLDATLIHQSITGLYETRIDLSQLGGDGGGGGGSSGGTLQLDDEYRLYSPLVKPDQNIQFWLEQFPQAWAETAGMGLAKQVPPQVIQLKASATPVSVRQYPLSKEAQEGIRPHVQRLIQQGILVPVQSPWNTPLLPVRKPGTNDYRPVQDLREVNKRVQDIHPTVPNPYNLLCALPPQRSWYTVLDLKDAFFCLRLHPTSQPLFAFEWRDPGTGRTGQLTWTRLPQGFKNSPTIFDEALHRDLANFRIQHPQVTLLQYVDDLLLAGATKQDCLEGTKALLLELSDLGYRASAKKAQICRREVTYLGYSLRDGQRWLTEARKKTVVQIPAPTTAKQVREFLGTAGFCRLWIPGFATLAAPLYPLTKEKGEFSWAPEHQKAFDAIKKALLSAPALALPDVTKPFTLYVDERKGVARGVLTQTLGPWRRPVAYLSKKLDPVASGWPVCLKAIAAVAILVKDADKLTLGQNITVIAPHALENIVRQPPDRWMTNARMTHYQSLLLTERVTFAPPAALNPATLLPEETDEPVTHDCHQLLIEETGVRKDLTDIPLTGEVLTWFTDGSSYVVEGKRMAGAAVVDGTRTIWASSLPEGTSAQKAELMALTQALRLAEGKSINIYTDSRYAFATAHVHGAIYKQRGLLTSAGREIKNKEEILSLLEALHLPKRLAIIHCPGHQKAKDPISRGNQMADRVAKQAAQGVNLLAGKRTADGSEFEKRTADGSEFESPKKKAKVE

SEQ ID NO: 101 - protein, 2088 aa, synthetic construct
MPAAKRVKLDGGDKKYSIGLDIGTNSVGWAVITDEYKVPSKKFKVLGNTDRHSIKKNLIGALLFDSGETAEATRLKRTARRRYTRRKNRICYLQEIFSNEMAKVDDSFFHRLEESFLVEEDKKHERHPIFGNIVDEVAYHEKYPTIYHLRKKLVDSTDKADLRLIYLALAHMIKFRGHFLIEGDLNPDNSDVDKLFIQLVQTYNQLFEENPINASGVDAKAILSARLSKSRRLENLIAQLPGEKKNGLFGNLIALSLGLTPNFKSNFDLAEDAKLQLSKDTYDDDLDNLLAQIGDQYADLFLAAKNLSDAILLSDILRVNTEITKAPLSASMIKRYDEHHQDLTLLKALVRQQLPEKYKEIFFDQSKNGYAGYIDGGASQEEFYKFIKPILEKMDGTEELLVKLNREDLLRKQRTFDNGSIPHQIHLGELHAILRRQEDFYPFLKDNREKIEKILTFRIPYYVGPLARGNSRFAWMTRKSEETITPWNFEEVVDKGASAQSFIERMTNFDKNLPNEKVLPKHSLLYEYFTVYNELTKVKYVTEGMRKPAFLSGEQKKAIVDLLFKTNRKVTVKQLKEDYFKKIECFDSVEISGVEDRFNASLGTYHDLLKIIKDKDFLDNEENEDILEDIVLTLTLFEDREMIEERLKTYAHLFDDKVMKQLKRRRYTGWGRLSRKLINGIRDKQSGKTILDFLKSDGFANRNFMQLIHDDSLTFKEDIQKAQVSGQGDSLHEHIANLAGSPAIKKGILQTVKVVDELVKVMGRHKPENIVIEMARENQTTQKGQKNSRERMKRIEEGIKELGSQILKEHPVENTQLQNEKLYLYYLQNGRDMYVDQELDINRLSDYDVDHIVPQSFLKDDSIDNKVLTRSDKARGKSDNVPSEEVVKKMKNYWRQLLNAKLITQRKFDNLTKAERGGLSELDKAGFIKRQLVETRQITKHVAQILDSRMNTKYDENDKLIREVKVITLKSKLVSDFRKDFQFYKVREINNYHHAHDAYLNAVVGTALIKKYPKLESEFVYGDYKVYDVRKMIAKSEQEIGKATAKYFFYSNIMNFFKTEITLANGEIRKRPLIETNGETGEIVWDKGRDFATVRKVLSMPQVNIVKKTEVQTGGFSKESILPKRNSDKLIARKKDWDPKKYGGFDSPTVAYSVLVVAKVEKGKSKKLKSVKELLGITIMERSSFEKNPIDFLEAKGYKEVKKDLIIKLPKYSLFELENGRKRMLASAGELQKGNELALPSKYVNFLYLASHYEKLKGSPEDNEQKQLFVEQHKHYLDEIIEQISEFSKRVILADANLDKVLSAYNKHRDKPIREQAENIIHLFTLTNLGAPAAFKYFDTTIDRKRYTSTKEVLDATLIHQSITGLYETRIDLSQLGGDGGGSSGGSPAPGGTLQLDDEYRLYSPLVKPDQNIQFWLEQFPQAWAETAGMGLAKQVPPQVIQLKASATPVSVRQYPLSKEAQEGIRPHVQRLIQQGILVPVQSPWNTPLLPVRKPGTNDYRPVQDLREVNKRVQDIHPTVPNPYNLLCALPPQRSWYTVLDLKDAFFCLRLHPTSQPLFAFEWRDPGTGRTGQLTWTRLPQGFKNSPTIFDEALHRDLANFRIQHPQVTLLQYVDDLLLAGATKQDCLEGTKALLLELSDLGYRASAKKAQICRREVTYLGYSLRDGQRWLTEARKKTVVQIPAPTTAKQVREFLGTAGFCRLWIPGFATLAAPLYPLTKEKGEFSWAPEHQKAFDAIKKALLSAPALALPDVTKPFTLYVDERKGVARGVLTQTLGPWRRPVAYLSKKLDPVASGWPVCLKAIAAVAILVKDADKLTLGQNITVIAPHALENIVRQPPDRWMTNARMTHYQSLLLTERVTFAPPAALNPATLLPEETDEPVTHDCHQLLIEETGVRKDLTDIPLTGEVLTWFTDGSSYVVEGKRMAGAAVVDGTRTIWASSLPEGTSAQKAELMALTQALRLAEGKSINIYTDSRYAFATAHVHGAIYKQRGLLTSAGREIKNKEEILSLLEALHLPKRLAIIHCPGHQKAKDPISRGNQMADRVAKQAAQGVNLLAGKRTADGSEFEKRTADGSEFESPKKKAKVE

SEQ ID NO: 102 - protein, 2089 aa, synthetic construct
MPAAKRVKLDGGDKKYSIGLDIGTNSVGWAVITDEYKVPSKKFKVLGNTDRHSIKKNLIGALLFDSGETAEATRLKRTARRRYTRRKNRICYLQEIFSNEMAKVDDSFFHRLEESFLVEEDKKHERHPIFGNIVDEVAYHEKYPTIYHLRKKLVDSTDKADLRLIYLALAHMIKFRGHFLIEGDLNPDNSDVDKLFIQLVQTYNQLFEENPINASGVDAKAILSARLSKSRRLENLIAQLPGEKKNGLFGNLIALSLGLTPNFKSNFDLAEDAKLQLSKDTYDDDLDNLLAQIGDQYADLFLAAKNLSDAILLSDILRVNTEITKAPLSASMIKRYDEHHQDLTLLKALVRQQLPEKYKEIFFDQSKNGYAGYIDGGASQEEFYKFIKPILEKMDGTEELLVKLNREDLLRKQRTFDNGSIPHQIHLGELHAILRRQEDFYPFLKDNREKIEKILTFRIPYYVGPLARGNSRFAWMTRKSEETITPWNFEEVVDKGASAQSFIERMTNFDKNLPNEKVLPKHSLLYEYFTVYNELTKVKYVTEGMRKPAFLSGEQKKAIVDLLFKTNRKVTVKQLKEDYFKKIECFDSVEISGVEDRFNASLGTYHDLLKIIKDKDFLDNEENEDILEDIVLTLTLFEDREMIEERLKTYAHLFDDKVMKQLKRRRYTGWGRLSRKLINGIRDKQSGKTILDFLKSDGFANRNFMQLIHDDSLTFKEDIQKAQVSGQGDSLHEHIANLAGSPAIKKGILQTVKVVDELVKVMGRHKPENIVIEMARENQTTQKGQKNSRERMKRIEEGIKELGSQILKEHPVENTQLQNEKLYLYYLQNGRDMYVDQELDINRLSDYDVDHIVPQSFLKDDSIDNKVLTRSDKARGKSDNVPSEEVVKKMKNYWRQLLNAKLITQRKFDNLTKAERGGLSELDKAGFIKRQLVETRQITKHVAQILDSRMNTKYDENDKLIREVKVITLKSKLVSDFRKDFQFYKVREINNYHHAHDAYLNAVVGTALIKKYPKLESEFVYGDYKVYDVRKMIAKSEQEIGKATAKYFFYSNIMNFFKTEITLANGEIRKRPLIETNGETGEIVWDKGRDFATVRKVLSMPQVNIVKKTEVQTGGFSKESILPKRNSDKLIARKKDWDPKKYGGFDSPTVAYSVLVVAKVEKGKSKKLKSVKELLGITIMERSSFEKNPIDFLEAKGYKEVKKDLIIKLPKYSLFELENGRKRMLASAGELQKGNELALPSKYVNFLYLASHYEKLKGSPEDNEQKQLFVEQHKHYLDEIIEQISEFSKRVILADANLDKVLSAYNKHRDKPIREQAENIIHLFTLTNLGAPAAFKYFDTTIDRKRYTSTKEVLDATLIHQSITGLYETRIDLSQLGGDGGGGGGSGGGGSGGTLQLDDEYRLYSPLVKPDQNIQFWLEQFPQAWAETAGMGLAKQVPPQVIQLKASATPVSVRQYPLSKEAQEGIRPHVQRLIQQGILVPVQSPWNTPLLPVRKPGTNDYRPVQDLREVNKRVQDIHPTVPNPYNLLCALPPQRSWYTVLDLKDAFFCLRLHPTSQPLFAFEWRDPGTGRTGQLTWTRLPQGFKNSPTIFDEALHRDLANFRIQHPQVTLLQYVDDLLLAGATKQDCLEGTKALLLELSDLGYRASAKKAQICRREVTYLGYSLRDGQRWLTEARKKTVVQIPAPTTAKQVREFLGTAGFCRLWIPGFATLAAPLYPLTKEKGEFSWAPEHQKAFDAIKKALLSAPALALPDVTKPFTLYVDERKGVARGVLTQTLGPWRRPVAYLSKKLDPVASGWPVCLKAIAAVAILVKDADKLTLGQNITVIAPHALENIVRQPPDRWMTNARMTHYQSLLLTERVTFAPPAALNPATLLPEETDEPVTHDCHQLLIEETGVRKDLTDIPLTGEVLTWFTDGSSYVVEGKRMAGAAVVDGTRTIWASSLPEGTSAQKAELMALTQALRLAEGKSINIYTDSRYAFATAHVHGAIYKQRGLLTSAGREIKNKEEILSLLEALHLPKRLAIIHCPGHQKAKDPISRGNQMADRVAKQAAQGVNLLAGKRTADGSEFEKRTADGSEFESPKKKAKVE

SEQ ID NO: 103 - protein, 2091 aa, synthetic construct
MPAAKRVKLDGGDKKYSIGLDIGTNSVGWAVITDEYKVPSKKFKVLGNTDRHSIKKNLIGALLFDSGETAEATRLKRTARRRYTRRKNRICYLQEIFSNEMAKVDDSFFHRLEESFLVEEDKKHERHPIFGNIVDEVAYHEKYPTIYHLRKKLVDSTDKADLRLIYLALAHMIKFRGHFLIEGDLNPDNSDVDKLFIQLVQTYNQLFEENPINASGVDAKAILSARLSKSRRLENLIAQLPGEKKNGLFGNLIALSLGLTPNFKSNFDLAEDAKLQLSKDTYDDDLDNLLAQIGDQYADLFLAAKNLSDAILLSDILRVNTEITKAPLSASMIKRYDEHHQDLTLLKALVRQQLPEKYKEIFFDQSKNGYAGYIDGGASQEEFYKFIKPILEKMDGTEELLVKLNREDLLRKQRTFDNGSIPHQIHLGELHAILRRQEDFYPFLKDNREKIEKILTFRIPYYVGPLARGNSRFAWMTRKSEETITPWNFEEVVDKGASAQSFIERMTNFDKNLPNEKVLPKHSLLYEYFTVYNELTKVKYVTEGMRKPAFLSGEQKKAIVDLLFKTNRKVTVKQLKEDYFKKIECFDSVEISGVEDRFNASLGTYHDLLKIIKDKDFLDNEENEDILEDIVLTLTLFEDREMIEERLKTYAHLFDDKVMKQLKRRRYTGWGRLSRKLINGIRDKQSGKTILDFLKSDGFANRNFMQLIHDDSLTFKEDIQKAQVSGQGDSLHEHIANLAGSPAIKKGILQTVKVVDELVKVMGRHKPENIVIEMARENQTTQKGQKNSRERMKRIEEGIKELGSQILKEHPVENTQLQNEKLYLYYLQNGRDMYVDQELDINRLSDYDVDHIVPQSFLKDDSIDNKVLTRSDKARGKSDNVPSEEVVKKMKNYWRQLLNAKLITQRKFDNLTKAERGGLSELDKAGFIKRQLVETRQITKHVAQILDSRMNTKYDENDKLIREVKVITLKSKLVSDFRKDFQFYKVREINNYHHAHDAYLNAVVGTALIKKYPKLESEFVYGDYKVYDVRKMIAKSEQEIGKATAKYFFYSNIMNFFKTEITLANGEIRKRPLIETNGETGEIVWDKGRDFATVRKVLSMPQVNIVKKTEVQTGGFSKESILPKRNSDKLIARKKDWDPKKYGGFDSPTVAYSVLVVAKVEKGKSKKLKSVKELLGITIMERSSFEKNPIDFLEAKGYKEVKKDLIIKLPKYSLFELENGRKRMLASAGELQKGNELALPSKYVNFLYLASHYEKLKGSPEDNEQKQLFVEQHKHYLDEIIEQISEFSKRVILADANLDKVLSAYNKHRDKPIREQAENIIHLFTLTNLGAPAAFKYFDTTIDRKRYTSTKEVLDATLIHQSITGLYETRIDLSQLGGDGGGSSGSSGSSGSSGGTLQLDDEYRLYSPLVKPDQNIQFWLEQFPQAWAETAGMGLAKQVPPQVIQLKASATPVSVRQYPLSKEAQEGIRPHVQRLIQQGILVPVQSPWNTPLLPVRKPGTNDYRPVQDLREVNKRVQDIHPTVPNPYNLLCALPPQRSWYTVLDLKDAFFCLRLHPTSQPLFAFEWRDPGTGRTGQLTWTRLPQGFKNSPTIFDEALHRDLANFRIQHPQVTLLQYVDDLLLAGATKQDCLEGTKALLLELSDLGYRASAKKAQICRREVTYLGYSLRDGQRWLTEARKKTVVQIPAPTTAKQVREFLGTAGFCRLWIPGFATLAAPLYPLTKEKGEFSWAPEHQKAFDAIKKALLSAPALALPDVTKPFTLYVDERKGVARGVLTQTLGPWRRPVAYLSKKLDPVASGWPVCLKAIAAVAILVKDADKLTLGQNITVIAPHALENIVRQPPDRWMTNARMTHYQSLLLTERVTFAPPAALNPATLLPEETDEPVTHDCHQLLIEETGVRKDLTDIPLTGEVLTWFTDGSSYVVEGKRMAGAAVVDGTRTIWASSLPEGTSAQKAELMALTQALRLAEGKSINIYTDSRYAFATAHVHGAIYKQRGLLTSAGREIKNKEEILSLLEALHLPKRLAIIHCPGHQKAKDPISRGNQMADRVAKQAAQGVNLLAGKRTADGSEFEKRTADGSEFESPKKKAKVE

SEQ ID NO: 104 - protein, 2090 aa, synthetic construct
MPAAKRVKLDGGDKKYSIGLDIGTNSVGWAVITDEYKVPSKKFKVLGNTDRHSIKKNLIGALLFDSGETAEATRLKRTARRRYTRRKNRICYLQEIFSNEMAKVDDSFFHRLEESFLVEEDKKHERHPIFGNIVDEVAYHEKYPTIYHLRKKLVDSTDKADLRLIYLALAHMIKFRGHFLIEGDLNPDNSDVDKLFIQLVQTYNQLFEENPINASGVDAKAILSARLSKSRRLENLIAQLPGEKKNGLFGNLIALSLGLTPNFKSNFDLAEDAKLQLSKDTYDDDLDNLLAQIGDQYADLFLAAKNLSDAILLSDILRVNTEITKAPLSASMIKRYDEHHQDLTLLKALVRQQLPEKYKEIFFDQSKNGYAGYIDGGASQEEFYKFIKPILEKMDGTEELLVKLNREDLLRKQRTFDNGSIPHQIHLGELHAILRRQEDFYPFLKDNREKIEKILTFRIPYYVGPLARGNSRFAWMTRKSEETITPWNFEEVVDKGASAQSFIERMTNFDKNLPNEKVLPKHSLLYEYFTVYNELTKVKYVTEGMRKPAFLSGEQKKAIVDLLFKTNRKVTVKQLKEDYFKKIECFDSVEISGVEDRFNASLGTYHDLLKIIKDKDFLDNEENEDILEDIVLTLTLFEDREMIEERLKTYAHLFDDKVMKQLKRRRYTGWGRLSRKLINGIRDKQSGKTILDFLKSDGFANRNFMQLIHDDSLTFKEDIQKAQVSGQGDSLHEHIANLAGSPAIKKGILQTVKVVDELVKVMGRHKPENIVIEMARENQTTQKGQKNSRERMKRIEEGIKELGSQILKEHPVENTQLQNEKLYLYYLQNGRDMYVDQELDINRLSDYDVDHIVPQSFLKDDSIDNKVLTRSDKARGKSDNVPSEEVVKKMKNYWRQLLNAKLITQRKFDNLTKAERGGLSELDKAGFIKRQLVETRQITKHVAQILDSRMNTKYDENDKLIREVKVITLKSKLVSDFRKDFQFYKVREINNYHHAHDAYLNAVVGTALIKKYPKLESEFVYGDYKVYDVRKMIAKSEQEIGKATAKYFFYSNIMNFFKTEITLANGEIRKRPLIETNGETGEIVWDKGRDFATVRKVLSMPQVNIVKKTEVQTGGFSKESILPKRNSDKLIARKKDWDPKKYGGFDSPTVAYSVLVVAKVEKGKSKKLKSVKELLGITIMERSSFEKNPIDFLEAKGYKEVKKDLIIKLPKYSLFELENGRKRMLASAGELQKGNELALPSKYVNFLYLASHYEKLKGSPEDNEQKQLFVEQHKHYLDEIIEQISEFSKRVILADANLDKVLSAYNKHRDKPIREQAENIIHLFTLTNLGAPAAFKYFDTTIDRKRYTSTKEVLDATLIHQSITGLYETRIDLSQLGGDGGPAPGSSEAAAKGGTLQLDDEYRLYSPLVKPDQNIQFWLEQFPQAWAETAGMGLAKQVPPQVIQLKASATPVSVRQYPLSKEAQEGIRPHVQRLIQQGILVPVQSPWNTPLLPVRKPGTNDYRPVQDLREVNKRVQDIHPTVPNPYNLLCALPPQRSWYTVLDLKDAFFCLRLHPTSQPLFAFEWRDPGTGRTGQLTWTRLPQGFKNSPTIFDEALHRDLANFRIQHPQVTLLQYVDDLLLAGATKQDCLEGTKALLLELSDLGYRASAKKAQICRREVTYLGYSLRDGQRWLTEARKKTVVQIPAPTTAKQVREFLGTAGFCRLWIPGFATLAAPLYPLTKEKGEFSWAPEHQKAFDAIKKALLSAPALALPDVTKPFTLYVDERKGVARGVLTQTLGPWRRPVAYLSKKLDPVASGWPVCLKAIAAVAILVKDADKLTLGQNITVIAPHALENIVRQPPDRWMTNARMTHYQSLLLTERVTFAPPAALNPATLLPEETDEPVTHDCHQLLIEETGVRKDLTDIPLTGEVLTWFTDGSSYVVEGKRMAGAAVVDGTRTIWASSLPEGTSAQKAELMALTQALRLAEGKSINIYTDSRYAFATAHVHGAIYKQRGLLTSAGREIKNKEEILSLLEALHLPKRLAIIHCPGHQKAKDPISRGNQMADRVAKQAAQGVNLLAGKRTADGSEFEKRTADGSEFESPKKKAKVE

SEQ ID NO: 105 - protein, 2085 aa, synthetic construct
MPAAKRVKLDGGDKKYSIGLDIGTNSVGWAVITDEYKVPSKKFKVLGNTDRHSIKKNLIGALLFDSGETAEATRLKRTARRRYTRRKNRICYLQEIFSNEMAKVDDSFFHRLEESFLVEEDKKHERHPIFGNIVDEVAYHEKYPTIYHLRKKLVDSTDKADLRLIYLALAHMIKFRGHFLIEGDLNPDNSDVDKLFIQLVQTYNQLFEENPINASGVDAKAILSARLSKSRRLENLIAQLPGEKKNGLFGNLIALSLGLTPNFKSNFDLAEDAKLQLSKDTYDDDLDNLLAQIGDQYADLFLAAKNLSDAILLSDILRVNTEITKAPLSASMIKRYDEHHQDLTLLKALVRQQLPEKYKEIFFDQSKNGYAGYIDGGASQEEFYKFIKPILEKMDGTEELLVKLNREDLLRKQRTFDNGSIPHQIHLGELHAILRRQEDFYPFLKDNREKIEKILTFRIPYYVGPLARGNSRFAWMTRKSEETITPWNFEEVVDKGASAQSFIERMTNFDKNLPNEKVLPKHSLLYEYFTVYNELTKVKYVTEGMRKPAFLSGEQKKAIVDLLFKTNRKVTVKQLKEDYFKKIECFDSVEISGVEDRFNASLGTYHDLLKIIKDKDFLDNEENEDILEDIVLTLTLFEDREMIEERLKTYAHLFDDKVMKQLKRRRYTGWGRLSRKLINGIRDKQSGKTILDFLKSDGFANRNFMQLIHDDSLTFKEDIQKAQVSGQGDSLHEHIANLAGSPAIKKGILQTVKVVDELVKVMGRHKPENIVIEMARENQTTQKGQKNSRERMKRIEEGIKELGSQILKEHPVENTQLQNEKLYLYYLQNGRDMYVDQELDINRLSDYDVDHIVPQSFLKDDSIDNKVLTRSDKARGKSDNVPSEEVVKKMKNYWRQLLNAKLITQRKFDNLTKAERGGLSELDKAGFIKRQLVETRQITKHVAQILDSRMNTKYDENDKLIREVKVITLKSKLVSDFRKDFQFYKVREINNYHHAHDAYLNAVVGTALIKKYPKLESEFVYGDYKVYDVRKMIAKSEQEIGKATAKYFFYSNIMNFFKTEITLANGEIRKRPLIETNGETGEIVWDKGRDFATVRKVLSMPQVNIVKKTEVQTGGFSKESILPKRNSDKLIARKKDWDPKKYGGFDSPTVAYSVLVVAKVEKGKSKKLKSVKELLGITIMERSSFEKNPIDFLEAKGYKEVKKDLIIKLPKYSLFELENGRKRMLASAGELQKGNELALPSKYVNFLYLASHYEKLKGSPEDNEQKQLFVEQHKHYLDEIIEQISEFSKRVILADANLDKVLSAYNKHRDKPIREQAENIIHLFTLTNLGAPAAFKYFDTTIDRKRYTSTKEVLDATLIHQSITGLYETRIDLSQLGGDGGGGSGSSGGTLQLDDEYRLYSPLVKPDQNIQFWLEQFPQAWAETAGMGLAKQVPPQVIQLKASATPVSVRQYPLSKEAQEGIRPHVQRLIQQGILVPVQSPWNTPLLPVRKPGTNDYRPVQDLREVNKRVQDIHPTVPNPYNLLCALPPQRSWYTVLDLKDAFFCLRLHPTSQPLFAFEWRDPGTGRTGQLTWTRLPQGFKNSPTIFDEALHRDLANFRIQHPQVTLLQYVDDLLLAGATKQDCLEGTKALLLELSDLGYRASAKKAQICRREVTYLGYSLRDGQRWLTEARKKTVVQIPAPTTAKQVREFLGTAGFCRLWIPGFATLAAPLYPLTKEKGEFSWAPEHQKAFDAIKKALLSAPALALPDVTKPFTLYVDERKGVARGVLTQTLGPWRRPVAYLSKKLDPVASGWPVCLKAIAAVAILVKDADKLTLGQNITVIAPHALENIVRQPPDRWMTNARMTHYQSLLLTERVTFAPPAALNPATLLPEETDEPVTHDCHQLLIEETGVRKDLTDIPLTGEVLTWFTDGSSYVVEGKRMAGAAVVDGTRTIWASSLPEGTSAQKAELMALTQALRLAEGKSINIYTDSRYAFATAHVHGAIYKQRGLLTSAGREIKNKEEILSLLEALHLPKRLAIIHCPGHQKAKDPISRGNQMADRVAKQAAQGVNLLAGKRTADGSEFEKRTADGSEFESPKKKAKVE

SEQ ID NO: 106 - protein, 2088 aa, synthetic construct
MPAAKRVKLDGGDKKYSIGLDIGTNSVGWAVITDEYKVPSKKFKVLGNTDRHSIKKNLIGALLFDSGETAEATRLKRTARRRYTRRKNRICYLQEIFSNEMAKVDDSFFHRLEESFLVEEDKKHERHPIFGNIVDEVAYHEKYPTIYHLRKKLVDSTDKADLRLIYLALAHMIKFRGHFLIEGDLNPDNSDVDKLFIQLVQTYNQLFEENPINASGVDAKAILSARLSKSRRLENLIAQLPGEKKNGLFGNLIALSLGLTPNFKSNFDLAEDAKLQLSKDTYDDDLDNLLAQIGDQYADLFLAAKNLSDAILLSDILRVNTEITKAPLSASMIKRYDEHHQDLTLLKALVRQQLPEKYKEIFFDQSKNGYAGYIDGGASQEEFYKFIKPILEKMDGTEELLVKLNREDLLRKQRTFDNGSIPHQIHLGELHAILRRQEDFYPFLKDNREKIEKILTFRIPYYVGPLARGNSRFAWMTRKSEETITPWNFEEVVDKGASAQSFIERMTNFDKNLPNEKVLPKHSLLYEYFTVYNELTKVKYVTEGMRKPAFLSGEQKKAIVDLLFKTNRKVTVKQLKEDYFKKIECFDSVEISGVEDRFNASLGTYHDLLKIIKDKDFLDNEENEDILEDIVLTLTLFEDREMIEERLKTYAHLFDDKVMKQLKRRRYTGWGRLSRKLINGIRDKQSGKTILDFLKSDGFANRNFMQLIHDDSLTFKEDIQKAQVSGQGDSLHEHIANLAGSPAIKKGILQTVKVVDELVKVMGRHKPENIVIEMARENQTTQKGQKNSRERMKRIEEGIKELGSQILKEHPVENTQLQNEKLYLYYLQNGRDMYVDQELDINRLSDYDVDHIVPQSFLKDDSIDNKVLTRSDKARGKSDNVPSEEVVKKMKNYWRQLLNAKLITQRKFDNLTKAERGGLSELDKAGFIKRQLVETRQITKHVAQILDSRMNTKYDENDKLIREVKVITLKSKLVSDFRKDFQFYKVREINNYHHAHDAYLNAVVGTALIKKYPKLESEFVYGDYKVYDVRKMIAKSEQEIGKATAKYFFYSNIMNFFKTEITLANGEIRKRPLIETNGETGEIVWDKGRDFATVRKVLSMPQVNIVKKTEVQTGGFSKESILPKRNSDKLIARKKDWDPKKYGGFDSPTVAYSVLVVAKVEKGKSKKLKSVKELLGITIMERSSFEKNPIDFLEAKGYKEVKKDLIIKLPKYSLFELENGRKRMLASAGELQKGNELALPSKYVNFLYLASHYEKLKGSPEDNEQKQLFVEQHKHYLDEIIEQISEFSKRVILADANLDKVLSAYNKHRDKPIREQAENIIHLFTLTNLGAPAAFKYFDTTIDRKRYTSTKEVLDATLIHQSITGLYETRIDLSQLGGDGGPAPGSSGGGGGTLQLDDEYRLYSPLVKPDQNIQFWLEQFPQAWAETAGMGLAKQVPPQVIQLKASATPVSVRQYPLSKEAQEGIRPHVQRLIQQGILVPVQSPWNTPLLPVRKPGTNDYRPVQDLREVNKRVQDIHPTVPNPYNLLCALPPQRSWYTVLDLKDAFFCLRLHPTSQPLFAFEWRDPGTGRTGQLTWTRLPQGFKNSPTIFDEALHRDLANFRIQHPQVTLLQYVDDLLLAGATKQDCLEGTKALLLELSDLGYRASAKKAQICRREVTYLGYSLRDGQRWLTEARKKTVVQIPAPTTAKQVREFLGTAGFCRLWIPGFATLAAPLYPLTKEKGEFSWAPEHQKAFDAIKKALLSAPALALPDVTKPFTLYVDERKGVARGVLTQTLGPWRRPVAYLSKKLDPVASGWPVCLKAIAAVAILVKDADKLTLGQNITVIAPHALENIVRQPPDRWMTNARMTHYQSLLLTERVTFAPPAALNPATLLPEETDEPVTHDCHQLLIEETGVRKDLTDIPLTGEVLTWFTDGSSYVVEGKRMAGAAVVDGTRTIWASSLPEGTSAQKAELMALTQALRLAEGKSINIYTDSRYAFATAHVHGAIYKQRGLLTSAGREIKNKEEILSLLEALHLPKRLAIIHCPGHQKAKDPISRGNQMADRVAKQAAQGVNLLAGKRTADGSEFEKRTADGSEFESPKKKAKVE

SEQ ID NO: 107 - protein, 2088 aa, synthetic construct
MPAAKRVKLDGGDKKYSIGLDIGTNSVGWAVITDEYKVPSKKFKVLGNTDRHSIKKNLIGALLFDSGETAEATRLKRTARRRYTRRKNRICYLQEIFSNEMAKVDDSFFHRLEESFLVEEDKKHERHPIFGNIVDEVAYHEKYPTIYHLRKKLVDSTDKADLRLIYLALAHMIKFRGHFLIEGDLNPDNSDVDKLFIQLVQTYNQLFEENPINASGVDAKAILSARLSKSRRLENLIAQLPGEKKNGLFGNLIALSLGLTPNFKSNFDLAEDAKLQLSKDTYDDDLDNLLAQIGDQYADLFLAAKNLSDAILLSDILRVNTEITKAPLSASMIKRYDEHHQDLTLLKALVRQQLPEKYKEIFFDQSKNGYAGYIDGGASQEEFYKFIKPILEKMDGTEELLVKLNREDLLRKQRTFDNGSIPHQIHLGELHAILRRQEDFYPFLKDNREKIEKILTFRIPYYVGPLARGNSRFAWMTRKSEETITPWNFEEVVDKGASAQSFIERMTNFDKNLPNEKVLPKHSLLYEYFTVYNELTKVKYVTEGMRKPAFLSGEQKKAIVDLLFKTNRKVTVKQLKEDYFKKIECFDSVEISGVEDRFNASLGTYHDLLKIIKDKDFLDNEENEDILEDIVLTLTLFEDREMIEERLKTYAHLFDDKVMKQLKRRRYTGWGRLSRKLINGIRDKQSGKTILDFLKSDGFANRNFMQLIHDDSLTFKEDIQKAQVSGQGDSLHEHIANLAGSPAIKKGILQTVKVVDELVKVMGRHKPENIVIEMARENQTTQKGQKNSRERMKRIEEGIKELGSQILKEHPVENTQLQNEKLYLYYLQNGRDMYVDQELDINRLSDYDVDHIVPQSFLKDDSIDNKVLTRSDKARGKSDNVPSEEVVKKMKNYWRQLLNAKLITQRKFDNLTKAERGGLSELDKAGFIKRQLVETRQITKHVAQILDSRMNTKYDENDKLIREVKVITLKSKLVSDFRKDFQFYKVREINNYHHAHDAYLNAVVGTALIKKYPKLESEFVYGDYKVYDVRKMIAKSEQEIGKATAKYFFYSNIMNFFKTEITLANGEIRKRPLIETNGETGEIVWDKGRDFATVRKVLSMPQVNIVKKTEVQTGGFSKESILPKRNSDKLIARKKDWDPKKYGGFDSPTVAYSVLVVAKVEKGKSKKLKSVKELLGITIMERSSFEKNPIDFLEAKGYKEVKKDLIIKLPKYSLFELENGRKRMLASAGELQKGNELALPSKYVNFLYLASHYEKLKGSPEDNEQKQLFVEQHKHYLDEIIEQISEFSKRVILADANLDKVLSAYNKHRDKPIREQAENIIHLFTLTNLGAPAAFKYFDTTIDRKRYTSTKEVLDATLIHQSITGLYETRIDLSQLGGDGGGGGPAPGSSGGTLQLDDEYRLYSPLVKPDQNIQFWLEQFPQAWAETAGMGLAKQVPPQVIQLKASATPVSVRQYPLSKEAQEGIRPHVQRLIQQGILVPVQSPWNTPLLPVRKPGTNDYRPVQDLREVNKRVQDIHPTVPNPYNLLCALPPQRSWYTVLDLKDAFFCLRLHPTSQPLFAFEWRDPGTGRTGQLTWTRLPQGFKNSPTIFDEALHRDLANFRIQHPQVTLLQYVDDLLLAGATKQDCLEGTKALLLELSDLGYRASAKKAQICRREVTYLGYSLRDGQRWLTEARKKTVVQIPAPTTAKQVREFLGTAGFCRLWIPGFATLAAPLYPLTKEKGEFSWAPEHQKAFDAIKKALLSAPALALPDVTKPFTLYVDERKGVARGVLTQTLGPWRRPVAYLSKKLDPVASGWPVCLKAIAAVAILVKDADKLTLGQNITVIAPHALENIVRQPPDRWMTNARMTHYQSLLLTERVTFAPPAALNPATLLPEETDEPVTHDCHQLLIEETGVRKDLTDIPLTGEVLTWFTDGSSYVVEGKRMAGAAVVDGTRTIWASSLPEGTSAQKAELMALTQALRLAEGKSINIYTDSRYAFATAHVHGAIYKQRGLLTSAGREIKNKEEILSLLEALHLPKRLAIIHCPGHQKAKDPISRGNQMADRVAKQAAQGVNLLAGKRTADGSEFEKRTADGSEFESPKKKAKVE

SEQ ID NO: 108 - protein, 2090 aa, synthetic construct
MPAAKRVKLDGGDKKYSIGLDIGTNSVGWAVITDEYKVPSKKFKVLGNTDRHSIKKNLIGALLFDSGETAEATRLKRTARRRYTRRKNRICYLQEIFSNEMAKVDDSFFHRLEESFLVEEDKKHERHPIFGNIVDEVAYHEKYPTIYHLRKKLVDSTDKADLRLIYLALAHMIKFRGHFLIEGDLNPDNSDVDKLFIQLVQTYNQLFEENPINASGVDAKAILSARLSKSRRLENLIAQLPGEKKNGLFGNLIALSLGLTPNFKSNFDLAEDAKLQLSKDTYDDDLDNLLAQIGDQYADLFLAAKNLSDAILLSDILRVNTEITKAPLSASMIKRYDEHHQDLTLLKALVRQQLPEKYKEIFFDQSKNGYAGYIDGGASQEEFYKFIKPILEKMDGTEELLVKLNREDLLRKQRTFDNGSIPHQIHLGELHAILRRQEDFYPFLKDNREKIEKILTFRIPYYVGPLARGNSRFAWMTRKSEETITPWNFEEVVDKGASAQSFIERMTNFDKNLPNEKVLPKHSLLYEYFTVYNELTKVKYVTEGMRKPAFLSGEQKKAIVDLLFKTNRKVTVKQLKEDYFKKIECFDSVEISGVEDRFNASLGTYHDLLKIIKDKDFLDNEENEDILEDIVLTLTLFEDREMIEERLKTYAHLFDDKVMKQLKRRRYTGWGRLSRKLINGIRDKQSGKTILDFLKSDGFANRNFMQLIHDDSLTFKEDIQKAQVSGQGDSLHEHIANLAGSPAIKKGILQTVKVVDELVKVMGRHKPENIVIEMARENQTTQKGQKNSRERMKRIEEGIKELGSQILKEHPVENTQLQNEKLYLYYLQNGRDMYVDQELDINRLSDYDVDHIVPQSFLKDDSIDNKVLTRSDKARGKSDNVPSEEVVKKMKNYWRQLLNAKLITQRKFDNLTKAERGGLSELDKAGFIKRQLVETRQITKHVAQILDSRMNTKYDENDKLIREVKVITLKSKLVSDFRKDFQFYKVREINNYHHAHDAYLNAVVGTALIKKYPKLESEFVYGDYKVYDVRKMIAKSEQEIGKATAKYFFYSNIMNFFKTEITLANGEIRKRPLIETNGETGEIVWDKGRDFATVRKVLSMPQVNIVKKTEVQTGGFSKESILPKRNSDKLIARKKDWDPKKYGGFDSPTVAYSVLVVAKVEKGKSKKLKSVKELLGITIMERSSFEKNPIDFLEAKGYKEVKKDLIIKLPKYSLFELENGRKRMLASAGELQKGNELALPSKYVNFLYLASHYEKLKGSPEDNEQKQLFVEQHKHYLDEIIEQISEFSKRVILADANLDKVLSAYNKHRDKPIREQAENIIHLFTLTNLGAPAAFKYFDTTIDRKRYTSTKEVLDATLIHQSITGLYETRIDLSQLGGDGGGGGEAAAKPAPGGTLQLDDEYRLYSPLVKPDQNIQFWLEQFPQAWAETAGMGLAKQVPPQVIQLKASATPVSVRQYPLSKEAQEGIRPHVQRLIQQGILVPVQSPWNTPLLPVRKPGTNDYRPVQDLREVNKRVQDIHPTVPNPYNLLCALPPQRSWYTVLDLKDAFFCLRLHPTSQPLFAFEWRDPGTGRTGQLTWTRLPQGFKNSPTIFDEALHRDLANFRIQHPQVTLLQYVDDLLLAGATKQDCLEGTKALLLELSDLGYRASAKKAQICRREVTYLGYSLRDGQRWLTEARKKTVVQIPAPTTAKQVREFLGTAGFCRLWIPGFATLAAPLYPLTKEKGEFSWAPEHQKAFDAIKKALLSAPALALPDVTKPFTLYVDERKGVARGVLTQTLGPWRRPVAYLSKKLDPVASGWPVCLKAIAAVAILVKDADKLTLGQNITVIAPHALENIVRQPPDRWMTNARMTHYQSLLLTERVTFAPPAALNPATLLPEETDEPVTHDCHQLLIEETGVRKDLTDIPLTGEVLTWFTDGSSYVVEGKRMAGAAVVDGTRTIWASSLPEGTSAQKAELMALTQALRLAEGKSINIYTDSRYAFATAHVHGAIYKQRGLLTSAGREIKNKEEILSLLEALHLPKRLAIIHCPGHQKAKDPISRGNQMADRVAKQAAQGVNLLAGKRTADGSEFEKRTADGSEFESPKKKAKVE

SEQ ID NO: 109 - protein, 2085 aa, synthetic construct
MPAAKRVKLDGGDKKYSIGLDIGTNSVGWAVITDEYKVPSKKFKVLGNTDRHSIKKNLIGALLFDSGETAEATRLKRTARRRYTRRKNRICYLQEIFSNEMAKVDDSFFHRLEESFLVEEDKKHERHPIFGNIVDEVAYHEKYPTIYHLRKKLVDSTDKADLRLIYLALAHMIKFRGHFLIEGDLNPDNSDVDKLFIQLVQTYNQLFEENPINASGVDAKAILSARLSKSRRLENLIAQLPGEKKNGLFGNLIALSLGLTPNFKSNFDLAEDAKLQLSKDTYDDDLDNLLAQIGDQYADLFLAAKNLSDAILLSDILRVNTEITKAPLSASMIKRYDEHHQDLTLLKALVRQQLPEKYKEIFFDQSKNGYAGYIDGGASQEEFYKFIKPILEKMDGTEELLVKLNREDLLRKQRTFDNGSIPHQIHLGELHAILRRQEDFYPFLKDNREKIEKILTFRIPYYVGPLARGNSRFAWMTRKSEETITPWNFEEVVDKGASAQSFIERMTNFDKNLPNEKVLPKHSLLYEYFTVYNELTKVKYVTEGMRKPAFLSGEQKKAIVDLLFKTNRKVTVKQLKEDYFKKIECFDSVEISGVEDRFNASLGTYHDLLKIIKDKDFLDNEENEDILEDIVLTLTLFEDREMIEERLKTYAHLFDDKVMKQLKRRRYTGWGRLSRKLINGIRDKQSGKTILDFLKSDGFANRNFMQLIHDDSLTFKEDIQKAQVSGQGDSLHEHIANLAGSPAIKKGILQTVKVVDELVKVMGRHKPENIVIEMARENQTTQKGQKNSRERMKRIEEGIKELGSQILKEHPVENTQLQNEKLYLYYLQNGRDMYVDQELDINRLSDYDVDHIVPQSFLKDDSIDNKVLTRSDKARGKSDNVPSEEVVKKMKNYWRQLLNAKLITQRKFDNLTKAERGGLSELDKAGFIKRQLVETRQITKHVAQILDSRMNTKYDENDKLIREVKVITLKSKLVSDFRKDFQFYKVREINNYHHAHDAYLNAVVGTALIKKYPKLESEFVYGDYKVYDVRKMIAKSEQEIGKATAKYFFYSNIMNFFKTEITLANGEIRKRPLIETNGETGEIVWDKGRDFATVRKVLSMPQVNIVKKTEVQTGGFSKESILPKRNSDKLIARKKDWDPKKYGGFDSPTVAYSVLVVAKVEKGKSKKLKSVKELLGITIMERSSFEKNPIDFLEAKGYKEVKKDLIIKLPKYSLFELENGRKRMLASAGELQKGNELALPSKYVNFLYLASHYEKLKGSPEDNEQKQLFVEQHKHYLDEIIEQISEFSKRVILADANLDKVLSAYNKHRDKPIREQAENIIHLFTLTNLGAPAAFKYFDTTIDRKRYTSTKEVLDATLIHQSITGLYETRIDLSQLGGDGGGGSPAPGGTLQLDDEYRLYSPLVKPDQNIQFWLEQFPQAWAETAGMGLAKQVPPQVIQLKASATPVSVRQYPLSKEAQEGIRPHVQRLIQQGILVPVQSPWNTPLLPVRKPGTNDYRPVQDLREVNKRVQDIHPTVPNPYNLLCALPPQRSWYTVLDLKDAFFCLRLHPTSQPLFAFEWRDPGTGRTGQLTWTRLPQGFKNSPTIFDEALHRDLANFRIQHPQVTLLQYVDDLLLAGATKQDCLEGTKALLLELSDLGYRASAKKAQICRREVTYLGYSLRDGQRWLTEARKKTVVQIPAPTTAKQVREFLGTAGFCRLWIPGFATLAAPLYPLTKEKGEFSWAPEHQKAFDAIKKALLSAPALALPDVTKPFTLYVDERKGVARGVLTQTLGPWRRPVAYLSKKLDPVASGWPVCLKAIAAVAILVKDADKLTLGQNITVIAPHALENIVRQPPDRWMTNARMTHYQSLLLTERVTFAPPAALNPATLLPEETDEPVTHDCHQLLIEETGVRKDLTDIPLTGEVLTWFTDGSSYVVEGKRMAGAAVVDGTRTIWASSLPEGTSAQKAELMALTQALRLAEGKSINIYTDSRYAFATAHVHGAIYKQRGLLTSAGREIKNKEEILSLLEALHLPKRLAIIHCPGHQKAKDPISRGNQMADRVAKQAAQGVNLLAGKRTADGSEFEKRTADGSEFESPKKKAKVE

SEQ ID NO: 110 - protein, 2085 aa, synthetic construct
MPAAKRVKLDGGDKKYSIGLDIGTNSVGWAVITDEYKVPSKKFKVLGNTDRHSIKKNLIGALLFDSGETAEATRLKRTARRRYTRRKNRICYLQEIFSNEMAKVDDSFFHRLEESFLVEEDKKHERHPIFGNIVDEVAYHEKYPTIYHLRKKLVDSTDKADLRLIYLALAHMIKFRGHFLIEGDLNPDNSDVDKLFIQLVQTYNQLFEENPINASGVDAKAILSARLSKSRRLENLIAQLPGEKKNGLFGNLIALSLGLTPNFKSNFDLAEDAKLQLSKDTYDDDLDNLLAQIGDQYADLFLAAKNLSDAILLSDILRVNTEITKAPLSASMIKRYDEHHQDLTLLKALVRQQLPEKYKEIFFDQSKNGYAGYIDGGASQEEFYKFIKPILEKMDGTEELLVKLNREDLLRKQRTFDNGSIPHQIHLGELHAILRRQEDFYPFLKDNREKIEKILTFRIPYYVGPLARGNSRFAWMTRKSEETITPWNFEEVVDKGASAQSFIERMTNFDKNLPNEKVLPKHSLLYEYFTVYNELTKVKYVTEGMRKPAFLSGEQKKAIVDLLFKTNRKVTVKQLKEDYFKKIECFDSVEISGVEDRFNASLGTYHDLLKIIKDKDFLDNEENEDILEDIVLTLTLFEDREMIEERLKTYAHLFDDKVMKQLKRRRYTGWGRLSRKLINGIRDKQSGKTILDFLKSDGFANRNFMQLIHDDSLTFKEDIQKAQVSGQGDSLHEHIANLAGSPAIKKGILQTVKVVDELVKVMGRHKPENIVIEMARENQTTQKGQKNSRERMKRIEEGIKELGSQILKEHPVENTQLQNEKLYLYYLQNGRDMYVDQELDINRLSDYDVDHIVPQSFLKDDSIDNKVLTRSDKARGKSDNVPSEEVVKKMKNYWRQLLNAKLITQRKFDNLTKAERGGLSELDKAGFIKRQLVETRQITKHVAQILDSRMNTKYDENDKLIREVKVITLKSKLVSDFRKDFQFYKVREINNYHHAHDAYLNAVVGTALIKKYPKLESEFVYGDYKVYDVRKMIAKSEQEIGKATAKYFFYSNIMNFFKTEITLANGEIRKRPLIETNGETGEIVWDKGRDFATVRKVLSMPQVNIVKKTEVQTGGFSKESILPKRNSDKLIARKKDWDPKKYGGFDSPTVAYSVLVVAKVEKGKSKKLKSVKELLGITIMERSSFEKNPIDFLEAKGYKEVKKDLIIKLPKYSLFELENGRKRMLASAGELQKGNELALPSKYVNFLYLASHYEKLKGSPEDNEQKQLFVEQHKHYLDEIIEQISEFSKRVILADANLDKVLSAYNKHRDKPIREQAENIIHLFTLTNLGAPAAFKYFDTTIDRKRYTSTKEVLDATLIHQSITGLYETRIDLSQLGGDGGGSSGSSGGTLQLDDEYRLYSPLVKPDQNIQFWLEQFPQAWAETAGMGLAKQVPPQVIQLKASATPVSVRQYPLSKEAQEGIRPHVQRLIQQGILVPVQSPWNTPLLPVRKPGTNDYRPVQDLREVNKRVQDIHPTVPNPYNLLCALPPQRSWYTVLDLKDAFFCLRLHPTSQPLFAFEWRDPGTGRTGQLTWTRLPQGFKNSPTIFDEALHRDLANFRIQHPQVTLLQYVDDLLLAGATKQDCLEGTKALLLELSDLGYRASAKKAQICRREVTYLGYSLRDGQRWLTEARKKTVVQIPAPTTAKQVREFLGTAGFCRLWIPGFATLAAPLYPLTKEKGEFSWAPEHQKAFDAIKKALLSAPALALPDVTKPFTLYVDERKGVARGVLTQTLGPWRRPVAYLSKKLDPVASGWPVCLKAIAAVAILVKDADKLTLGQNITVIAPHALENIVRQPPDRWMTNARMTHYQSLLLTERVTFAPPAALNPATLLPEETDEPVTHDCHQLLIEETGVRKDLTDIPLTGEVLTWFTDGSSYVVEGKRMAGAAVVDGTRTIWASSLPEGTSAQKAELMALTQALRLAEGKSINIYTDSRYAFATAHVHGAIYKQRGLLTSAGREIKNKEEILSLLEALHLPKRLAIIHCPGHQKAKDPISRGNQMADRVAKQAAQGVNLLAGKRTADGSEFEKRTADGSEFESPKKKAKVE

SEQ ID NO: 111 - protein, 2091 aa, synthetic construct
MPAAKRVKLDGGDKKYSIGLDIGTNSVGWAVITDEYKVPSKKFKVLGNTDRHSIKKNLIGALLFDSGETAEATRLKRTARRRYTRRKNRICYLQEIFSNEMAKVDDSFFHRLEESFLVEEDKKHERHPIFGNIVDEVAYHEKYPTIYHLRKKLVDSTDKADLRLIYLALAHMIKFRGHFLIEGDLNPDNSDVDKLFIQLVQTYNQLFEENPINASGVDAKAILSARLSKSRRLENLIAQLPGEKKNGLFGNLIALSLGLTPNFKSNFDLAEDAKLQLSKDTYDDDLDNLLAQIGDQYADLFLAAKNLSDAILLSDILRVNTEITKAPLSASMIKRYDEHHQDLTLLKALVRQQLPEKYKEIFFDQSKNGYAGYIDGGASQEEFYKFIKPILEKMDGTEELLVKLNREDLLRKQRTFDNGSIPHQIHLGELHAILRRQEDFYPFLKDNREKIEKILTFRIPYYVGPLARGNSRFAWMTRKSEETITPWNFEEVVDKGASAQSFIERMTNFDKNLPNEKVLPKHSLLYEYFTVYNELTKVKYVTEGMRKPAFLSGEQKKAIVDLLFKTNRKVTVKQLKEDYFKKIECFDSVEISGVEDRFNASLGTYHDLLKIIKDKDFLDNEENEDILEDIVLTLTLFEDREMIEERLKTYAHLFDDKVMKQLKRRRYTGWGRLSRKLINGIRDKQSGKTILDFLKSDGFANRNFMQLIHDDSLTFKEDIQKAQVSGQGDSLHEHIANLAGSPAIKKGILQTVKVVDELVKVMGRHKPENIVIEMARENQTTQKGQKNSRERMKRIEEGIKELGSQILKEHPVENTQLQNEKLYLYYLQNGRDMYVDQELDINRLSDYDVDHIVPQSFLKDDSIDNKVLTRSDKARGKSDNVPSEEVVKKMKNYWRQLLNAKLITQRKFDNLTKAERGGLSELDKAGFIKRQLVETRQITKHVAQILDSRMNTKYDENDKLIREVKVITLKSKLVSDFRKDFQFYKVREINNYHHAHDAYLNAVVGTALIKKYPKLESEFVYGDYKVYDVRKMIAKSEQEIGKATAKYFFYSNIMNFFKTEITLANGEIRKRPLIETNGETGEIVWDKGRDFATVRKVLSMPQVNIVKKTEVQTGGFSKESILPKRNSDKLIARKKDWDPKKYGGFDSPTVAYSVLVVAKVEKGKSKKLKSVKELLGITIMERSSFEKNPIDFLEAKGYKEVKKDLIIKLPKYSLFELENGRKRMLASAGELQKGNELALPSKYVNFLYLASHYEKLKGSPEDNEQKQLFVEQHKHYLDEIIEQISEFSKRVILADANLDKVLSAYNKHRDKPIREQAENIIHLFTLTNLGAPAAFKYFDTTIDRKRYTSTKEVLDATLIHQSITGLYETRIDLSQLGGDGGGGSGGSGGSGGSGGTLQLDDEYRLYSPLVKPDQNIQFWLEQFPQAWAETAGMGLAKQVPPQVIQLKASATPVSVRQYPLSKEAQEGIRPHVQRLIQQGILVPVQSPWNTPLLPVRKPGTNDYRPVQDLREVNKRVQDIHPTVPNPYNLLCALPPQRSWYTVLDLKDAFFCLRLHPTSQPLFAFEWRDPGTGRTGQLTWTRLPQGFKNSPTIFDEALHRDLANFRIQHPQVTLLQYVDDLLLAGATKQDCLEGTKALLLELSDLGYRASAKKAQICRREVTYLGYSLRDGQRWLTEARKKTVVQIPAPTTAKQVREFLGTAGFCRLWIPGFATLAAPLYPLTKEKGEFSWAPEHQKAFDAIKKALLSAPALALPDVTKPFTLYVDERKGVARGVLTQTLGPWRRPVAYLSKKLDPVASGWPVCLKAIAAVAILVKDADKLTLGQNITVIAPHALENIVRQPPDRWMTNARMTHYQSLLLTERVTFAPPAALNPATLLPEETDEPVTHDCHQLLIEETGVRKDLTDIPLTGEVLTWFTDGSSYVVEGKRMAGAAVVDGTRTIWASSLPEGTSAQKAELMALTQALRLAEGKSINIYTDSRYAFATAHVHGAIYKQRGLLTSAGREIKNKEEILSLLEALHLPKRLAIIHCPGHQKAKDPISRGNQMADRVAKQAAQGVNLLAGKRTADGSEFEKRTADGSEFESPKKKAKVE

SEQ ID NO: 112 - protein, 2090 aa, synthetic construct
MPAAKRVKLDGGDKKYSIGLDIGTNSVGWAVITDEYKVPSKKFKVLGNTDRHSIKKNLIGALLFDSGETAEATRLKRTARRRYTRRKNRICYLQEIFSNEMAKVDDSFFHRLEESFLVEEDKKHERHPIFGNIVDEVAYHEKYPTIYHLRKKLVDSTDKADLRLIYLALAHMIKFRGHFLIEGDLNPDNSDVDKLFIQLVQTYNQLFEENPINASGVDAKAILSARLSKSRRLENLIAQLPGEKKNGLFGNLIALSLGLTPNFKSNFDLAEDAKLQLSKDTYDDDLDNLLAQIGDQYADLFLAAKNLSDAILLSDILRVNTEITKAPLSASMIKRYDEHHQDLTLLKALVRQQLPEKYKEIFFDQSKNGYAGYIDGGASQEEFYKFIKPILEKMDGTEELLVKLNREDLLRKQRTFDNGSIPHQIHLGELHAILRRQEDFYPFLKDNREKIEKILTFRIPYYVGPLARGNSRFAWMTRKSEETITPWNFEEVVDKGASAQSFIERMTNFDKNLPNEKVLPKHSLLYEYFTVYNELTKVKYVTEGMRKPAFLSGEQKKAIVDLLFKTNRKVTVKQLKEDYFKKIECFDSVEISGVEDRFNASLGTYHDLLKIIKDKDFLDNEENEDILEDIVLTLTLFEDREMIEERLKTYAHLFDDKVMKQLKRRRYTGWGRLSRKLINGIRDKQSGKTILDFLKSDGFANRNFMQLIHDDSLTFKEDIQKAQVSGQGDSLHEHIANLAGSPAIKKGILQTVKVVDELVKVMGRHKPENIVIEMARENQTTQKGQKNSRERMKRIEEGIKELGSQILKEHPVENTQLQNEKLYLYYLQNGRDMYVDQELDINRLSDYDVDHIVPQSFLKDDSIDNKVLTRSDKARGKSDNVPSEEVVKKMKNYWRQLLNAKLITQRKFDNLTKAERGGLSELDKAGFIKRQLVETRQITKHVAQILDSRMNTKYDENDKLIREVKVITLKSKLVSDFRKDFQFYKVREINNYHHAHDAYLNAVVGTALIKKYPKLESEFVYGDYKVYDVRKMIAKSEQEIGKATAKYFFYSNIMNFFKTEITLANGEIRKRPLIETNGETGEIVWDKGRDFATVRKVLSMPQVNIVKKTEVQTGGFSKESILPKRNSDKLIARKKDWDPKKYGGFDSPTVAYSVLVVAKVEKGKSKKLKSVKELLGITIMERSSFEKNPIDFLEAKGYKEVKKDLIIKLPKYSLFELENGRKRMLASAGELQKGNELALPSKYVNFLYLASHYEKLKGSPEDNEQKQLFVEQHKHYLDEIIEQISEFSKRVILADANLDKVLSAYNKHRDKPIREQAENIIHLFTLTNLGAPAAFKYFDTTIDRKRYTSTKEVLDATLIHQSITGLYETRIDLSQLGGDGGEAAAKGGGPAPGGTLQLDDEYRLYSPLVKPDQNIQFWLEQFPQAWAETAGMGLAKQVPPQVIQLKASATPVSVRQYPLSKEAQEGIRPHVQRLIQQGILVPVQSPWNTPLLPVRKPGTNDYRPVQDLREVNKRVQDIHPTVPNPYNLLCALPPQRSWYTVLDLKDAFFCLRLHPTSQPLFAFEWRDPGTGRTGQLTWTRLPQGFKNSPTIFDEALHRDLANFRIQHPQVTLLQYVDDLLLAGATKQDCLEGTKALLLELSDLGYRASAKKAQICRREVTYLGYSLRDGQRWLTEARKKTVVQIPAPTTAKQVREFLGTAGFCRLWIPGFATLAAPLYPLTKEKGEFSWAPEHQKAFDAIKKALLSAPALALPDVTKPFTLYVDERKGVARGVLTQTLGPWRRPVAYLSKKLDPVASGWPVCLKAIAAVAILVKDADKLTLGQNITVIAPHALENIVRQPPDRWMTNARMTHYQSLLLTERVTFAPPAALNPATLLPEETDEPVTHDCHQLLIEETGVRKDLTDIPLTGEVLTWFTDGSSYVVEGKRMAGAAVVDGTRTIWASSLPEGTSAQKAELMALTQALRLAEGKSINIYTDSRYAFATAHVHGAIYKQRGLLTSAGREIKNKEEILSLLEALHLPKRLAIIHCPGHQKAKDPISRGNQMADRVAKQAAQGVNLLAGKRTADGSEFEKRTADGSEFESPKKKAKVE

SEQ ID NO: 113 - protein, 2097 aa, synthetic construct
MPAAKRVKLDGGDKKYSIGLDIGTNSVGWAVITDEYKVPSKKFKVLGNTDRHSIKKNLIGALLFDSGETAEATRLKRTARRRYTRRKNRICYLQEIFSNEMAKVDDSFFHRLEESFLVEEDKKHERHPIFGNIVDEVAYHEKYPTIYHLRKKLVDSTDKADLRLIYLALAHMIKFRGHFLIEGDLNPDNSDVDKLFIQLVQTYNQLFEENPINASGVDAKAILSARLSKSRRLENLIAQLPGEKKNGLFGNLIALSLGLTPNFKSNFDLAEDAKLQLSKDTYDDDLDNLLAQIGDQYADLFLAAKNLSDAILLSDILRVNTEITKAPLSASMIKRYDEHHQDLTLLKALVRQQLPEKYKEIFFDQSKNGYAGYIDGGASQEEFYKFIKPILEKMDGTEELLVKLNREDLLRKQRTFDNGSIPHQIHLGELHAILRRQEDFYPFLKDNREKIEKILTFRIPYYVGPLARGNSRFAWMTRKSEETITPWNFEEVVDKGASAQSFIERMTNFDKNLPNEKVLPKHSLLYEYFTVYNELTKVKYVTEGMRKPAFLSGEQKKAIVDLLFKTNRKVTVKQLKEDYFKKIECFDSVEISGVEDRFNASLGTYHDLLKIIKDKDFLDNEENEDILEDIVLTLTLFEDREMIEERLKTYAHLFDDKVMKQLKRRRYTGWGRLSRKLINGIRDKQSGKTILDFLKSDGFANRNFMQLIHDDSLTFKEDIQKAQVSGQGDSLHEHIANLAGSPAIKKGILQTVKVVDELVKVMGRHKPENIVIEMARENQTTQKGQKNSRERMKRIEEGIKELGSQILKEHPVENTQLQNEKLYLYYLQNGRDMYVDQELDINRLSDYDVDHIVPQSFLKDDSIDNKVLTRSDKARGKSDNVPSEEVVKKMKNYWRQLLNAKLITQRKFDNLTKAERGGLSELDKAGFIKRQLVETRQITKHVAQILDSRMNTKYDENDKLIREVKVITLKSKLVSDFRKDFQFYKVREINNYHHAHDAYLNAVVGTALIKKYPKLESEFVYGDYKVYDVRKMIAKSEQEIGKATAKYFFYSNIMNFFKTEITLANGEIRKRPLIETNGETGEIVWDKGRDFATVRKVLSMPQVNIVKKTEVQTGGFSKESILPKRNSDKLIARKKDWDPKKYGGFDSPTVAYSVLVVAKVEKGKSKKLKSVKELLGITIMERSSFEKNPIDFLEAKGYKEVKKDLIIKLPKYSLFELENGRKRMLASAGELQKGNELALPSKYVNFLYLASHYEKLKGSPEDNEQKQLFVEQHKHYLDEIIEQISEFSKRVILADANLDKVLSAYNKHRDKPIREQAENIIHLFTLTNLGAPAAFKYFDTTIDRKRYTSTKEVLDATLIHQSITGLYETRIDLSQLGGDGGGSSGSSGSSGSSGSSGSSGGTLQLDDEYRLYSPLVKPDQNIQFWLEQFPQAWAETAGMGLAKQVPPQVIQLKASATPVSVRQYPLSKEAQEGIRPHVQRLIQQGILVPVQSPWNTPLLPVRKPGTNDYRPVQDLREVNKRVQDIHPTVPNPYNLLCALPPQRSWYTVLDLKDAFFCLRLHPTSQPLFAFEWRDPGTGRTGQLTWTRLPQGFKNSPTIFNEALHRDLANFRIQHPQVTLLQYVDDLLLAGATKQDCLEGTKALLLELSDLGYRASAKKAQICRREVTYLGYSLRDGQRWLTEARKKTVVQIPAPTTAKQVREFLGTAGFCRLWIPGFATLAAPLYPLTKPKGEFSWAPEHQKAFDAIKKALLSAPALALPDVTKPFTLYVDERKGVARGVLTQTLGPWRRPVAYLSKKLDPVASGWPVCLKAIAAVAILVKDADKLTLGQNITVIAPHALENIVRQPPDRWMTNARMTHYQSLLLTERVTFAPPAALNPATLLPEETDEPVTHDCHQLLIEETGVRKDLTDIPLTGEVLTWFTDGSSYVVEGKRMAGAAVVDGTRTIWASSLPEGTSAQKAELMALTQALRLAEGKSINIYTDSRYAFATAHVHGAIYKQRGWLTSAGREIKNKEEILSLLEALHLPKRLAIIHCPGHQKAKDPISRGNQMADRVAKQAAQGVNLLAGKRTADGSEFEKRTADGSEFESPKKKAKVE

SEQ ID NO: 114 - protein, 2087 aa, synthetic construct
MPAAKRVKLDGGDKKYSIGLDIGTNSVGWAVITDEYKVPSKKFKVLGNTDRHSIKKNLIGALLFDSGETAEATRLKRTARRRYTRRKNRICYLQEIFSNEMAKVDDSFFHRLEESFLVEEDKKHERHPIFGNIVDEVAYHEKYPTIYHLRKKLVDSTDKADLRLIYLALAHMIKFRGHFLIEGDLNPDNSDVDKLFIQLVQTYNQLFEENPINASGVDAKAILSARLSKSRRLENLIAQLPGEKKNGLFGNLIALSLGLTPNFKSNFDLAEDAKLQLSKDTYDDDLDNLLAQIGDQYADLFLAAKNLSDAILLSDILRVNTEITKAPLSASMIKRYDEHHQDLTLLKALVRQQLPEKYKEIFFDQSKNGYAGYIDGGASQEEFYKFIKPILEKMDGTEELLVKLNREDLLRKQRTFDNGSIPHQIHLGELHAILRRQEDFYPFLKDNREKIEKILTFRIPYYVGPLARGNSRFAWMTRKSEETITPWNFEEVVDKGASAQSFIERMTNFDKNLPNEKVLPKHSLLYEYFTVYNELTKVKYVTEGMRKPAFLSGEQKKAIVDLLFKTNRKVTVKQLKEDYFKKIECFDSVEISGVEDRFNASLGTYHDLLKIIKDKDFLDNEENEDILEDIVLTLTLFEDREMIEERLKTYAHLFDDKVMKQLKRRRYTGWGRLSRKLINGIRDKQSGKTILDFLKSDGFANRNFMQLIHDDSLTFKEDIQKAQVSGQGDSLHEHIANLAGSPAIKKGILQTVKVVDELVKVMGRHKPENIVIEMARENQTTQKGQKNSRERMKRIEEGIKELGSQILKEHPVENTQLQNEKLYLYYLQNGRDMYVDQELDINRLSDYDVDHIVPQSFLKDDSIDNKVLTRSDKARGKSDNVPSEEVVKKMKNYWRQLLNAKLITQRKFDNLTKAERGGLSELDKAGFIKRQLVETRQITKHVAQILDSRMNTKYDENDKLIREVKVITLKSKLVSDFRKDFQFYKVREINNYHHAHDAYLNAVVGTALIKKYPKLESEFVYGDYKVYDVRKMIAKSEQEIGKATAKYFFYSNIMNFFKTEITLANGEIRKRPLIETNGETGEIVWDKGRDFATVRKVLSMPQVNIVKKTEVQTGGFSKESILPKRNSDKLIARKKDWDPKKYGGFDSPTVAYSVLVVAKVEKGKSKKLKSVKELLGITIMERSSFEKNPIDFLEAKGYKEVKKDLIIKLPKYSLFELENGRKRMLASAGELQKGNELALPSKYVNFLYLASHYEKLKGSPEDNEQKQLFVEQHKHYLDEIIEQISEFSKRVILADANLDKVLSAYNKHRDKPIREQAENIIHLFTLTNLGAPAAFKYFDTTIDRKRYTSTKEVLDATLIHQSITGLYETRIDLSQLGGDGGGGGGGGGGGGTLQLDDEYRLYSPLVKPDQNIQFWLEQFPQAWAETAGMGLAKQVPPQVIQLKASATPVSVRQYPLSKEAQEGIRPHVQRLIQQGILVPVQSPWNTPLLPVRKPGTNDYRPVQDLREVNKRVQDIHPTVPNPYNLLCALPPQRSWYTVLDLKDAFFCLRLHPTSQPLFAFEWRDPGTGRTGQLTWTRLPQGFKNSPTIFNEALHRDLANFRIQHPQVTLLQYVDDLLLAGATKQDCLEGTKALLLELSDLGYRASAKKAQICRREVTYLGYSLRDGQRWLTEARKKTVVQIPAPTTAKQVREFLGTAGFCRLWIPGFATLAAPLYPLTKPKGEFSWAPEHQKAFDAIKKALLSAPALALPDVTKPFTLYVDERKGVARGVLTQTLGPWRRPVAYLSKKLDPVASGWPVCLKAIAAVAILVKDADKLTLGQNITVIAPHALENIVRQPPDRWMTNARMTHYQSLLLTERVTFAPPAALNPATLLPEETDEPVTHDCHQLLIEETGVRKDLTDIPLTGEVLTWFTDGSSYVVEGKRMAGAAVVDGTRTIWASSLPEGTSAQKAELMALTQALRLAEGKSINIYTDSRYAFATAHVHGAIYKQRGWLTSAGREIKNKEEILSLLEALHLPKRLAIIHCPGHQKAKDPISRGNQMADRVAKQAAQGVNLLAGKRTADGSEFEKRTADGSEFESPKKKAKVE

SEQ ID NO: 115 - protein, 2090 aa, synthetic construct
MPAAKRVKLDGGDKKYSIGLDIGTNSVGWAVITDEYKVPSKKFKVLGNTDRHSIKKNLIGALLFDSGETAEATRLKRTARRRYTRRKNRICYLQEIFSNEMAKVDDSFFHRLEESFLVEEDKKHERHPIFGNIVDEVAYHEKYPTIYHLRKKLVDSTDKADLRLIYLALAHMIKFRGHFLIEGDLNPDNSDVDKLFIQLVQTYNQLFEENPINASGVDAKAILSARLSKSRRLENLIAQLPGEKKNGLFGNLIALSLGLTPNFKSNFDLAEDAKLQLSKDTYDDDLDNLLAQIGDQYADLFLAAKNLSDAILLSDILRVNTEITKAPLSASMIKRYDEHHQDLTLLKALVRQQLPEKYKEIFFDQSKNGYAGYIDGGASQEEFYKFIKPILEKMDGTEELLVKLNREDLLRKQRTFDNGSIPHQIHLGELHAILRRQEDFYPFLKDNREKIEKILTFRIPYYVGPLARGNSRFAWMTRKSEETITPWNFEEVVDKGASAQSFIERMTNFDKNLPNEKVLPKHSLLYEYFTVYNELTKVKYVTEGMRKPAFLSGEQKKAIVDLLFKTNRKVTVKQLKEDYFKKIECFDSVEISGVEDRFNASLGTYHDLLKIIKDKDFLDNEENEDILEDIVLTLTLFEDREMIEERLKTYAHLFDDKVMKQLKRRRYTGWGRLSRKLINGIRDKQSGKTILDFLKSDGFANRNFMQLIHDDSLTFKEDIQKAQVSGQGDSLHEHIANLAGSPAIKKGILQTVKVVDELVKVMGRHKPENIVIEMARENQTTQKGQKNSRERMKRIEEGIKELGSQILKEHPVENTQLQNEKLYLYYLQNGRDMYVDQELDINRLSDYDVDHIVPQSFLKDDSIDNKVLTRSDKARGKSDNVPSEEVVKKMKNYWRQLLNAKLITQRKFDNLTKAERGGLSELDKAGFIKRQLVETRQITKHVAQILDSRMNTKYDENDKLIREVKVITLKSKLVSDFRKDFQFYKVREINNYHHAHDAYLNAVVGTALIKKYPKLESEFVYGDYKVYDVRKMIAKSEQEIGKATAKYFFYSNIMNFFKTEITLANGEIRKRPLIETNGETGEIVWDKGRDFATVRKVLSMPQVNIVKKTEVQTGGFSKESILPKRNSDKLIARKKDWDPKKYGGFDSPTVAYSVLVVAKVEKGKSKKLKSVKELLGITIMERSSFEKNPIDFLEAKGYKEVKKDLIIKLPKYSLFELENGRKRMLASAGELQKGNELALPSKYVNFLYLASHYEKLKGSPEDNEQKQLFVEQHKHYLDEIIEQISEFSKRVILADANLDKVLSAYNKHRDKPIREQAENIIHLFTLTNLGAPAAFKYFDTTIDRKRYTSTKEVLDATLIHQSITGLYETRIDLSQLGGDGGPAPAPAPAPAPGGTLQLDDEYRLYSPLVKPDQNIQFWLEQFPQAWAETAGMGLAKQVPPQVIQLKASATPVSVRQYPLSKEAQEGIRPHVQRLIQQGILVPVQSPWNTPLLPVRKPGTNDYRPVQDLREVNKRVQDIHPTVPNPYNLLCALPPQRSWYTVLDLKDAFFCLRLHPTSQPLFAFEWRDPGTGRTGQLTWTRLPQGFKNSPTIFNEALHRDLANFRIQHPQVTLLQYVDDLLLAGATKQDCLEGTKALLLELSDLGYRASAKKAQICRREVTYLGYSLRDGQRWLTEARKKTVVQIPAPTTAKQVREFLGTAGFCRLWIPGFATLAAPLYPLTKPKGEFSWAPEHQKAFDAIKKALLSAPALALPDVTKPFTLYVDERKGVARGVLTQTLGPWRRPVAYLSKKLDPVASGWPVCLKAIAAVAILVKDADKLTLGQNITVIAPHALENIVRQPPDRWMTNARMTHYQSLLLTERVTFAPPAALNPATLLPEETDEPVTHDCHQLLIEETGVRKDLTDIPLTGEVLTWFTDGSSYVVEGKRMAGAAVVDGTRTIWASSLPEGTSAQKAELMALTQALRLAEGKSINIYTDSRYAFATAHVHGAIYKQRGWLTSAGREIKNKEEILSLLEALHLPKRLAIIHCPGHQKAKDPISRGNQMADRVAKQAAQGVNLLAGKRTADGSEFEKRTADGSEFESPKKKAKVE

SEQ ID NO: 116 - protein, 2090 aa, synthetic construct
MPAAKRVKLDGGDKKYSIGLDIGTNSVGWAVITDEYKVPSKKFKVLGNTDRHSIKKNLIGALLFDSGETAEATRLKRTARRRYTRRKNRICYLQEIFSNEMAKVDDSFFHRLEESFLVEEDKKHERHPIFGNIVDEVAYHEKYPTIYHLRKKLVDSTDKADLRLIYLALAHMIKFRGHFLIEGDLNPDNSDVDKLFIQLVQTYNQLFEENPINASGVDAKAILSARLSKSRRLENLIAQLPGEKKNGLFGNLIALSLGLTPNFKSNFDLAEDAKLQLSKDTYDDDLDNLLAQIGDQYADLFLAAKNLSDAILLSDILRVNTEITKAPLSASMIKRYDEHHQDLTLLKALVRQQLPEKYKEIFFDQSKNGYAGYIDGGASQEEFYKFIKPILEKMDGTEELLVKLNREDLLRKQRTFDNGSIPHQIHLGELHAILRRQEDFYPFLKDNREKIEKILTFRIPYYVGPLARGNSRFAWMTRKSEETITPWNFEEVVDKGASAQSFIERMTNFDKNLPNEKVLPKHSLLYEYFTVYNELTKVKYVTEGMRKPAFLSGEQKKAIVDLLFKTNRKVTVKQLKEDYFKKIECFDSVEISGVEDRFNASLGTYHDLLKIIKDKDFLDNEENEDILEDIVLTLTLFEDREMIEERLKTYAHLFDDKVMKQLKRRRYTGWGRLSRKLINGIRDKQSGKTILDFLKSDGFANRNFMQLIHDDSLTFKEDIQKAQVSGQGDSLHEHIANLAGSPAIKKGILQTVKVVDELVKVMGRHKPENIVIEMARENQTTQKGQKNSRERMKRIEEGIKELGSQILKEHPVENTQLQNEKLYLYYLQNGRDMYVDQELDINRLSDYDVDHIVPQSFLKDDSIDNKVLTRSDKARGKSDNVPSEEVVKKMKNYWRQLLNAKLITQRKFDNLTKAERGGLSELDKAGFIKRQLVETRQITKHVAQILDSRMNTKYDENDKLIREVKVITLKSKLVSDFRKDFQFYKVREINNYHHAHDAYLNAVVGTALIKKYPKLESEFVYGDYKVYDVRKMIAKSEQEIGKATAKYFFYSNIMNFFKTEITLANGEIRKRPLIETNGETGEIVWDKGRDFATVRKVLSMPQVNIVKKTEVQTGGFSKESILPKRNSDKLIARKKDWDPKKYGGFDSPTVAYSVLVVAKVEKGKSKKLKSVKELLGITIMERSSFEKNPIDFLEAKGYKEVKKDLIIKLPKYSLFELENGRKRMLASAGELQKGNELALPSKYVNFLYLASHYEKLKGSPEDNEQKQLFVEQHKHYLDEIIEQISEFSKRVILADANLDKVLSAYNKHRDKPIREQAENIIHLFTLTNLGAPAAFKYFDTTIDRKRYTSTKEVLDATLIHQSITGLYETRIDLSQLGGDGGGSSEAAAKPAPGGTLQLDDEYRLYSPLVKPDQNIQFWLEQFPQAWAETAGMGLAKQVPPQVIQLKASATPVSVRQYPLSKEAQEGIRPHVQRLIQQGILVPVQSPWNTPLLPVRKPGTNDYRPVQDLREVNKRVQDIHPTVPNPYNLLCALPPQRSWYTVLDLKDAFFCLRLHPTSQPLFAFEWRDPGTGRTGQLTWTRLPQGFKNSPTIFNEALHRDLANFRIQHPQVTLLQYVDDLLLAGATKQDCLEGTKALLLELSDLGYRASAKKAQICRREVTYLGYSLRDGQRWLTEARKKTVVQIPAPTTAKQVREFLGTAGFCRLWIPGFATLAAPLYPLTKPKGEFSWAPEHQKAFDAIKKALLSAPALALPDVTKPFTLYVDERKGVARGVLTQTLGPWRRPVAYLSKKLDPVASGWPVCLKAIAAVAILVKDADKLTLGQNITVIAPHALENIVRQPPDRWMTNARMTHYQSLLLTERVTFAPPAALNPATLLPEETDEPVTHDCHQLLIEETGVRKDLTDIPLTGEVLTWFTDGSSYVVEGKRMAGAAVVDGTRTIWASSLPEGTSAQKAELMALTQALRLAEGKSINIYTDSRYAFATAHVHGAIYKQRGWLTSAGREIKNKEEILSLLEALHLPKRLAIIHCPGHQKAKDPISRGNQMADRVAKQAAQGVNLLAGKRTADGSEFEKRTADGSEFESPKKKAKVE

SEQ ID NO: 117 - protein, 2109 aa, synthetic construct
MPAAKRVKLDGGDKKYSIGLDIGTNSVGWAVITDEYKVPSKKFKVLGNTDRHSIKKNLIGALLFDSGETAEATRLKRTARRRYTRRKNRICYLQEIFSNEMAKVDDSFFHRLEESFLVEEDKKHERHPIFGNIVDEVAYHEKYPTIYHLRKKLVDSTDKADLRLIYLALAHMIKFRGHFLIEGDLNPDNSDVDKLFIQLVQTYNQLFEENPINASGVDAKAILSARLSKSRRLENLIAQLPGEKKNGLFGNLIALSLGLTPNFKSNFDLAEDAKLQLSKDTYDDDLDNLLAQIGDQYADLFLAAKNLSDAILLSDILRVNTEITKAPLSASMIKRYDEHHQDLTLLKALVRQQLPEKYKEIFFDQSKNGYAGYIDGGASQEEFYKFIKPILEKMDGTEELLVKLNREDLLRKQRTFDNGSIPHQIHLGELHAILRRQEDFYPFLKDNREKIEKILTFRIPYYVGPLARGNSRFAWMTRKSEETITPWNFEEVVDKGASAQSFIERMTNFDKNLPNEKVLPKHSLLYEYFTVYNELTKVKYVTEGMRKPAFLSGEQKKAIVDLLFKTNRKVTVKQLKEDYFKKIECFDSVEISGVEDRFNASLGTYHDLLKIIKDKDFLDNEENEDILEDIVLTLTLFEDREMIEERLKTYAHLFDDKVMKQLKRRRYTGWGRLSRKLINGIRDKQSGKTILDFLKSDGFANRNFMQLIHDDSLTFKEDIQKAQVSGQGDSLHEHIANLAGSPAIKKGILQTVKVVDELVKVMGRHKPENIVIEMARENQTTQKGQKNSRERMKRIEEGIKELGSQILKEHPVENTQLQNEKLYLYYLQNGRDMYVDQELDINRLSDYDVDHIVPQSFLKDDSIDNKVLTRSDKARGKSDNVPSEEVVKKMKNYWRQLLNAKLITQRKFDNLTKAERGGLSELDKAGFIKRQLVETRQITKHVAQILDSRMNTKYDENDKLIREVKVITLKSKLVSDFRKDFQFYKVREINNYHHAHDAYLNAVVGTALIKKYPKLESEFVYGDYKVYDVRKMIAKSEQEIGKATAKYFFYSNIMNFFKTEITLANGEIRKRPLIETNGETGEIVWDKGRDFATVRKVLSMPQVNIVKKTEVQTGGFSKESILPKRNSDKLIARKKDWDPKKYGGFDSPTVAYSVLVVAKVEKGKSKKLKSVKELLGITIMERSSFEKNPIDFLEAKGYKEVKKDLIIKLPKYSLFELENGRKRMLASAGELQKGNELALPSKYVNFLYLASHYEKLKGSPEDNEQKQLFVEQHKHYLDEIIEQISEFSKRVILADANLDKVLSAYNKHRDKPIREQAENIIHLFTLTNLGAPAAFKYFDTTIDRKRYTSTKEVLDATLIHQSITGLYETRIDLSQLGGDGGEAAAKEAAAKEAAAKEAAAKEAAAKEAAAKGGTLQLDDEYRLYSPLVKPDQNIQFWLEQFPQAWAETAGMGLAKQVPPQVIQLKASATPVSVRQYPLSKEAQEGIRPHVQRLIQQGILVPVQSPWNTPLLPVRKPGTNDYRPVQDLREVNKRVQDIHPTVPNPYNLLCALPPQRSWYTVLDLKDAFFCLRLHPTSQPLFAFEWRDPGTGRTGQLTWTRLPQGFKNSPTIFNEALHRDLANFRIQHPQVTLLQYVDDLLLAGATKQDCLEGTKALLLELSDLGYRASAKKAQICRREVTYLGYSLRDGQRWLTEARKKTVVQIPAPTTAKQVREFLGTAGFCRLWIPGFATLAAPLYPLTKPKGEFSWAPEHQKAFDAIKKALLSAPALALPDVTKPFTLYVDERKGVARGVLTQTLGPWRRPVAYLSKKLDPVASGWPVCLKAIAAVAILVKDADKLTLGQNITVIAPHALENIVRQPPDRWMTNARMTHYQSLLLTERVTFAPPAALNPATLLPEETDEPVTHDCHQLLIEETGVRKDLTDIPLTGEVLTWFTDGSSYVVEGKRMAGAAVVDGTRTIWASSLPEGTSAQKAELMALTQALRLAEGKSINIYTDSRYAFATAHVHGAIYKQRGWLTSAGREIKNKEEILSLLEALHLPKRLAIIHCPGHQKAKDPISRGNQMADRVAKQAAQGVNLLAGKRTADGSEFEKRTADGSEFESPKKKAKVE

SEQ ID NO: 118 - protein, 2094 aa, synthetic construct
MPAAKRVKLDGGDKKYSIGLDIGTNSVGWAVITDEYKVPSKKFKVLGNTDRHSIKKNLIGALLFDSGETAEATRLKRTARRRYTRRKNRICYLQEIFSNEMAKVDDSFFHRLEESFLVEEDKKHERHPIFGNIVDEVAYHEKYPTIYHLRKKLVDSTDKADLRLIYLALAHMIKFRGHFLIEGDLNPDNSDVDKLFIQLVQTYNQLFEENPINASGVDAKAILSARLSKSRRLENLIAQLPGEKKNGLFGNLIALSLGLTPNFKSNFDLAEDAKLQLSKDTYDDDLDNLLAQIGDQYADLFLAAKNLSDAILLSDILRVNTEITKAPLSASMIKRYDEHHQDLTLLKALVRQQLPEKYKEIFFDQSKNGYAGYIDGGASQEEFYKFIKPILEKMDGTEELLVKLNREDLLRKQRTFDNGSIPHQIHLGELHAILRRQEDFYPFLKDNREKIEKILTFRIPYYVGPLARGNSRFAWMTRKSEETITPWNFEEVVDKGASAQSFIERMTNFDKNLPNEKVLPKHSLLYEYFTVYNELTKVKYVTEGMRKPAFLSGEQKKAIVDLLFKTNRKVTVKQLKEDYFKKIECFDSVEISGVEDRFNASLGTYHDLLKIIKDKDFLDNEENEDILEDIVLTLTLFEDREMIEERLKTYAHLFDDKVMKQLKRRRYTGWGRLSRKLINGIRDKQSGKTILDFLKSDGFANRNFMQLIHDDSLTFKEDIQKAQVSGQGDSLHEHIANLAGSPAIKKGILQTVKVVDELVKVMGRHKPENIVIEMARENQTTQKGQKNSRERMKRIEEGIKELGSQILKEHPVENTQLQNEKLYLYYLQNGRDMYVDQELDINRLSDYDVDHIVPQSFLKDDSIDNKVLTRSDKARGKSDNVPSEEVVKKMKNYWRQLLNAKLITQRKFDNLTKAERGGLSELDKAGFIKRQLVETRQITKHVAQILDSRMNTKYDENDKLIREVKVITLKSKLVSDFRKDFQFYKVREINNYHHAHDAYLNAVVGTALIKKYPKLESEFVYGDYKVYDVRKMIAKSEQEIGKATAKYFFYSNIMNFFKTEITLANGEIRKRPLIETNGETGEIVWDKGRDFATVRKVLSMPQVNIVKKTEVQTGGFSKESILPKRNSDKLIARKKDWDPKKYGGFDSPTVAYSVLVVAKVEKGKSKKLKSVKELLGITIMERSSFEKNPIDFLEAKGYKEVKKDLIIKLPKYSLFELENGRKRMLASAGELQKGNELALPSKYVNFLYLASHYEKLKGSPEDNEQKQLFVEQHKHYLDEIIEQISEFSKRVILADANLDKVLSAYNKHRDKPIREQAENIIHLFTLTNLGAPAAFKYFDTTIDRKRYTSTKEVLDATLIHQSITGLYETRIDLSQLGGDGGGSSGSSGSSGSSGSSGGTLQLDDEYRLYSPLVKPDQNIQFWLEQFPQAWAETAGMGLAKQVPPQVIQLKASATPVSVRQYPLSKEAQEGIRPHVQRLIQQGILVPVQSPWNTPLLPVRKPGTNDYRPVQDLREVNKRVQDIHPTVPNPYNLLCALPPQRSWYTVLDLKDAFFCLRLHPTSQPLFAFEWRDPGTGRTGQLTWTRLPQGFKNSPTIFNEALHRDLANFRIQHPQVTLLQYVDDLLLAGATKQDCLEGTKALLLELSDLGYRASAKKAQICRREVTYLGYSLRDGQRWLTEARKKTVVQIPAPTTAKQVREFLGTAGFCRLWIPGFATLAAPLYPLTKPKGEFSWAPEHQKAFDAIKKALLSAPALALPDVTKPFTLYVDERKGVARGVLTQTLGPWRRPVAYLSKKLDPVASGWPVCLKAIAAVAILVKDADKLTLGQNITVIAPHALENIVRQPPDRWMTNARMTHYQSLLLTERVTFAPPAALNPATLLPEETDEPVTHDCHQLLIEETGVRKDLTDIPLTGEVLTWFTDGSSYVVEGKRMAGAAVVDGTRTIWASSLPEGTSAQKAELMALTQALRLAEGKSINIYTDSRYAFATAHVHGAIYKQRGWLTSAGREIKNKEEILSLLEALHLPKRLAIIHCPGHQKAKDPISRGNQMADRVAKQAAQGVNLLAGKRTADGSEFEKRTADGSEFESPKKKAKVE

SEQ ID NO: 119 - protein, 2090 aa, synthetic construct
MPAAKRVKLDGGDKKYSIGLDIGTNSVGWAVITDEYKVPSKKFKVLGNTDRHSIKKNLIGALLFDSGETAEATRLKRTARRRYTRRKNRICYLQEIFSNEMAKVDDSFFHRLEESFLVEEDKKHERHPIFGNIVDEVAYHEKYPTIYHLRKKLVDSTDKADLRLIYLALAHMIKFRGHFLIEGDLNPDNSDVDKLFIQLVQTYNQLFEENPINASGVDAKAILSARLSKSRRLENLIAQLPGEKKNGLFGNLIALSLGLTPNFKSNFDLAEDAKLQLSKDTYDDDLDNLLAQIGDQYADLFLAAKNLSDAILLSDILRVNTEITKAPLSASMIKRYDEHHQDLTLLKALVRQQLPEKYKEIFFDQSKNGYAGYIDGGASQEEFYKFIKPILEKMDGTEELLVKLNREDLLRKQRTFDNGSIPHQIHLGELHAILRRQEDFYPFLKDNREKIEKILTFRIPYYVGPLARGNSRFAWMTRKSEETITPWNFEEVVDKGASAQSFIERMTNFDKNLPNEKVLPKHSLLYEYFTVYNELTKVKYVTEGMRKPAFLSGEQKKAIVDLLFKTNRKVTVKQLKEDYFKKIECFDSVEISGVEDRFNASLGTYHDLLKIIKDKDFLDNEENEDILEDIVLTLTLFEDREMIEERLKTYAHLFDDKVMKQLKRRRYTGWGRLSRKLINGIRDKQSGKTILDFLKSDGFANRNFMQLIHDDSLTFKEDIQKAQVSGQGDSLHEHIANLAGSPAIKKGILQTVKVVDELVKVMGRHKPENIVIEMARENQTTQKGQKNSRERMKRIEEGIKELGSQILKEHPVENTQLQNEKLYLYYLQNGRDMYVDQELDINRLSDYDVDHIVPQSFLKDDSIDNKVLTRSDKARGKSDNVPSEEVVKKMKNYWRQLLNAKLITQRKFDNLTKAERGGLSELDKAGFIKRQLVETRQITKHVAQILDSRMNTKYDENDKLIREVKVITLKSKLVSDFRKDFQFYKVREINNYHHAHDAYLNAVVGTALIKKYPKLESEFVYGDYKVYDVRKMIAKSEQEIGKATAKYFFYSNIMNFFKTEITLANGEIRKRPLIETNGETGEIVWDKGRDFATVRKVLSMPQVNIVKKTEVQTGGFSKESILPKRNSDKLIARKKDWDPKKYGGFDSPTVAYSVLVVAKVEKGKSKKLKSVKELLGITIMERSSFEKNPIDFLEAKGYKEVKKDLIIKLPKYSLFELENGRKRMLASAGELQKGNELALPSKYVNFLYLASHYEKLKGSPEDNEQKQLFVEQHKHYLDEIIEQISEFSKRVILADANLDKVLSAYNKHRDKPIREQAENIIHLFTLTNLGAPAAFKYFDTTIDRKRYTSTKEVLDATLIHQSITGLYETRIDLSQLGGDGGEAAAKGSSGGSGGTLQLDDEYRLYSPLVKPDQNIQFWLEQFPQAWAETAGMGLAKQVPPQVIQLKASATPVSVRQYPLSKEAQEGIRPHVQRLIQQGILVPVQSPWNTPLLPVRKPGTNDYRPVQDLREVNKRVQDIHPTVPNPYNLLCALPPQRSWYTVLDLKDAFFCLRLHPTSQPLFAFEWRDPGTGRTGQLTWTRLPQGFKNSPTIFNEALHRDLANFRIQHPQVTLLQYVDDLLLAGATKQDCLEGTKALLLELSDLGYRASAKKAQICRREVTYLGYSLRDGQRWLTEARKKTVVQIPAPTTAKQVREFLGTAGFCRLWIPGFATLAAPLYPLTKPKGEFSWAPEHQKAFDAIKKALLSAPALALPDVTKPFTLYVDERKGVARGVLTQTLGPWRRPVAYLSKKLDPVASGWPVCLKAIAAVAILVKDADKLTLGQNITVIAPHALENIVRQPPDRWMTNARMTHYQSLLLTERVTFAPPAALNPATLLPEETDEPVTHDCHQLLIEETGVRKDLTDIPLTGEVLTWFTDGSSYVVEGKRMAGAAVVDGTRTIWASSLPEGTSAQKAELMALTQALRLAEGKSINIYTDSRYAFATAHVHGAIYKQRGWLTSAGREIKNKEEILSLLEALHLPKRLAIIHCPGHQKAKDPISRGNQMADRVAKQAAQGVNLLAGKRTADGSEFEKRTADGSEFESPKKKAKVE

SEQ ID NO: 120 - protein, 2082 aa, synthetic construct
MPAAKRVKLDGGDKKYSIGLDIGTNSVGWAVITDEYKVPSKKFKVLGNTDRHSIKKNLIGALLFDSGETAEATRLKRTARRRYTRRKNRICYLQEIFSNEMAKVDDSFFHRLEESFLVEEDKKHERHPIFGNIVDEVAYHEKYPTIYHLRKKLVDSTDKADLRLIYLALAHMIKFRGHFLIEGDLNPDNSDVDKLFIQLVQTYNQLFEENPINASGVDAKAILSARLSKSRRLENLIAQLPGEKKNGLFGNLIALSLGLTPNFKSNFDLAEDAKLQLSKDTYDDDLDNLLAQIGDQYADLFLAAKNLSDAILLSDILRVNTEITKAPLSASMIKRYDEHHQDLTLLKALVRQQLPEKYKEIFFDQSKNGYAGYIDGGASQEEFYKFIKPILEKMDGTEELLVKLNREDLLRKQRTFDNGSIPHQIHLGELHAILRRQEDFYPFLKDNREKIEKILTFRIPYYVGPLARGNSRFAWMTRKSEETITPWNFEEVVDKGASAQSFIERMTNFDKNLPNEKVLPKHSLLYEYFTVYNELTKVKYVTEGMRKPAFLSGEQKKAIVDLLFKTNRKVTVKQLKEDYFKKIECFDSVEISGVEDRFNASLGTYHDLLKIIKDKDFLDNEENEDILEDIVLTLTLFEDREMIEERLKTYAHLFDDKVMKQLKRRRYTGWGRLSRKLINGIRDKQSGKTILDFLKSDGFANRNFMQLIHDDSLTFKEDIQKAQVSGQGDSLHEHIANLAGSPAIKKGILQTVKVVDELVKVMGRHKPENIVIEMARENQTTQKGQKNSRERMKRIEEGIKELGSQILKEHPVENTQLQNEKLYLYYLQNGRDMYVDQELDINRLSDYDVDHIVPQSFLKDDSIDNKVLTRSDKARGKSDNVPSEEVVKKMKNYWRQLLNAKLITQRKFDNLTKAERGGLSELDKAGFIKRQLVETRQITKHVAQILDSRMNTKYDENDKLIREVKVITLKSKLVSDFRKDFQFYKVREINNYHHAHDAYLNAVVGTALIKKYPKLESEFVYGDYKVYDVRKMIAKSEQEIGKATAKYFFYSNIMNFFKTEITLANGEIRKRPLIETNGETGEIVWDKGRDFATVRKVLSMPQVNIVKKTEVQTGGFSKESILPKRNSDKLIARKKDWDPKKYGGFDSPTVAYSVLVVAKVEKGKSKKLKSVKELLGITIMERSSFEKNPIDFLEAKGYKEVKKDLIIKLPKYSLFELENGRKRMLASAGELQKGNELALPSKYVNFLYLASHYEKLKGSPEDNEQKQLFVEQHKHYLDEIIEQISEFSKRVILADANLDKVLSAYNKHRDKPIREQAENIIHLFTLTNLGAPAAFKYFDTTIDRKRYTSTKEVLDATLIHQSITGLYETRIDLSQLGGDGGGSSGGTLQLDDEYRLYSPLVKPDQNIQFWLEQFPQAWAETAGMGLAKQVPPQVIQLKASATPVSVRQYPLSKEAQEGIRPHVQRLIQQGILVPVQSPWNTPLLPVRKPGTNDYRPVQDLREVNKRVQDIHPTVPNPYNLLCALPPQRSWYTVLDLKDAFFCLRLHPTSQPLFAFEWRDPGTGRTGQLTWTRLPQGFKNSPTIFNEALHRDLANFRIQHPQVTLLQYVDDLLLAGATKQDCLEGTKALLLELSDLGYRASAKKAQICRREVTYLGYSLRDGQRWLTEARKKTVVQIPAPTTAKQVREFLGTAGFCRLWIPGFATLAAPLYPLTKPKGEFSWAPEHQKAFDAIKKALLSAPALALPDVTKPFTLYVDERKGVARGVLTQTLGPWRRPVAYLSKKLDPVASGWPVCLKAIAAVAILVKDADKLTLGQNITVIAPHALENIVRQPPDRWMTNARMTHYQSLLLTERVTFAPPAALNPATLLPEETDEPVTHDCHQLLIEETGVRKDLTDIPLTGEVLTWFTDGSSYVVEGKRMAGAAVVDGTRTIWASSLPEGTSAQKAELMALTQALRLAEGKSINIYTDSRYAFATAHVHGAIYKQRGWLTSAGREIKNKEEILSLLEALHLPKRLAIIHCPGHQKAKDPISRGNQMADRVAKQAAQGVNLLAGKRTADGSEFEKRTADGSEFESPKKKAKVE

SEQ ID NO: 121 - protein, 2090 aa, synthetic construct
MPAAKRVKLDGGDKKYSIGLDIGTNSVGWAVITDEYKVPSKKFKVLGNTDRHSIKKNLIGALLFDSGETAEATRLKRTARRRYTRRKNRICYLQEIFSNEMAKVDDSFFHRLEESFLVEEDKKHERHPIFGNIVDEVAYHEKYPTIYHLRKKLVDSTDKADLRLIYLALAHMIKFRGHFLIEGDLNPDNSDVDKLFIQLVQTYNQLFEENPINASGVDAKAILSARLSKSRRLENLIAQLPGEKKNGLFGNLIALSLGLTPNFKSNFDLAEDAKLQLSKDTYDDDLDNLLAQIGDQYADLFLAAKNLSDAILLSDILRVNTEITKAPLSASMIKRYDEHHQDLTLLKALVRQQLPEKYKEIFFDQSKNGYAGYIDGGASQEEFYKFIKPILEKMDGTEELLVKLNREDLLRKQRTFDNGSIPHQIHLGELHAILRRQEDFYPFLKDNREKIEKILTFRIPYYVGPLARGNSRFAWMTRKSEETITPWNFEEVVDKGASAQSFIERMTNFDKNLPNEKVLPKHSLLYEYFTVYNELTKVKYVTEGMRKPAFLSGEQKKAIVDLLFKTNRKVTVKQLKEDYFKKIECFDSVEISGVEDRFNASLGTYHDLLKIIKDKDFLDNEENEDILEDIVLTLTLFEDREMIEERLKTYAHLFDDKVMKQLKRRRYTGWGRLSRKLINGIRDKQSGKTILDFLKSDGFANRNFMQLIHDDSLTFKEDIQKAQVSGQGDSLHEHIANLAGSPAIKKGILQTVKVVDELVKVMGRHKPENIVIEMARENQTTQKGQKNSRERMKRIEEGIKELGSQILKEHPVENTQLQNEKLYLYYLQNGRDMYVDQELDINRLSDYDVDHIVPQSFLKDDSIDNKVLTRSDKARGKSDNVPSEEVVKKMKNYWRQLLNAKLITQRKFDNLTKAERGGLSELDKAGFIKRQLVETRQITKHVAQILDSRMNTKYDENDKLIREVKVITLKSKLVSDFRKDFQFYKVREINNYHHAHDAYLNAVVGTALIKKYPKLESEFVYGDYKVYDVRKMIAKSEQEIGKATAKYFFYSNIMNFFKTEITLANGEIRKRPLIETNGETGEIVWDKGRDFATVRKVLSMPQVNIVKKTEVQTGGFSKESILPKRNSDKLIARKKDWDPKKYGGFDSPTVAYSVLVVAKVEKGKSKKLKSVKELLGITIMERSSFEKNPIDFLEAKGYKEVKKDLIIKLPKYSLFELENGRKRMLASAGELQKGNELALPSKYVNFLYLASHYEKLKGSPEDNEQKQLFVEQHKHYLDEIIEQISEFSKRVILADANLDKVLSAYNKHRDKPIREQAENIIHLFTLTNLGAPAAFKYFDTTIDRKRYTSTKEVLDATLIHQSITGLYETRIDLSQLGGDGGGGGGSSEAAAKGGTLQLDDEYRLYSPLVKPDQNIQFWLEQFPQAWAETAGMGLAKQVPPQVIQLKASATPVSVRQYPLSKEAQEGIRPHVQRLIQQGILVPVQSPWNTPLLPVRKPGTNDYRPVQDLREVNKRVQDIHPTVPNPYNLLCALPPQRSWYTVLDLKDAFFCLRLHPTSQPLFAFEWRDPGTGRTGQLTWTRLPQGFKNSPTIFNEALHRDLANFRIQHPQVTLLQYVDDLLLAGATKQDCLEGTKALLLELSDLGYRASAKKAQICRREVTYLGYSLRDGQRWLTEARKKTVVQIPAPTTAKQVREFLGTAGFCRLWIPGFATLAAPLYPLTKPKGEFSWAPEHQKAFDAIKKALLSAPALALPDVTKPFTLYVDERKGVARGVLTQTLGPWRRPVAYLSKKLDPVASGWPVCLKAIAAVAILVKDADKLTLGQNITVIAPHALENIVRQPPDRWMTNARMTHYQSLLLTERVTFAPPAALNPATLLPEETDEPVTHDCHQLLIEETGVRKDLTDIPLTGEVLTWFTDGSSYVVEGKRMAGAAVVDGTRTIWASSLPEGTSAQKAELMALTQALRLAEGKSINIYTDSRYAFATAHVHGAIYKQRGWLTSAGREIKNKEEILSLLEALHLPKRLAIIHCPGHQKAKDPISRGNQMADRVAKQAAQGVNLLAGKRTADGSEFEKRTADGSEFESPKKKAKVE

SEQ ID NO: 122 - protein, 2095 aa, synthetic construct
MPAAKRVKLDGGDKKYSIGLDIGTNSVGWAVITDEYKVPSKKFKVLGNTDRHSIKKNLIGALLFDSGETAEATRLKRTARRRYTRRKNRICYLQEIFSNEMAKVDDSFFHRLEESFLVEEDKKHERHPIFGNIVDEVAYHEKYPTIYHLRKKLVDSTDKADLRLIYLALAHMIKFRGHFLIEGDLNPDNSDVDKLFIQLVQTYNQLFEENPINASGVDAKAILSARLSKSRRLENLIAQLPGEKKNGLFGNLIALSLGLTPNFKSNFDLAEDAKLQLSKDTYDDDLDNLLAQIGDQYADLFLAAKNLSDAILLSDILRVNTEITKAPLSASMIKRYDEHHQDLTLLKALVRQQLPEKYKEIFFDQSKNGYAGYIDGGASQEEFYKFIKPILEKMDGTEELLVKLNREDLLRKQRTFDNGSIPHQIHLGELHAILRRQEDFYPFLKDNREKIEKILTFRIPYYVGPLARGNSRFAWMTRKSEETITPWNFEEVVDKGASAQSFIERMTNFDKNLPNEKVLPKHSLLYEYFTVYNELTKVKYVTEGMRKPAFLSGEQKKAIVDLLFKTNRKVTVKQLKEDYFKKIECFDSVEISGVEDRFNASLGTYHDLLKIIKDKDFLDNEENEDILEDIVLTLTLFEDREMIEERLKTYAHLFDDKVMKQLKRRRYTGWGRLSRKLINGIRDKQSGKTILDFLKSDGFANRNFMQLIHDDSLTFKEDIQKAQVSGQGDSLHEHIANLAGSPAIKKGILQTVKVVDELVKVMGRHKPENIVIEMARENQTTQKGQKNSRERMKRIEEGIKELGSQILKEHPVENTQLQNEKLYLYYLQNGRDMYVDQELDINRLSDYDVDHIVPQSFLKDDSIDNKVLTRSDKARGKSDNVPSEEVVKKMKNYWRQLLNAKLITQRKFDNLTKAERGGLSELDKAGFIKRQLVETRQITKHVAQILDSRMNTKYDENDKLIREVKVITLKSKLVSDFRKDFQFYKVREINNYHHAHDAYLNAVVGTALIKKYPKLESEFVYGDYKVYDVRKMIAKSEQEIGKATAKYFFYSNIMNFFKTEITLANGEIRKRPLIETNGETGEIVWDKGRDFATVRKVLSMPQVNIVKKTEVQTGGFSKESILPKRNSDKLIARKKDWDPKKYGGFDSPTVAYSVLVVAKVEKGKSKKLKSVKELLGITIMERSSFEKNPIDFLEAKGYKEVKKDLIIKLPKYSLFELENGRKRMLASAGELQKGNELALPSKYVNFLYLASHYEKLKGSPEDNEQKQLFVEQHKHYLDEIIEQISEFSKRVILADANLDKVLSAYNKHRDKPIREQAENIIHLFTLTNLGAPAAFKYFDTTIDRKRYTSTKEVLDATLIHQSITGLYETRIDLSQLGGDGGSGSETPGTSESATPESGGTLQLDDEYRLYSPLVKPDQNIQFWLEQFPQAWAETAGMGLAKQVPPQVIQLKASATPVSVRQYPLSKEAQEGIRPHVQRLIQQGILVPVQSPWNTPLLPVRKPGTNDYRPVQDLREVNKRVQDIHPTVPNPYNLLCALPPQRSWYTVLDLKDAFFCLRLHPTSQPLFAFEWRDPGTGRTGQLTWTRLPQGFKNSPTIFNEALHRDLANFRIQHPQVTLLQYVDDLLLAGATKQDCLEGTKALLLELSDLGYRASAKKAQICRREVTYLGYSLRDGQRWLTEARKKTVVQIPAPTTAKQVREFLGTAGFCRLWIPGFATLAAPLYPLTKPKGEFSWAPEHQKAFDAIKKALLSAPALALPDVTKPFTLYVDERKGVARGVLTQTLGPWRRPVAYLSKKLDPVASGWPVCLKAIAAVAILVKDADKLTLGQNITVIAPHALENIVRQPPDRWMTNARMTHYQSLLLTERVTFAPPAALNPATLLPEETDEPVTHDCHQLLIEETGVRKDLTDIPLTGEVLTWFTDGSSYVVEGKRMAGAAVVDGTRTIWASSLPEGTSAQKAELMALTQALRLAEGKSINIYTDSRYAFATAHVHGAIYKQRGWLTSAGREIKNKEEILSLLEALHLPKRLAIIHCPGHQKAKDPISRGNQMADRVAKQAAQGVNLLAGKRTADGSEFEKRTADGSEFESPKKKAKVE

SEQ ID NO: 123 - protein, 2085 aa, synthetic construct
MPAAKRVKLDGGDKKYSIGLDIGTNSVGWAVITDEYKVPSKKFKVLGNTDRHSIKKNLIGALLFDSGETAEATRLKRTARRRYTRRKNRICYLQEIFSNEMAKVDDSFFHRLEESFLVEEDKKHERHPIFGNIVDEVAYHEKYPTIYHLRKKLVDSTDKADLRLIYLALAHMIKFRGHFLIEGDLNPDNSDVDKLFIQLVQTYNQLFEENPINASGVDAKAILSARLSKSRRLENLIAQLPGEKKNGLFGNLIALSLGLTPNFKSNFDLAEDAKLQLSKDTYDDDLDNLLAQIGDQYADLFLAAKNLSDAILLSDILRVNTEITKAPLSASMIKRYDEHHQDLTLLKALVRQQLPEKYKEIFFDQSKNGYAGYIDGGASQEEFYKFIKPILEKMDGTEELLVKLNREDLLRKQRTFDNGSIPHQIHLGELHAILRRQEDFYPFLKDNREKIEKILTFRIPYYVGPLARGNSRFAWMTRKSEETITPWNFEEVVDKGASAQSFIERMTNFDKNLPNEKVLPKHSLLYEYFTVYNELTKVKYVTEGMRKPAFLSGEQKKAIVDLLFKTNRKVTVKQLKEDYFKKIECFDSVEISGVEDRFNASLGTYHDLLKIIKDKDFLDNEENEDILEDIVLTLTLFEDREMIEERLKTYAHLFDDKVMKQLKRRRYTGWGRLSRKLINGIRDKQSGKTILDFLKSDGFANRNFMQLIHDDSLTFKEDIQKAQVSGQGDSLHEHIANLAGSPAIKKGILQTVKVVDELVKVMGRHKPENIVIEMARENQTTQKGQKNSRERMKRIEEGIKELGSQILKEHPVENTQLQNEKLYLYYLQNGRDMYVDQELDINRLSDYDVDHIVPQSFLKDDSIDNKVLTRSDKARGKSDNVPSEEVVKKMKNYWRQLLNAKLITQRKFDNLTKAERGGLSELDKAGFIKRQLVETRQITKHVAQILDSRMNTKYDENDKLIREVKVITLKSKLVSDFRKDFQFYKVREINNYHHAHDAYLNAVVGTALIKKYPKLESEFVYGDYKVYDVRKMIAKSEQEIGKATAKYFFYSNIMNFFKTEITLANGEIRKRPLIETNGETGEIVWDKGRDFATVRKVLSMPQVNIVKKTEVQTGGFSKESILPKRNSDKLIARKKDWDPKKYGGFDSPTVAYSVLVVAKVEKGKSKKLKSVKELLGITIMERSSFEKNPIDFLEAKGYKEVKKDLIIKLPKYSLFELENGRKRMLASAGELQKGNELALPSKYVNFLYLASHYEKLKGSPEDNEQKQLFVEQHKHYLDEIIEQISEFSKRVILADANLDKVLSAYNKHRDKPIREQAENIIHLFTLTNLGAPAAFKYFDTTIDRKRYTSTKEVLDATLIHQSITGLYETRIDLSQLGGDGGPAPGSSGGTLQLDDEYRLYSPLVKPDQNIQFWLEQFPQAWAETAGMGLAKQVPPQVIQLKASATPVSVRQYPLSKEAQEGIRPHVQRLIQQGILVPVQSPWNTPLLPVRKPGTNDYRPVQDLREVNKRVQDIHPTVPNPYNLLCALPPQRSWYTVLDLKDAFFCLRLHPTSQPLFAFEWRDPGTGRTGQLTWTRLPQGFKNSPTIFNEALHRDLANFRIQHPQVTLLQYVDDLLLAGATKQDCLEGTKALLLELSDLGYRASAKKAQICRREVTYLGYSLRDGQRWLTEARKKTVVQIPAPTTAKQVREFLGTAGFCRLWIPGFATLAAPLYPLTKPKGEFSWAPEHQKAFDAIKKALLSAPALALPDVTKPFTLYVDERKGVARGVLTQTLGPWRRPVAYLSKKLDPVASGWPVCLKAIAAVAILVKDADKLTLGQNITVIAPHALENIVRQPPDRWMTNARMTHYQSLLLTERVTFAPPAALNPATLLPEETDEPVTHDCHQLLIEETGVRKDLTDIPLTGEVLTWFTDGSSYVVEGKRMAGAAVVDGTRTIWASSLPEGTSAQKAELMALTQALRLAEGKSINIYTDSRYAFATAHVHGAIYKQRGWLTSAGREIKNKEEILSLLEALHLPKRLAIIHCPGHQKAKDPISRGNQMADRVAKQAAQGVNLLAGKRTADGSEFEKRTADGSEFESPKKKAKVE

SEQ ID NO: 124 - protein, 2090 aa, synthetic construct
MPAAKRVKLDGGDKKYSIGLDIGTNSVGWAVITDEYKVPSKKFKVLGNTDRHSIKKNLIGALLFDSGETAEATRLKRTARRRYTRRKNRICYLQEIFSNEMAKVDDSFFHRLEESFLVEEDKKHERHPIFGNIVDEVAYHEKYPTIYHLRKKLVDSTDKADLRLIYLALAHMIKFRGHFLIEGDLNPDNSDVDKLFIQLVQTYNQLFEENPINASGVDAKAILSARLSKSRRLENLIAQLPGEKKNGLFGNLIALSLGLTPNFKSNFDLAEDAKLQLSKDTYDDDLDNLLAQIGDQYADLFLAAKNLSDAILLSDILRVNTEITKAPLSASMIKRYDEHHQDLTLLKALVRQQLPEKYKEIFFDQSKNGYAGYIDGGASQEEFYKFIKPILEKMDGTEELLVKLNREDLLRKQRTFDNGSIPHQIHLGELHAILRRQEDFYPFLKDNREKIEKILTFRIPYYVGPLARGNSRFAWMTRKSEETITPWNFEEVVDKGASAQSFIERMTNFDKNLPNEKVLPKHSLLYEYFTVYNELTKVKYVTEGMRKPAFLSGEQKKAIVDLLFKTNRKVTVKQLKEDYFKKIECFDSVEISGVEDRFNASLGTYHDLLKIIKDKDFLDNEENEDILEDIVLTLTLFEDREMIEERLKTYAHLFDDKVMKQLKRRRYTGWGRLSRKLINGIRDKQSGKTILDFLKSDGFANRNFMQLIHDDSLTFKEDIQKAQVSGQGDSLHEHIANLAGSPAIKKGILQTVKVVDELVKVMGRHKPENIVIEMARENQTTQKGQKNSRERMKRIEEGIKELGSQILKEHPVENTQLQNEKLYLYYLQNGRDMYVDQELDINRLSDYDVDHIVPQSFLKDDSIDNKVLTRSDKARGKSDNVPSEEVVKKMKNYWRQLLNAKLITQRKFDNLTKAERGGLSELDKAGFIKRQLVETRQITKHVAQILDSRMNTKYDENDKLIREVKVITLKSKLVSDFRKDFQFYKVREINNYHHAHDAYLNAVVGTALIKKYPKLESEFVYGDYKVYDVRKMIAKSEQEIGKATAKYFFYSNIMNFFKTEITLANGEIRKRPLIETNGETGEIVWDKGRDFATVRKVLSMPQVNIVKKTEVQTGGFSKESILPKRNSDKLIARKKDWDPKKYGGFDSPTVAYSVLVVAKVEKGKSKKLKSVKELLGITIMERSSFEKNPIDFLEAKGYKEVKKDLIIKLPKYSLFELENGRKRMLASAGELQKGNELALPSKYVNFLYLASHYEKLKGSPEDNEQKQLFVEQHKHYLDEIIEQISEFSKRVILADANLDKVLSAYNKHRDKPIREQAENIIHLFTLTNLGAPAAFKYFDTTIDRKRYTSTKEVLDATLIHQSITGLYETRIDLSQLGGDGGPAPEAAAKGGGGGTLQLDDEYRLYSPLVKPDQNIQFWLEQFPQAWAETAGMGLAKQVPPQVIQLKASATPVSVRQYPLSKEAQEGIRPHVQRLIQQGILVPVQSPWNTPLLPVRKPGTNDYRPVQDLREVNKRVQDIHPTVPNPYNLLCALPPQRSWYTVLDLKDAFFCLRLHPTSQPLFAFEWRDPGTGRTGQLTWTRLPQGFKNSPTIFNEALHRDLANFRIQHPQVTLLQYVDDLLLAGATKQDCLEGTKALLLELSDLGYRASAKKAQICRREVTYLGYSLRDGQRWLTEARKKTVVQIPAPTTAKQVREFLGTAGFCRLWIPGFATLAAPLYPLTKPKGEFSWAPEHQKAFDAIKKALLSAPALALPDVTKPFTLYVDERKGVARGVLTQTLGPWRRPVAYLSKKLDPVASGWPVCLKAIAAVAILVKDADKLTLGQNITVIAPHALENIVRQPPDRWMTNARMTHYQSLLLTERVTFAPPAALNPATLLPEETDEPVTHDCHQLLIEETGVRKDLTDIPLTGEVLTWFTDGSSYVVEGKRMAGAAVVDGTRTIWASSLPEGTSAQKAELMALTQALRLAEGKSINIYTDSRYAFATAHVHGAIYKQRGWLTSAGREIKNKEEILSLLEALHLPKRLAIIHCPGHQKAKDPISRGNQMADRVAKQAAQGVNLLAGKRTADGSEFEKRTADGSEFESPKKKAKVE

SEQ ID NO: 125 - protein, 2085 aa, synthetic construct
MPAAKRVKLDGGDKKYSIGLDIGTNSVGWAVITDEYKVPSKKFKVLGNTDRHSIKKNLIGALLFDSGETAEATRLKRTARRRYTRRKNRICYLQEIFSNEMAKVDDSFFHRLEESFLVEEDKKHERHPIFGNIVDEVAYHEKYPTIYHLRKKLVDSTDKADLRLIYLALAHMIKFRGHFLIEGDLNPDNSDVDKLFIQLVQTYNQLFEENPINASGVDAKAILSARLSKSRRLENLIAQLPGEKKNGLFGNLIALSLGLTPNFKSNFDLAEDAKLQLSKDTYDDDLDNLLAQIGDQYADLFLAAKNLSDAILLSDILRVNTEITKAPLSASMIKRYDEHHQDLTLLKALVRQQLPEKYKEIFFDQSKNGYAGYIDGGASQEEFYKFIKPILEKMDGTEELLVKLNREDLLRKQRTFDNGSIPHQIHLGELHAILRRQEDFYPFLKDNREKIEKILTFRIPYYVGPLARGNSRFAWMTRKSEETITPWNFEEVVDKGASAQSFIERMTNFDKNLPNEKVLPKHSLLYEYFTVYNELTKVKYVTEGMRKPAFLSGEQKKAIVDLLFKTNRKVTVKQLKEDYFKKIECFDSVEISGVEDRFNASLGTYHDLLKIIKDKDFLDNEENEDILEDIVLTLTLFEDREMIEERLKTYAHLFDDKVMKQLKRRRYTGWGRLSRKLINGIRDKQSGKTILDFLKSDGFANRNFMQLIHDDSLTFKEDIQKAQVSGQGDSLHEHIANLAGSPAIKKGILQTVKVVDELVKVMGRHKPENIVIEMARENQTTQKGQKNSRERMKRIEEGIKELGSQILKEHPVENTQLQNEKLYLYYLQNGRDMYVDQELDINRLSDYDVDHIVPQSFLKDDSIDNKVLTRSDKARGKSDNVPSEEVVKKMKNYWRQLLNAKLITQRKFDNLTKAERGGLSELDKAGFIKRQLVETRQITKHVAQILDSRMNTKYDENDKLIREVKVITLKSKLVSDFRKDFQFYKVREINNYHHAHDAYLNAVVGTALIKKYPKLESEFVYGDYKVYDVRKMIAKSEQEIGKATAKYFFYSNIMNFFKTEITLANGEIRKRPLIETNGETGEIVWDKGRDFATVRKVLSMPQVNIVKKTEVQTGGFSKESILPKRNSDKLIARKKDWDPKKYGGFDSPTVAYSVLVVAKVEKGKSKKLKSVKELLGITIMERSSFEKNPIDFLEAKGYKEVKKDLIIKLPKYSLFELENGRKRMLASAGELQKGNELALPSKYVNFLYLASHYEKLKGSPEDNEQKQLFVEQHKHYLDEIIEQISEFSKRVILADANLDKVLSAYNKHRDKPIREQAENIIHLFTLTNLGAPAAFKYFDTTIDRKRYTSTKEVLDATLIHQSITGLYETRIDLSQLGGDGGPAPGGSGGTLQLDDEYRLYSPLVKPDQNIQFWLEQFPQAWAETAGMGLAKQVPPQVIQLKASATPVSVRQYPLSKEAQEGIRPHVQRLIQQGILVPVQSPWNTPLLPVRKPGTNDYRPVQDLREVNKRVQDIHPTVPNPYNLLCALPPQRSWYTVLDLKDAFFCLRLHPTSQPLFAFEWRDPGTGRTGQLTWTRLPQGFKNSPTIFNEALHRDLANFRIQHPQVTLLQYVDDLLLAGATKQDCLEGTKALLLELSDLGYRASAKKAQICRREVTYLGYSLRDGQRWLTEARKKTVVQIPAPTTAKQVREFLGTAGFCRLWIPGFATLAAPLYPLTKPKGEFSWAPEHQKAFDAIKKALLSAPALALPDVTKPFTLYVDERKGVARGVLTQTLGPWRRPVAYLSKKLDPVASGWPVCLKAIAAVAILVKDADKLTLGQNITVIAPHALENIVRQPPDRWMTNARMTHYQSLLLTERVTFAPPAALNPATLLPEETDEPVTHDCHQLLIEETGVRKDLTDIPLTGEVLTWFTDGSSYVVEGKRMAGAAVVDGTRTIWASSLPEGTSAQKAELMALTQALRLAEGKSINIYTDSRYAFATAHVHGAIYKQRGWLTSAGREIKNKEEILSLLEALHLPKRLAIIHCPGHQKAKDPISRGNQMADRVAKQAAQGVNLLAGKRTADGSEFEKRTADGSEFESPKKKAKVE

SEQ ID NO: 126 - protein, 2087 aa, synthetic construct
MPAAKRVKLDGGDKKYSIGLDIGTNSVGWAVITDEYKVPSKKFKVLGNTDRHSIKKNLIGALLFDSGETAEATRLKRTARRRYTRRKNRICYLQEIFSNEMAKVDDSFFHRLEESFLVEEDKKHERHPIFGNIVDEVAYHEKYPTIYHLRKKLVDSTDKADLRLIYLALAHMIKFRGHFLIEGDLNPDNSDVDKLFIQLVQTYNQLFEENPINASGVDAKAILSARLSKSRRLENLIAQLPGEKKNGLFGNLIALSLGLTPNFKSNFDLAEDAKLQLSKDTYDDDLDNLLAQIGDQYADLFLAAKNLSDAILLSDILRVNTEITKAPLSASMIKRYDEHHQDLTLLKALVRQQLPEKYKEIFFDQSKNGYAGYIDGGASQEEFYKFIKPILEKMDGTEELLVKLNREDLLRKQRTFDNGSIPHQIHLGELHAILRRQEDFYPFLKDNREKIEKILTFRIPYYVGPLARGNSRFAWMTRKSEETITPWNFEEVVDKGASAQSFIERMTNFDKNLPNEKVLPKHSLLYEYFTVYNELTKVKYVTEGMRKPAFLSGEQKKAIVDLLFKTNRKVTVKQLKEDYFKKIECFDSVEISGVEDRFNASLGTYHDLLKIIKDKDFLDNEENEDILEDIVLTLTLFEDREMIEERLKTYAHLFDDKVMKQLKRRRYTGWGRLSRKLINGIRDKQSGKTILDFLKSDGFANRNFMQLIHDDSLTFKEDIQKAQVSGQGDSLHEHIANLAGSPAIKKGILQTVKVVDELVKVMGRHKPENIVIEMARENQTTQKGQKNSRERMKRIEEGIKELGSQILKEHPVENTQLQNEKLYLYYLQNGRDMYVDQELDINRLSDYDVDHIVPQSFLKDDSIDNKVLTRSDKARGKSDNVPSEEVVKKMKNYWRQLLNAKLITQRKFDNLTKAERGGLSELDKAGFIKRQLVETRQITKHVAQILDSRMNTKYDENDKLIREVKVITLKSKLVSDFRKDFQFYKVREINNYHHAHDAYLNAVVGTALIKKYPKLESEFVYGDYKVYDVRKMIAKSEQEIGKATAKYFFYSNIMNFFKTEITLANGEIRKRPLIETNGETGEIVWDKGRDFATVRKVLSMPQVNIVKKTEVQTGGFSKESILPKRNSDKLIARKKDWDPKKYGGFDSPTVAYSVLVVAKVEKGKSKKLKSVKELLGITIMERSSFEKNPIDFLEAKGYKEVKKDLIIKLPKYSLFELENGRKRMLASAGELQKGNELALPSKYVNFLYLASHYEKLKGSPEDNEQKQLFVEQHKHYLDEIIEQISEFSKRVILADANLDKVLSAYNKHRDKPIREQAENIIHLFTLTNLGAPAAFKYFDTTIDRKRYTSTKEVLDATLIHQSITGLYETRIDLSQLGGDGGEAAAKGGGGGTLQLDDEYRLYSPLVKPDQNIQFWLEQFPQAWAETAGMGLAKQVPPQVIQLKASATPVSVRQYPLSKEAQEGIRPHVQRLIQQGILVPVQSPWNTPLLPVRKPGTNDYRPVQDLREVNKRVQDIHPTVPNPYNLLCALPPQRSWYTVLDLKDAFFCLRLHPTSQPLFAFEWRDPGTGRTGQLTWTRLPQGFKNSPTIFNEALHRDLANFRIQHPQVTLLQYVDDLLLAGATKQDCLEGTKALLLELSDLGYRASAKKAQICRREVTYLGYSLRDGQRWLTEARKKTVVQIPAPTTAKQVREFLGTAGFCRLWIPGFATLAAPLYPLTKPKGEFSWAPEHQKAFDAIKKALLSAPALALPDVTKPFTLYVDERKGVARGVLTQTLGPWRRPVAYLSKKLDPVASGWPVCLKAIAAVAILVKDADKLTLGQNITVIAPHALENIVRQPPDRWMTNARMTHYQSLLLTERVTFAPPAALNPATLLPEETDEPVTHDCHQLLIEETGVRKDLTDIPLTGEVLTWFTDGSSYVVEGKRMAGAAVVDGTRTIWASSLPEGTSAQKAELMALTQALRLAEGKSINIYTDSRYAFATAHVHGAIYKQRGWLTSAGREIKNKEEILSLLEALHLPKRLAIIHCPGHQKAKDPISRGNQMADRVAKQAAQGVNLLAGKRTADGSEFEKRTADGSEFESPKKKAKVE

SEQ ID NO: 127 - protein, 2090 aa, synthetic construct
MPAAKRVKLDGGDKKYSIGLDIGTNSVGWAVITDEYKVPSKKFKVLGNTDRHSIKKNLIGALLFDSGETAEATRLKRTARRRYTRRKNRICYLQEIFSNEMAKVDDSFFHRLEESFLVEEDKKHERHPIFGNIVDEVAYHEKYPTIYHLRKKLVDSTDKADLRLIYLALAHMIKFRGHFLIEGDLNPDNSDVDKLFIQLVQTYNQLFEENPINASGVDAKAILSARLSKSRRLENLIAQLPGEKKNGLFGNLIALSLGLTPNFKSNFDLAEDAKLQLSKDTYDDDLDNLLAQIGDQYADLFLAAKNLSDAILLSDILRVNTEITKAPLSASMIKRYDEHHQDLTLLKALVRQQLPEKYKEIFFDQSKNGYAGYIDGGASQEEFYKFIKPILEKMDGTEELLVKLNREDLLRKQRTFDNGSIPHQIHLGELHAILRRQEDFYPFLKDNREKIEKILTFRIPYYVGPLARGNSRFAWMTRKSEETITPWNFEEVVDKGASAQSFIERMTNFDKNLPNEKVLPKHSLLYEYFTVYNELTKVKYVTEGMRKPAFLSGEQKKAIVDLLFKTNRKVTVKQLKEDYFKKIECFDSVEISGVEDRFNASLGTYHDLLKIIKDKDFLDNEENEDILEDIVLTLTLFEDREMIEERLKTYAHLFDDKVMKQLKRRRYTGWGRLSRKLINGIRDKQSGKTILDFLKSDGFANRNFMQLIHDDSLTFKEDIQKAQVSGQGDSLHEHIANLAGSPAIKKGILQTVKVVDELVKVMGRHKPENIVIEMARENQTTQKGQKNSRERMKRIEEGIKELGSQILKEHPVENTQLQNEKLYLYYLQNGRDMYVDQELDINRLSDYDVDHIVPQSFLKDDSIDNKVLTRSDKARGKSDNVPSEEVVKKMKNYWRQLLNAKLITQRKFDNLTKAERGGLSELDKAGFIKRQLVETRQITKHVAQILDSRMNTKYDENDKLIREVKVITLKSKLVSDFRKDFQFYKVREINNYHHAHDAYLNAVVGTALIKKYPKLESEFVYGDYKVYDVRKMIAKSEQEIGKATAKYFFYSNIMNFFKTEITLANGEIRKRPLIETNGETGEIVWDKGRDFATVRKVLSMPQVNIVKKTEVQTGGFSKESILPKRNSDKLIARKKDWDPKKYGGFDSPTVAYSVLVVAKVEKGKSKKLKSVKELLGITIMERSSFEKNPIDFLEAKGYKEVKKDLIIKLPKYSLFELENGRKRMLASAGELQKGNELALPSKYVNFLYLASHYEKLKGSPEDNEQKQLFVEQHKHYLDEIIEQISEFSKRVILADANLDKVLSAYNKHRDKPIREQAENIIHLFTLTNLGAPAAFKYFDTTIDRKRYTSTKEVLDATLIHQSITGLYETRIDLSQLGGDGGPAPGGGEAAAKGGTLQLDDEYRLYSPLVKPDQNIQFWLEQFPQAWAETAGMGLAKQVPPQVIQLKASATPVSVRQYPLSKEAQEGIRPHVQRLIQQGILVPVQSPWNTPLLPVRKPGTNDYRPVQDLREVNKRVQDIHPTVPNPYNLLCALPPQRSWYTVLDLKDAFFCLRLHPTSQPLFAFEWRDPGTGRTGQLTWTRLPQGFKNSPTIFNEALHRDLANFRIQHPQVTLLQYVDDLLLAGATKQDCLEGTKALLLELSDLGYRASAKKAQICRREVTYLGYSLRDGQRWLTEARKKTVVQIPAPTTAKQVREFLGTAGFCRLWIPGFATLAAPLYPLTKPKGEFSWAPEHQKAFDAIKKALLSAPALALPDVTKPFTLYVDERKGVARGVLTQTLGPWRRPVAYLSKKLDPVASGWPVCLKAIAAVAILVKDADKLTLGQNITVIAPHALENIVRQPPDRWMTNARMTHYQSLLLTERVTFAPPAALNPATLLPEETDEPVTHDCHQLLIEETGVRKDLTDIPLTGEVLTWFTDGSSYVVEGKRMAGAAVVDGTRTIWASSLPEGTSAQKAELMALTQALRLAEGKSINIYTDSRYAFATAHVHGAIYKQRGWLTSAGREIKNKEEILSLLEALHLPKRLAIIHCPGHQKAKDPISRGNQMADRVAKQAAQGVNLLAGKRTADGSEFEKRTADGSEFESPKKKAKVE

SEQ ID NO: 128 - protein, 2087 aa, synthetic construct
MPAAKRVKLDGGDKKYSIGLDIGTNSVGWAVITDEYKVPSKKFKVLGNTDRHSIKKNLIGALLFDSGETAEATRLKRTARRRYTRRKNRICYLQEIFSNEMAKVDDSFFHRLEESFLVEEDKKHERHPIFGNIVDEVAYHEKYPTIYHLRKKLVDSTDKADLRLIYLALAHMIKFRGHFLIEGDLNPDNSDVDKLFIQLVQTYNQLFEENPINASGVDAKAILSARLSKSRRLENLIAQLPGEKKNGLFGNLIALSLGLTPNFKSNFDLAEDAKLQLSKDTYDDDLDNLLAQIGDQYADLFLAAKNLSDAILLSDILRVNTEITKAPLSASMIKRYDEHHQDLTLLKALVRQQLPEKYKEIFFDQSKNGYAGYIDGGASQEEFYKFIKPILEKMDGTEELLVKLNREDLLRKQRTFDNGSIPHQIHLGELHAILRRQEDFYPFLKDNREKIEKILTFRIPYYVGPLARGNSRFAWMTRKSEETITPWNFEEVVDKGASAQSFIERMTNFDKNLPNEKVLPKHSLLYEYFTVYNELTKVKYVTEGMRKPAFLSGEQKKAIVDLLFKTNRKVTVKQLKEDYFKKIECFDSVEISGVEDRFNASLGTYHDLLKIIKDKDFLDNEENEDILEDIVLTLTLFEDREMIEERLKTYAHLFDDKVMKQLKRRRYTGWGRLSRKLINGIRDKQSGKTILDFLKSDGFANRNFMQLIHDDSLTFKEDIQKAQVSGQGDSLHEHIANLAGSPAIKKGILQTVKVVDELVKVMGRHKPENIVIEMARENQTTQKGQKNSRERMKRIEEGIKELGSQILKEHPVENTQLQNEKLYLYYLQNGRDMYVDQELDINRLSDYDVDHIVPQSFLKDDSIDNKVLTRSDKARGKSDNVPSEEVVKKMKNYWRQLLNAKLITQRKFDNLTKAERGGLSELDKAGFIKRQLVETRQITKHVAQILDSRMNTKYDENDKLIREVKVITLKSKLVSDFRKDFQFYKVREINNYHHAHDAYLNAVVGTALIKKYPKLESEFVYGDYKVYDVRKMIAKSEQEIGKATAKYFFYSNIMNFFKTEITLANGEIRKRPLIETNGETGEIVWDKGRDFATVRKVLSMPQVNIVKKTEVQTGGFSKESILPKRNSDKLIARKKDWDPKKYGGFDSPTVAYSVLVVAKVEKGKSKKLKSVKELLGITIMERSSFEKNPIDFLEAKGYKEVKKDLIIKLPKYSLFELENGRKRMLASAGELQKGNELALPSKYVNFLYLASHYEKLKGSPEDNEQKQLFVEQHKHYLDEIIEQISEFSKRVILADANLDKVLSAYNKHRDKPIREQAENIIHLFTLTNLGAPAAFKYFDTTIDRKRYTSTKEVLDATLIHQSITGLYETRIDLSQLGGDGGGSSEAAAKGGTLQLDDEYRLYSPLVKPDQNIQFWLEQFPQAWAETAGMGLAKQVPPQVIQLKASATPVSVRQYPLSKEAQEGIRPHVQRLIQQGILVPVQSPWNTPLLPVRKPGTNDYRPVQDLREVNKRVQDIHPTVPNPYNLLCALPPQRSWYTVLDLKDAFFCLRLHPTSQPLFAFEWRDPGTGRTGQLTWTRLPQGFKNSPTIFNEALHRDLANFRIQHPQVTLLQYVDDLLLAGATKQDCLEGTKALLLELSDLGYRASAKKAQICRREVTYLGYSLRDGQRWLTEARKKTVVQIPAPTTAKQVREFLGTAGFCRLWIPGFATLAAPLYPLTKPKGEFSWAPEHQKAFDAIKKALLSAPALALPDVTKPFTLYVDERKGVARGVLTQTLGPWRRPVAYLSKKLDPVASGWPVCLKAIAAVAILVKDADKLTLGQNITVIAPHALENIVRQPPDRWMTNARMTHYQSLLLTERVTFAPPAALNPATLLPEETDEPVTHDCHQLLIEETGVRKDLTDIPLTGEVLTWFTDGSSYVVEGKRMAGAAVVDGTRTIWASSLPEGTSAQKAELMALTQALRLAEGKSINIYTDSRYAFATAHVHGAIYKQRGWLTSAGREIKNKEEILSLLEALHLPKRLAIIHCPGHQKAKDPISRGNQMADRVAKQAAQGVNLLAGKRTADGSEFEKRTADGSEFESPKKKAKVE

SEQ ID NO: 129 - protein, 2088 aa, synthetic construct
MPAAKRVKLDGGDKKYSIGLDIGTNSVGWAVITDEYKVPSKKFKVLGNTDRHSIKKNLIGALLFDSGETAEATRLKRTARRRYTRRKNRICYLQEIFSNEMAKVDDSFFHRLEESFLVEEDKKHERHPIFGNIVDEVAYHEKYPTIYHLRKKLVDSTDKADLRLIYLALAHMIKFRGHFLIEGDLNPDNSDVDKLFIQLVQTYNQLFEENPINASGVDAKAILSARLSKSRRLENLIAQLPGEKKNGLFGNLIALSLGLTPNFKSNFDLAEDAKLQLSKDTYDDDLDNLLAQIGDQYADLFLAAKNLSDAILLSDILRVNTEITKAPLSASMIKRYDEHHQDLTLLKALVRQQLPEKYKEIFFDQSKNGYAGYIDGGASQEEFYKFIKPILEKMDGTEELLVKLNREDLLRKQRTFDNGSIPHQIHLGELHAILRRQEDFYPFLKDNREKIEKILTFRIPYYVGPLARGNSRFAWMTRKSEETITPWNFEEVVDKGASAQSFIERMTNFDKNLPNEKVLPKHSLLYEYFTVYNELTKVKYVTEGMRKPAFLSGEQKKAIVDLLFKTNRKVTVKQLKEDYFKKIECFDSVEISGVEDRFNASLGTYHDLLKIIKDKDFLDNEENEDILEDIVLTLTLFEDREMIEERLKTYAHLFDDKVMKQLKRRRYTGWGRLSRKLINGIRDKQSGKTILDFLKSDGFANRNFMQLIHDDSLTFKEDIQKAQVSGQGDSLHEHIANLAGSPAIKKGILQTVKVVDELVKVMGRHKPENIVIEMARENQTTQKGQKNSRERMKRIEEGIKELGSQILKEHPVENTQLQNEKLYLYYLQNGRDMYVDQELDINRLSDYDVDHIVPQSFLKDDSIDNKVLTRSDKARGKSDNVPSEEVVKKMKNYWRQLLNAKLITQRKFDNLTKAERGGLSELDKAGFIKRQLVETRQITKHVAQILDSRMNTKYDENDKLIREVKVITLKSKLVSDFRKDFQFYKVREINNYHHAHDAYLNAVVGTALIKKYPKLESEFVYGDYKVYDVRKMIAKSEQEIGKATAKYFFYSNIMNFFKTEITLANGEIRKRPLIETNGETGEIVWDKGRDFATVRKVLSMPQVNIVKKTEVQTGGFSKESILPKRNSDKLIARKKDWDPKKYGGFDSPTVAYSVLVVAKVEKGKSKKLKSVKELLGITIMERSSFEKNPIDFLEAKGYKEVKKDLIIKLPKYSLFELENGRKRMLASAGELQKGNELALPSKYVNFLYLASHYEKLKGSPEDNEQKQLFVEQHKHYLDEIIEQISEFSKRVILADANLDKVLSAYNKHRDKPIREQAENIIHLFTLTNLGAPAAFKYFDTTIDRKRYTSTKEVLDATLIHQSITGLYETRIDLSQLGGDGGPAPGSSGGGGGTLQLDDEYRLYSPLVKPDQNIQFWLEQFPQAWAETAGMGLAKQVPPQVIQLKASATPVSVRQYPLSKEAQEGIRPHVQRLIQQGILVPVQSPWNTPLLPVRKPGTNDYRPVQDLREVNKRVQDIHPTVPNPYNLLCALPPQRSWYTVLDLKDAFFCLRLHPTSQPLFAFEWRDPGTGRTGQLTWTRLPQGFKNSPTIFNEALHRDLANFRIQHPQVTLLQYVDDLLLAGATKQDCLEGTKALLLELSDLGYRASAKKAQICRREVTYLGYSLRDGQRWLTEARKKTVVQIPAPTTAKQVREFLGTAGFCRLWIPGFATLAAPLYPLTKPKGEFSWAPEHQKAFDAIKKALLSAPALALPDVTKPFTLYVDERKGVARGVLTQTLGPWRRPVAYLSKKLDPVASGWPVCLKAIAAVAILVKDADKLTLGQNITVIAPHALENIVRQPPDRWMTNARMTHYQSLLLTERVTFAPPAALNPATLLPEETDEPVTHDCHQLLIEETGVRKDLTDIPLTGEVLTWFTDGSSYVVEGKRMAGAAVVDGTRTIWASSLPEGTSAQKAELMALTQALRLAEGKSINIYTDSRYAFATAHVHGAIYKQRGWLTSAGREIKNKEEILSLLEALHLPKRLAIIHCPGHQKAKDPISRGNQMADRVAKQAAQGVNLLAGKRTADGSEFEKRTADGSEFESPKKKAKVE

SEQ ID NO: 130 - protein, 2088 aa, synthetic construct
MPAAKRVKLDGGDKKYSIGLDIGTNSVGWAVITDEYKVPSKKFKVLGNTDRHSIKKNLIGALLFDSGETAEATRLKRTARRRYTRRKNRICYLQEIFSNEMAKVDDSFFHRLEESFLVEEDKKHERHPIFGNIVDEVAYHEKYPTIYHLRKKLVDSTDKADLRLIYLALAHMIKFRGHFLIEGDLNPDNSDVDKLFIQLVQTYNQLFEENPINASGVDAKAILSARLSKSRRLENLIAQLPGEKKNGLFGNLIALSLGLTPNFKSNFDLAEDAKLQLSKDTYDDDLDNLLAQIGDQYADLFLAAKNLSDAILLSDILRVNTEITKAPLSASMIKRYDEHHQDLTLLKALVRQQLPEKYKEIFFDQSKNGYAGYIDGGASQEEFYKFIKPILEKMDGTEELLVKLNREDLLRKQRTFDNGSIPHQIHLGELHAILRRQEDFYPFLKDNREKIEKILTFRIPYYVGPLARGNSRFAWMTRKSEETITPWNFEEVVDKGASAQSFIERMTNFDKNLPNEKVLPKHSLLYEYFTVYNELTKVKYVTEGMRKPAFLSGEQKKAIVDLLFKTNRKVTVKQLKEDYFKKIECFDSVEISGVEDRFNASLGTYHDLLKIIKDKDFLDNEENEDILEDIVLTLTLFEDREMIEERLKTYAHLFDDKVMKQLKRRRYTGWGRLSRKLINGIRDKQSGKTILDFLKSDGFANRNFMQLIHDDSLTFKEDIQKAQVSGQGDSLHEHIANLAGSPAIKKGILQTVKVVDELVKVMGRHKPENIVIEMARENQTTQKGQKNSRERMKRIEEGIKELGSQILKEHPVENTQLQNEKLYLYYLQNGRDMYVDQELDINRLSDYDVDHIVPQSFLKDDSIDNKVLTRSDKARGKSDNVPSEEVVKKMKNYWRQLLNAKLITQRKFDNLTKAERGGLSELDKAGFIKRQLVETRQITKHVAQILDSRMNTKYDENDKLIREVKVITLKSKLVSDFRKDFQFYKVREINNYHHAHDAYLNAVVGTALIKKYPKLESEFVYGDYKVYDVRKMIAKSEQEIGKATAKYFFYSNIMNFFKTEITLANGEIRKRPLIETNGETGEIVWDKGRDFATVRKVLSMPQVNIVKKTEVQTGGFSKESILPKRNSDKLIARKKDWDPKKYGGFDSPTVAYSVLVVAKVEKGKSKKLKSVKELLGITIMERSSFEKNPIDFLEAKGYKEVKKDLIIKLPKYSLFELENGRKRMLASAGELQKGNELALPSKYVNFLYLASHYEKLKGSPEDNEQKQLFVEQHKHYLDEIIEQISEFSKRVILADANLDKVLSAYNKHRDKPIREQAENIIHLFTLTNLGAPAAFKYFDTTIDRKRYTSTKEVLDATLIHQSITGLYETRIDLSQLGGDGGGGSGGSGGSGGTLQLDDEYRLYSPLVKPDQNIQFWLEQFPQAWAETAGMGLAKQVPPQVIQLKASATPVSVRQYPLSKEAQEGIRPHVQRLIQQGILVPVQSPWNTPLLPVRKPGTNDYRPVQDLREVNKRVQDIHPTVPNPYNLLCALPPQRSWYTVLDLKDAFFCLRLHPTSQPLFAFEWRDPGTGRTGQLTWTRLPQGFKNSPTIFNEALHRDLANFRIQHPQVTLLQYVDDLLLAGATKQDCLEGTKALLLELSDLGYRASAKKAQICRREVTYLGYSLRDGQRWLTEARKKTVVQIPAPTTAKQVREFLGTAGFCRLWIPGFATLAAPLYPLTKPKGEFSWAPEHQKAFDAIKKALLSAPALALPDVTKPFTLYVDERKGVARGVLTQTLGPWRRPVAYLSKKLDPVASGWPVCLKAIAAVAILVKDADKLTLGQNITVIAPHALENIVRQPPDRWMTNARMTHYQSLLLTERVTFAPPAALNPATLLPEETDEPVTHDCHQLLIEETGVRKDLTDIPLTGEVLTWFTDGSSYVVEGKRMAGAAVVDGTRTIWASSLPEGTSAQKAELMALTQALRLAEGKSINIYTDSRYAFATAHVHGAIYKQRGWLTSAGREIKNKEEILSLLEALHLPKRLAIIHCPGHQKAKDPISRGNQMADRVAKQAAQGVNLLAGKRTADGSEFEKRTADGSEFESPKKKAKVE

SEQ ID NO: 131 - protein, 2088 aa, synthetic construct
MPAAKRVKLDGGDKKYSIGLDIGTNSVGWAVITDEYKVPSKKFKVLGNTDRHSIKKNLIGALLFDSGETAEATRLKRTARRRYTRRKNRICYLQEIFSNEMAKVDDSFFHRLEESFLVEEDKKHERHPIFGNIVDEVAYHEKYPTIYHLRKKLVDSTDKADLRLIYLALAHMIKFRGHFLIEGDLNPDNSDVDKLFIQLVQTYNQLFEENPINASGVDAKAILSARLSKSRRLENLIAQLPGEKKNGLFGNLIALSLGLTPNFKSNFDLAEDAKLQLSKDTYDDDLDNLLAQIGDQYADLFLAAKNLSDAILLSDILRVNTEITKAPLSASMIKRYDEHHQDLTLLKALVRQQLPEKYKEIFFDQSKNGYAGYIDGGASQEEFYKFIKPILEKMDGTEELLVKLNREDLLRKQRTFDNGSIPHQIHLGELHAILRRQEDFYPFLKDNREKIEKILTFRIPYYVGPLARGNSRFAWMTRKSEETITPWNFEEVVDKGASAQSFIERMTNFDKNLPNEKVLPKHSLLYEYFTVYNELTKVKYVTEGMRKPAFLSGEQKKAIVDLLFKTNRKVTVKQLKEDYFKKIECFDSVEISGVEDRFNASLGTYHDLLKIIKDKDFLDNEENEDILEDIVLTLTLFEDREMIEERLKTYAHLFDDKVMKQLKRRRYTGWGRLSRKLINGIRDKQSGKTILDFLKSDGFANRNFMQLIHDDSLTFKEDIQKAQVSGQGDSLHEHIANLAGSPAIKKGILQTVKVVDELVKVMGRHKPENIVIEMARENQTTQKGQKNSRERMKRIEEGIKELGSQILKEHPVENTQLQNEKLYLYYLQNGRDMYVDQELDINRLSDYDVDHIVPQSFLKDDSIDNKVLTRSDKARGKSDNVPSEEVVKKMKNYWRQLLNAKLITQRKFDNLTKAERGGLSELDKAGFIKRQLVETRQITKHVAQILDSRMNTKYDENDKLIREVKVITLKSKLVSDFRKDFQFYKVREINNYHHAHDAYLNAVVGTALIKKYPKLESEFVYGDYKVYDVRKMIAKSEQEIGKATAKYFFYSNIMNFFKTEITLANGEIRKRPLIETNGETGEIVWDKGRDFATVRKVLSMPQVNIVKKTEVQTGGFSKESILPKRNSDKLIARKKDWDPKKYGGFDSPTVAYSVLVVAKVEKGKSKKLKSVKELLGITIMERSSFEKNPIDFLEAKGYKEVKKDLIIKLPKYSLFELENGRKRMLASAGELQKGNELALPSKYVNFLYLASHYEKLKGSPEDNEQKQLFVEQHKHYLDEIIEQISEFSKRVILADANLDKVLSAYNKHRDKPIREQAENIIHLFTLTNLGAPAAFKYFDTTIDRKRYTSTKEVLDATLIHQSITGLYETRIDLSQLGGDGGGGSPAPGGGGGTLQLDDEYRLYSPLVKPDQNIQFWLEQFPQAWAETAGMGLAKQVPPQVIQLKASATPVSVRQYPLSKEAQEGIRPHVQRLIQQGILVPVQSPWNTPLLPVRKPGTNDYRPVQDLREVNKRVQDIHPTVPNPYNLLCALPPQRSWYTVLDLKDAFFCLRLHPTSQPLFAFEWRDPGTGRTGQLTWTRLPQGFKNSPTIFNEALHRDLANFRIQHPQVTLLQYVDDLLLAGATKQDCLEGTKALLLELSDLGYRASAKKAQICRREVTYLGYSLRDGQRWLTEARKKTVVQIPAPTTAKQVREFLGTAGFCRLWIPGFATLAAPLYPLTKPKGEFSWAPEHQKAFDAIKKALLSAPALALPDVTKPFTLYVDERKGVARGVLTQTLGPWRRPVAYLSKKLDPVASGWPVCLKAIAAVAILVKDADKLTLGQNITVIAPHALENIVRQPPDRWMTNARMTHYQSLLLTERVTFAPPAALNPATLLPEETDEPVTHDCHQLLIEETGVRKDLTDIPLTGEVLTWFTDGSSYVVEGKRMAGAAVVDGTRTIWASSLPEGTSAQKAELMALTQALRLAEGKSINIYTDSRYAFATAHVHGAIYKQRGWLTSAGREIKNKEEILSLLEALHLPKRLAIIHCPGHQKAKDPISRGNQMADRVAKQAAQGVNLLAGKRTADGSEFEKRTADGSEFESPKKKAKVE

SEQ ID NO: 132 - protein, 2090 aa, synthetic construct
MPAAKRVKLDGGDKKYSIGLDIGTNSVGWAVITDEYKVPSKKFKVLGNTDRHSIKKNLIGALLFDSGETAEATRLKRTARRRYTRRKNRICYLQEIFSNEMAKVDDSFFHRLEESFLVEEDKKHERHPIFGNIVDEVAYHEKYPTIYHLRKKLVDSTDKADLRLIYLALAHMIKFRGHFLIEGDLNPDNSDVDKLFIQLVQTYNQLFEENPINASGVDAKAILSARLSKSRRLENLIAQLPGEKKNGLFGNLIALSLGLTPNFKSNFDLAEDAKLQLSKDTYDDDLDNLLAQIGDQYADLFLAAKNLSDAILLSDILRVNTEITKAPLSASMIKRYDEHHQDLTLLKALVRQQLPEKYKEIFFDQSKNGYAGYIDGGASQEEFYKFIKPILEKMDGTEELLVKLNREDLLRKQRTFDNGSIPHQIHLGELHAILRRQEDFYPFLKDNREKIEKILTFRIPYYVGPLARGNSRFAWMTRKSEETITPWNFEEVVDKGASAQSFIERMTNFDKNLPNEKVLPKHSLLYEYFTVYNELTKVKYVTEGMRKPAFLSGEQKKAIVDLLFKTNRKVTVKQLKEDYFKKIECFDSVEISGVEDRFNASLGTYHDLLKIIKDKDFLDNEENEDILEDIVLTLTLFEDREMIEERLKTYAHLFDDKVMKQLKRRRYTGWGRLSRKLINGIRDKQSGKTILDFLKSDGFANRNFMQLIHDDSLTFKEDIQKAQVSGQGDSLHEHIANLAGSPAIKKGILQTVKVVDELVKVMGRHKPENIVIEMARENQTTQKGQKNSRERMKRIEEGIKELGSQILKEHPVENTQLQNEKLYLYYLQNGRDMYVDQELDINRLSDYDVDHIVPQSFLKDDSIDNKVLTRSDKARGKSDNVPSEEVVKKMKNYWRQLLNAKLITQRKFDNLTKAERGGLSELDKAGFIKRQLVETRQITKHVAQILDSRMNTKYDENDKLIREVKVITLKSKLVSDFRKDFQFYKVREINNYHHAHDAYLNAVVGTALIKKYPKLESEFVYGDYKVYDVRKMIAKSEQEIGKATAKYFFYSNIMNFFKTEITLANGEIRKRPLIETNGETGEIVWDKGRDFATVRKVLSMPQVNIVKKTEVQTGGFSKESILPKRNSDKLIARKKDWDPKKYGGFDSPTVAYSVLVVAKVEKGKSKKLKSVKELLGITIMERSSFEKNPIDFLEAKGYKEVKKDLIIKLPKYSLFELENGRKRMLASAGELQKGNELALPSKYVNFLYLASHYEKLKGSPEDNEQKQLFVEQHKHYLDEIIEQISEFSKRVILADANLDKVLSAYNKHRDKPIREQAENIIHLFTLTNLGAPAAFKYFDTTIDRKRYTSTKEVLDATLIHQSITGLYETRIDLSQLGGDGGPAPEAAAKGSSGGTLQLDDEYRLYSPLVKPDQNIQFWLEQFPQAWAETAGMGLAKQVPPQVIQLKASATPVSVRQYPLSKEAQEGIRPHVQRLIQQGILVPVQSPWNTPLLPVRKPGTNDYRPVQDLREVNKRVQDIHPTVPNPYNLLCALPPQRSWYTVLDLKDAFFCLRLHPTSQPLFAFEWRDPGTGRTGQLTWTRLPQGFKNSPTIFNEALHRDLANFRIQHPQVTLLQYVDDLLLAGATKQDCLEGTKALLLELSDLGYRASAKKAQICRREVTYLGYSLRDGQRWLTEARKKTVVQIPAPTTAKQVREFLGTAGFCRLWIPGFATLAAPLYPLTKPKGEFSWAPEHQKAFDAIKKALLSAPALALPDVTKPFTLYVDERKGVARGVLTQTLGPWRRPVAYLSKKLDPVASGWPVCLKAIAAVAILVKDADKLTLGQNITVIAPHALENIVRQPPDRWMTNARMTHYQSLLLTERVTFAPPAALNPATLLPEETDEPVTHDCHQLLIEETGVRKDLTDIPLTGEVLTWFTDGSSYVVEGKRMAGAAVVDGTRTIWASSLPEGTSAQKAELMALTQALRLAEGKSINIYTDSRYAFATAHVHGAIYKQRGWLTSAGREIKNKEEILSLLEALHLPKRLAIIHCPGHQKAKDPISRGNQMADRVAKQAAQGVNLLAGKRTADGSEFEKRTADGSEFESPKKKAKVE

SEQ ID NO: 133 - protein, 2090 aa, synthetic construct
MPAAKRVKLDGGDKKYSIGLDIGTNSVGWAVITDEYKVPSKKFKVLGNTDRHSIKKNLIGALLFDSGETAEATRLKRTARRRYTRRKNRICYLQEIFSNEMAKVDDSFFHRLEESFLVEEDKKHERHPIFGNIVDEVAYHEKYPTIYHLRKKLVDSTDKADLRLIYLALAHMIKFRGHFLIEGDLNPDNSDVDKLFIQLVQTYNQLFEENPINASGVDAKAILSARLSKSRRLENLIAQLPGEKKNGLFGNLIALSLGLTPNFKSNFDLAEDAKLQLSKDTYDDDLDNLLAQIGDQYADLFLAAKNLSDAILLSDILRVNTEITKAPLSASMIKRYDEHHQDLTLLKALVRQQLPEKYKEIFFDQSKNGYAGYIDGGASQEEFYKFIKPILEKMDGTEELLVKLNREDLLRKQRTFDNGSIPHQIHLGELHAILRRQEDFYPFLKDNREKIEKILTFRIPYYVGPLARGNSRFAWMTRKSEETITPWNFEEVVDKGASAQSFIERMTNFDKNLPNEKVLPKHSLLYEYFTVYNELTKVKYVTEGMRKPAFLSGEQKKAIVDLLFKTNRKVTVKQLKEDYFKKIECFDSVEISGVEDRFNASLGTYHDLLKIIKDKDFLDNEENEDILEDIVLTLTLFEDREMIEERLKTYAHLFDDKVMKQLKRRRYTGWGRLSRKLINGIRDKQSGKTILDFLKSDGFANRNFMQLIHDDSLTFKEDIQKAQVSGQGDSLHEHIANLAGSPAIKKGILQTVKVVDELVKVMGRHKPENIVIEMARENQTTQKGQKNSRERMKRIEEGIKELGSQILKEHPVENTQLQNEKLYLYYLQNGRDMYVDQELDINRLSDYDVDHIVPQSFLKDDSIDNKVLTRSDKARGKSDNVPSEEVVKKMKNYWRQLLNAKLITQRKFDNLTKAERGGLSELDKAGFIKRQLVETRQITKHVAQILDSRMNTKYDENDKLIREVKVITLKSKLVSDFRKDFQFYKVREINNYHHAHDAYLNAVVGTALIKKYPKLESEFVYGDYKVYDVRKMIAKSEQEIGKATAKYFFYSNIMNFFKTEITLANGEIRKRPLIETNGETGEIVWDKGRDFATVRKVLSMPQVNIVKKTEVQTGGFSKESILPKRNSDKLIARKKDWDPKKYGGFDSPTVAYSVLVVAKVEKGKSKKLKSVKELLGITIMERSSFEKNPIDFLEAKGYKEVKKDLIIKLPKYSLFELENGRKRMLASAGELQKGNELALPSKYVNFLYLASHYEKLKGSPEDNEQKQLFVEQHKHYLDEIIEQISEFSKRVILADANLDKVLSAYNKHRDKPIREQAENIIHLFTLTNLGAPAAFKYFDTTIDRKRYTSTKEVLDATLIHQSITGLYETRIDLSQLGGDGGGSSEAAAKGGGGGTLQLDDEYRLYSPLVKPDQNIQFWLEQFPQAWAETAGMGLAKQVPPQVIQLKASATPVSVRQYPLSKEAQEGIRPHVQRLIQQGILVPVQSPWNTPLLPVRKPGTNDYRPVQDLREVNKRVQDIHPTVPNPYNLLCALPPQRSWYTVLDLKDAFFCLRLHPTSQPLFAFEWRDPGTGRTGQLTWTRLPQGFKNSPTIFNEALHRDLANFRIQHPQVTLLQYVDDLLLAGATKQDCLEGTKALLLELSDLGYRASAKKAQICRREVTYLGYSLRDGQRWLTEARKKTVVQIPAPTTAKQVREFLGTAGFCRLWIPGFATLAAPLYPLTKPKGEFSWAPEHQKAFDAIKKALLSAPALALPDVTKPFTLYVDERKGVARGVLTQTLGPWRRPVAYLSKKLDPVASGWPVCLKAIAAVAILVKDADKLTLGQNITVIAPHALENIVRQPPDRWMTNARMTHYQSLLLTERVTFAPPAALNPATLLPEETDEPVTHDCHQLLIEETGVRKDLTDIPLTGEVLTWFTDGSSYVVEGKRMAGAAVVDGTRTIWASSLPEGTSAQKAELMALTQALRLAEGKSINIYTDSRYAFATAHVHGAIYKQRGWLTSAGREIKNKEEILSLLEALHLPKRLAIIHCPGHQKAKDPISRGNQMADRVAKQAAQGVNLLAGKRTADGSEFEKRTADGSEFESPKKKAKVE

SEQ ID NO: 134 - protein, 2088 aa, synthetic construct
MPAAKRVKLDGGDKKYSIGLDIGTNSVGWAVITDEYKVPSKKFKVLGNTDRHSIKKNLIGALLFDSGETAEATRLKRTARRRYTRRKNRICYLQEIFSNEMAKVDDSFFHRLEESFLVEEDKKHERHPIFGNIVDEVAYHEKYPTIYHLRKKLVDSTDKADLRLIYLALAHMIKFRGHFLIEGDLNPDNSDVDKLFIQLVQTYNQLFEENPINASGVDAKAILSARLSKSRRLENLIAQLPGEKKNGLFGNLIALSLGLTPNFKSNFDLAEDAKLQLSKDTYDDDLDNLLAQIGDQYADLFLAAKNLSDAILLSDILRVNTEITKAPLSASMIKRYDEHHQDLTLLKALVRQQLPEKYKEIFFDQSKNGYAGYIDGGASQEEFYKFIKPILEKMDGTEELLVKLNREDLLRKQRTFDNGSIPHQIHLGELHAILRRQEDFYPFLKDNREKIEKILTFRIPYYVGPLARGNSRFAWMTRKSEETITPWNFEEVVDKGASAQSFIERMTNFDKNLPNEKVLPKHSLLYEYFTVYNELTKVKYVTEGMRKPAFLSGEQKKAIVDLLFKTNRKVTVKQLKEDYFKKIECFDSVEISGVEDRFNASLGTYHDLLKIIKDKDFLDNEENEDILEDIVLTLTLFEDREMIEERLKTYAHLFDDKVMKQLKRRRYTGWGRLSRKLINGIRDKQSGKTILDFLKSDGFANRNFMQLIHDDSLTFKEDIQKAQVSGQGDSLHEHIANLAGSPAIKKGILQTVKVVDELVKVMGRHKPENIVIEMARENQTTQKGQKNSRERMKRIEEGIKELGSQILKEHPVENTQLQNEKLYLYYLQNGRDMYVDQELDINRLSDYDVDHIVPQSFLKDDSIDNKVLTRSDKARGKSDNVPSEEVVKKMKNYWRQLLNAKLITQRKFDNLTKAERGGLSELDKAGFIKRQLVETRQITKHVAQILDSRMNTKYDENDKLIREVKVITLKSKLVSDFRKDFQFYKVREINNYHHAHDAYLNAVVGTALIKKYPKLESEFVYGDYKVYDVRKMIAKSEQEIGKATAKYFFYSNIMNFFKTEITLANGEIRKRPLIETNGETGEIVWDKGRDFATVRKVLSMPQVNIVKKTEVQTGGFSKESILPKRNSDKLIARKKDWDPKKYGGFDSPTVAYSVLVVAKVEKGKSKKLKSVKELLGITIMERSSFEKNPIDFLEAKGYKEVKKDLIIKLPKYSLFELENGRKRMLASAGELQKGNELALPSKYVNFLYLASHYEKLKGSPEDNEQKQLFVEQHKHYLDEIIEQISEFSKRVILADANLDKVLSAYNKHRDKPIREQAENIIHLFTLTNLGAPAAFKYFDTTIDRKRYTSTKEVLDATLIHQSITGLYETRIDLSQLGGDGGPAPGSSGGSGGTLQLDDEYRLYSPLVKPDQNIQFWLEQFPQAWAETAGMGLAKQVPPQVIQLKASATPVSVRQYPLSKEAQEGIRPHVQRLIQQGILVPVQSPWNTPLLPVRKPGTNDYRPVQDLREVNKRVQDIHPTVPNPYNLLCALPPQRSWYTVLDLKDAFFCLRLHPTSQPLFAFEWRDPGTGRTGQLTWTRLPQGFKNSPTIFNEALHRDLANFRIQHPQVTLLQYVDDLLLAGATKQDCLEGTKALLLELSDLGYRASAKKAQICRREVTYLGYSLRDGQRWLTEARKKTVVQIPAPTTAKQVREFLGTAGFCRLWIPGFATLAAPLYPLTKPKGEFSWAPEHQKAFDAIKKALLSAPALALPDVTKPFTLYVDERKGVARGVLTQTLGPWRRPVAYLSKKLDPVASGWPVCLKAIAAVAILVKDADKLTLGQNITVIAPHALENIVRQPPDRWMTNARMTHYQSLLLTERVTFAPPAALNPATLLPEETDEPVTHDCHQLLIEETGVRKDLTDIPLTGEVLTWFTDGSSYVVEGKRMAGAAVVDGTRTIWASSLPEGTSAQKAELMALTQALRLAEGKSINIYTDSRYAFATAHVHGAIYKQRGWLTSAGREIKNKEEILSLLEALHLPKRLAIIHCPGHQKAKDPISRGNQMADRVAKQAAQGVNLLAGKRTADGSEFEKRTADGSEFESPKKKAKVE

SEQ ID NO: 135 - protein, 2088 aa, synthetic construct
MPAAKRVKLDGGDKKYSIGLDIGTNSVGWAVITDEYKVPSKKFKVLGNTDRHSIKKNLIGALLFDSGETAEATRLKRTARRRYTRRKNRICYLQEIFSNEMAKVDDSFFHRLEESFLVEEDKKHERHPIFGNIVDEVAYHEKYPTIYHLRKKLVDSTDKADLRLIYLALAHMIKFRGHFLIEGDLNPDNSDVDKLFIQLVQTYNQLFEENPINASGVDAKAILSARLSKSRRLENLIAQLPGEKKNGLFGNLIALSLGLTPNFKSNFDLAEDAKLQLSKDTYDDDLDNLLAQIGDQYADLFLAAKNLSDAILLSDILRVNTEITKAPLSASMIKRYDEHHQDLTLLKALVRQQLPEKYKEIFFDQSKNGYAGYIDGGASQEEFYKFIKPILEKMDGTEELLVKLNREDLLRKQRTFDNGSIPHQIHLGELHAILRRQEDFYPFLKDNREKIEKILTFRIPYYVGPLARGNSRFAWMTRKSEETITPWNFEEVVDKGASAQSFIERMTNFDKNLPNEKVLPKHSLLYEYFTVYNELTKVKYVTEGMRKPAFLSGEQKKAIVDLLFKTNRKVTVKQLKEDYFKKIECFDSVEISGVEDRFNASLGTYHDLLKIIKDKDFLDNEENEDILEDIVLTLTLFEDREMIEERLKTYAHLFDDKVMKQLKRRRYTGWGRLSRKLINGIRDKQSGKTILDFLKSDGFANRNFMQLIHDDSLTFKEDIQKAQVSGQGDSLHEHIANLAGSPAIKKGILQTVKVVDELVKVMGRHKPENIVIEMARENQTTQKGQKNSRERMKRIEEGIKELGSQILKEHPVENTQLQNEKLYLYYLQNGRDMYVDQELDINRLSDYDVDHIVPQSFLKDDSIDNKVLTRSDKARGKSDNVPSEEVVKKMKNYWRQLLNAKLITQRKFDNLTKAERGGLSELDKAGFIKRQLVETRQITKHVAQILDSRMNTKYDENDKLIREVKVITLKSKLVSDFRKDFQFYKVREINNYHHAHDAYLNAVVGTALIKKYPKLESEFVYGDYKVYDVRKMIAKSEQEIGKATAKYFFYSNIMNFFKTEITLANGEIRKRPLIETNGETGEIVWDKGRDFATVRKVLSMPQVNIVKKTEVQTGGFSKESILPKRNSDKLIARKKDWDPKKYGGFDSPTVAYSVLVVAKVEKGKSKKLKSVKELLGITIMERSSFEKNPIDFLEAKGYKEVKKDLIIKLPKYSLFELENGRKRMLASAGELQKGNELALPSKYVNFLYLASHYEKLKGSPEDNEQKQLFVEQHKHYLDEIIEQISEFSKRVILADANLDKVLSAYNKHRDKPIREQAENIIHLFTLTNLGAPAAFKYFDTTIDRKRYTSTKEVLDATLIHQSITGLYETRIDLSQLGGDGGPAPGGSGSSGGTLQLDDEYRLYSPLVKPDQNIQFWLEQFPQAWAETAGMGLAKQVPPQVIQLKASATPVSVRQYPLSKEAQEGIRPHVQRLIQQGILVPVQSPWNTPLLPVRKPGTNDYRPVQDLREVNKRVQDIHPTVPNPYNLLCALPPQRSWYTVLDLKDAFFCLRLHPTSQPLFAFEWRDPGTGRTGQLTWTRLPQGFKNSPTIFNEALHRDLANFRIQHPQVTLLQYVDDLLLAGATKQDCLEGTKALLLELSDLGYRASAKKAQICRREVTYLGYSLRDGQRWLTEARKKTVVQIPAPTTAKQVREFLGTAGFCRLWIPGFATLAAPLYPLTKPKGEFSWAPEHQKAFDAIKKALLSAPALALPDVTKPFTLYVDERKGVARGVLTQTLGPWRRPVAYLSKKLDPVASGWPVCLKAIAAVAILVKDADKLTLGQNITVIAPHALENIVRQPPDRWMTNARMTHYQSLLLTERVTFAPPAALNPATLLPEETDEPVTHDCHQLLIEETGVRKDLTDIPLTGEVLTWFTDGSSYVVEGKRMAGAAVVDGTRTIWASSLPEGTSAQKAELMALTQALRLAEGKSINIYTDSRYAFATAHVHGAIYKQRGWLTSAGREIKNKEEILSLLEALHLPKRLAIIHCPGHQKAKDPISRGNQMADRVAKQAAQGVNLLAGKRTADGSEFEKRTADGSEFESPKKKAKVE

SEQ ID NO: 136 - protein, 2090 aa, synthetic construct
MPAAKRVKLDGGDKKYSIGLDIGTNSVGWAVITDEYKVPSKKFKVLGNTDRHSIKKNLIGALLFDSGETAEATRLKRTARRRYTRRKNRICYLQEIFSNEMAKVDDSFFHRLEESFLVEEDKKHERHPIFGNIVDEVAYHEKYPTIYHLRKKLVDSTDKADLRLIYLALAHMIKFRGHFLIEGDLNPDNSDVDKLFIQLVQTYNQLFEENPINASGVDAKAILSARLSKSRRLENLIAQLPGEKKNGLFGNLIALSLGLTPNFKSNFDLAEDAKLQLSKDTYDDDLDNLLAQIGDQYADLFLAAKNLSDAILLSDILRVNTEITKAPLSASMIKRYDEHHQDLTLLKALVRQQLPEKYKEIFFDQSKNGYAGYIDGGASQEEFYKFIKPILEKMDGTEELLVKLNREDLLRKQRTFDNGSIPHQIHLGELHAILRRQEDFYPFLKDNREKIEKILTFRIPYYVGPLARGNSRFAWMTRKSEETITPWNFEEVVDKGASAQSFIERMTNFDKNLPNEKVLPKHSLLYEYFTVYNELTKVKYVTEGMRKPAFLSGEQKKAIVDLLFKTNRKVTVKQLKEDYFKKIECFDSVEISGVEDRFNASLGTYHDLLKIIKDKDFLDNEENEDILEDIVLTLTLFEDREMIEERLKTYAHLFDDKVMKQLKRRRYTGWGRLSRKLINGIRDKQSGKTILDFLKSDGFANRNFMQLIHDDSLTFKEDIQKAQVSGQGDSLHEHIANLAGSPAIKKGILQTVKVVDELVKVMGRHKPENIVIEMARENQTTQKGQKNSRERMKRIEEGIKELGSQILKEHPVENTQLQNEKLYLYYLQNGRDMYVDQELDINRLSDYDVDHIVPQSFLKDDSIDNKVLTRSDKARGKSDNVPSEEVVKKMKNYWRQLLNAKLITQRKFDNLTKAERGGLSELDKAGFIKRQLVETRQITKHVAQILDSRMNTKYDENDKLIREVKVITLKSKLVSDFRKDFQFYKVREINNYHHAHDAYLNAVVGTALIKKYPKLESEFVYGDYKVYDVRKMIAKSEQEIGKATAKYFFYSNIMNFFKTEITLANGEIRKRPLIETNGETGEIVWDKGRDFATVRKVLSMPQVNIVKKTEVQTGGFSKESILPKRNSDKLIARKKDWDPKKYGGFDSPTVAYSVLVVAKVEKGKSKKLKSVKELLGITIMERSSFEKNPIDFLEAKGYKEVKKDLIIKLPKYSLFELENGRKRMLASAGELQKGNELALPSKYVNFLYLASHYEKLKGSPEDNEQKQLFVEQHKHYLDEIIEQISEFSKRVILADANLDKVLSAYNKHRDKPIREQAENIIHLFTLTNLGAPAAFKYFDTTIDRKRYTSTKEVLDATLIHQSITGLYETRIDLSQLGGDGGEAAAKGGSGSSGGTLQLDDEYRLYSPLVKPDQNIQFWLEQFPQAWAETAGMGLAKQVPPQVIQLKASATPVSVRQYPLSKEAQEGIRPHVQRLIQQGILVPVQSPWNTPLLPVRKPGTNDYRPVQDLREVNKRVQDIHPTVPNPYNLLCALPPQRSWYTVLDLKDAFFCLRLHPTSQPLFAFEWRDPGTGRTGQLTWTRLPQGFKNSPTIFNEALHRDLANFRIQHPQVTLLQYVDDLLLAGATKQDCLEGTKALLLELSDLGYRASAKKAQICRREVTYLGYSLRDGQRWLTEARKKTVVQIPAPTTAKQVREFLGTAGFCRLWIPGFATLAAPLYPLTKPKGEFSWAPEHQKAFDAIKKALLSAPALALPDVTKPFTLYVDERKGVARGVLTQTLGPWRRPVAYLSKKLDPVASGWPVCLKAIAAVAILVKDADKLTLGQNITVIAPHALENIVRQPPDRWMTNARMTHYQSLLLTERVTFAPPAALNPATLLPEETDEPVTHDCHQLLIEETGVRKDLTDIPLTGEVLTWFTDGSSYVVEGKRMAGAAVVDGTRTIWASSLPEGTSAQKAELMALTQALRLAEGKSINIYTDSRYAFATAHVHGAIYKQRGWLTSAGREIKNKEEILSLLEALHLPKRLAIIHCPGHQKAKDPISRGNQMADRVAKQAAQGVNLLAGKRTADGSEFEKRTADGSEFESPKKKAKVE

SEQ ID NO: 137 - protein, 2099 aa, synthetic construct
MPAAKRVKLDGGDKKYSIGLDIGTNSVGWAVITDEYKVPSKKFKVLGNTDRHSIKKNLIGALLFDSGETAEATRLKRTARRRYTRRKNRICYLQEIFSNEMAKVDDSFFHRLEESFLVEEDKKHERHPIFGNIVDEVAYHEKYPTIYHLRKKLVDSTDKADLRLIYLALAHMIKFRGHFLIEGDLNPDNSDVDKLFIQLVQTYNQLFEENPINASGVDAKAILSARLSKSRRLENLIAQLPGEKKNGLFGNLIALSLGLTPNFKSNFDLAEDAKLQLSKDTYDDDLDNLLAQIGDQYADLFLAAKNLSDAILLSDILRVNTEITKAPLSASMIKRYDEHHQDLTLLKALVRQQLPEKYKEIFFDQSKNGYAGYIDGGASQEEFYKFIKPILEKMDGTEELLVKLNREDLLRKQRTFDNGSIPHQIHLGELHAILRRQEDFYPFLKDNREKIEKILTFRIPYYVGPLARGNSRFAWMTRKSEETITPWNFEEVVDKGASAQSFIERMTNFDKNLPNEKVLPKHSLLYEYFTVYNELTKVKYVTEGMRKPAFLSGEQKKAIVDLLFKTNRKVTVKQLKEDYFKKIECFDSVEISGVEDRFNASLGTYHDLLKIIKDKDFLDNEENEDILEDIVLTLTLFEDREMIEERLKTYAHLFDDKVMKQLKRRRYTGWGRLSRKLINGIRDKQSGKTILDFLKSDGFANRNFMQLIHDDSLTFKEDIQKAQVSGQGDSLHEHIANLAGSPAIKKGILQTVKVVDELVKVMGRHKPENIVIEMARENQTTQKGQKNSRERMKRIEEGIKELGSQILKEHPVENTQLQNEKLYLYYLQNGRDMYVDQELDINRLSDYDVDHIVPQSFLKDDSIDNKVLTRSDKARGKSDNVPSEEVVKKMKNYWRQLLNAKLITQRKFDNLTKAERGGLSELDKAGFIKRQLVETRQITKHVAQILDSRMNTKYDENDKLIREVKVITLKSKLVSDFRKDFQFYKVREINNYHHAHDAYLNAVVGTALIKKYPKLESEFVYGDYKVYDVRKMIAKSEQEIGKATAKYFFYSNIMNFFKTEITLANGEIRKRPLIETNGETGEIVWDKGRDFATVRKVLSMPQVNIVKKTEVQTGGFSKESILPKRNSDKLIARKKDWDPKKYGGFDSPTVAYSVLVVAKVEKGKSKKLKSVKELLGITIMERSSFEKNPIDFLEAKGYKEVKKDLIIKLPKYSLFELENGRKRMLASAGELQKGNELALPSKYVNFLYLASHYEKLKGSPEDNEQKQLFVEQHKHYLDEIIEQISEFSKRVILADANLDKVLSAYNKHRDKPIREQAENIIHLFTLTNLGAPAAFKYFDTTIDRKRYTSTKEVLDATLIHQSITGLYETRIDLSQLGGDGGEAAAKEAAAKEAAAKEAAAKGGTLQLDDEYRLYSPLVKPDQNIQFWLEQFPQAWAETAGMGLAKQVPPQVIQLKASATPVSVRQYPLSKEAQEGIRPHVQRLIQQGILVPVQSPWNTPLLPVRKPGTNDYRPVQDLREVNKRVQDIHPTVPNPYNLLCALPPQRSWYTVLDLKDAFFCLRLHPTSQPLFAFEWRDPGTGRTGQLTWTRLPQGFKNSPTIFNEALHRDLANFRIQHPQVTLLQYVDDLLLAGATKQDCLEGTKALLLELSDLGYRASAKKAQICRREVTYLGYSLRDGQRWLTEARKKTVVQIPAPTTAKQVREFLGTAGFCRLWIPGFATLAAPLYPLTKPKGEFSWAPEHQKAFDAIKKALLSAPALALPDVTKPFTLYVDERKGVARGVLTQTLGPWRRPVAYLSKKLDPVASGWPVCLKAIAAVAILVKDADKLTLGQNITVIAPHALENIVRQPPDRWMTNARMTHYQSLLLTERVTFAPPAALNPATLLPEETDEPVTHDCHQLLIEETGVRKDLTDIPLTGEVLTWFTDGSSYVVEGKRMAGAAVVDGTRTIWASSLPEGTSAQKAELMALTQALRLAEGKSINIYTDSRYAFATAHVHGAIYKQRGWLTSAGREIKNKEEILSLLEALHLPKRLAIIHCPGHQKAKDPISRGNQMADRVAKQAAQGVNLLAGKRTADGSEFEKRTADGSEFESPKKKAKVE

SEQ ID NO: 138 - protein, 2090 aa, synthetic construct
MPAAKRVKLDGGDKKYSIGLDIGTNSVGWAVITDEYKVPSKKFKVLGNTDRHSIKKNLIGALLFDSGETAEATRLKRTARRRYTRRKNRICYLQEIFSNEMAKVDDSFFHRLEESFLVEEDKKHERHPIFGNIVDEVAYHEKYPTIYHLRKKLVDSTDKADLRLIYLALAHMIKFRGHFLIEGDLNPDNSDVDKLFIQLVQTYNQLFEENPINASGVDAKAILSARLSKSRRLENLIAQLPGEKKNGLFGNLIALSLGLTPNFKSNFDLAEDAKLQLSKDTYDDDLDNLLAQIGDQYADLFLAAKNLSDAILLSDILRVNTEITKAPLSASMIKRYDEHHQDLTLLKALVRQQLPEKYKEIFFDQSKNGYAGYIDGGASQEEFYKFIKPILEKMDGTEELLVKLNREDLLRKQRTFDNGSIPHQIHLGELHAILRRQEDFYPFLKDNREKIEKILTFRIPYYVGPLARGNSRFAWMTRKSEETITPWNFEEVVDKGASAQSFIERMTNFDKNLPNEKVLPKHSLLYEYFTVYNELTKVKYVTEGMRKPAFLSGEQKKAIVDLLFKTNRKVTVKQLKEDYFKKIECFDSVEISGVEDRFNASLGTYHDLLKIIKDKDFLDNEENEDILEDIVLTLTLFEDREMIEERLKTYAHLFDDKVMKQLKRRRYTGWGRLSRKLINGIRDKQSGKTILDFLKSDGFANRNFMQLIHDDSLTFKEDIQKAQVSGQGDSLHEHIANLAGSPAIKKGILQTVKVVDELVKVMGRHKPENIVIEMARENQTTQKGQKNSRERMKRIEEGIKELGSQILKEHPVENTQLQNEKLYLYYLQNGRDMYVDQELDINRLSDYDVDHIVPQSFLKDDSIDNKVLTRSDKARGKSDNVPSEEVVKKMKNYWRQLLNAKLITQRKFDNLTKAERGGLSELDKAGFIKRQLVETRQITKHVAQILDSRMNTKYDENDKLIREVKVITLKSKLVSDFRKDFQFYKVREINNYHHAHDAYLNAVVGTALIKKYPKLESEFVYGDYKVYDVRKMIAKSEQEIGKATAKYFFYSNIMNFFKTEITLANGEIRKRPLIETNGETGEIVWDKGRDFATVRKVLSMPQVNIVKKTEVQTGGFSKESILPKRNSDKLIARKKDWDPKKYGGFDSPTVAYSVLVVAKVEKGKSKKLKSVKELLGITIMERSSFEKNPIDFLEAKGYKEVKKDLIIKLPKYSLFELENGRKRMLASAGELQKGNELALPSKYVNFLYLASHYEKLKGSPEDNEQKQLFVEQHKHYLDEIIEQISEFSKRVILADANLDKVLSAYNKHRDKPIREQAENIIHLFTLTNLGAPAAFKYFDTTIDRKRYTSTKEVLDATLIHQSITGLYETRIDLSQLGGDGGPAPGGSEAAAKGGTLQLDDEYRLYSPLVKPDQNIQFWLEQFPQAWAETAGMGLAKQVPPQVIQLKASATPVSVRQYPLSKEAQEGIRPHVQRLIQQGILVPVQSPWNTPLLPVRKPGTNDYRPVQDLREVNKRVQDIHPTVPNPYNLLCALPPQRSWYTVLDLKDAFFCLRLHPTSQPLFAFEWRDPGTGRTGQLTWTRLPQGFKNSPTIFNEALHRDLANFRIQHPQVTLLQYVDDLLLAGATKQDCLEGTKALLLELSDLGYRASAKKAQICRREVTYLGYSLRDGQRWLTEARKKTVVQIPAPTTAKQVREFLGTAGFCRLWIPGFATLAAPLYPLTKPKGEFSWAPEHQKAFDAIKKALLSAPALALPDVTKPFTLYVDERKGVARGVLTQTLGPWRRPVAYLSKKLDPVASGWPVCLKAIAAVAILVKDADKLTLGQNITVIAPHALENIVRQPPDRWMTNARMTHYQSLLLTERVTFAPPAALNPATLLPEETDEPVTHDCHQLLIEETGVRKDLTDIPLTGEVLTWFTDGSSYVVEGKRMAGAAVVDGTRTIWASSLPEGTSAQKAELMALTQALRLAEGKSINIYTDSRYAFATAHVHGAIYKQRGWLTSAGREIKNKEEILSLLEALHLPKRLAIIHCPGHQKAKDPISRGNQMADRVAKQAAQGVNLLAGKRTADGSEFEKRTADGSEFESPKKKAKVE

SEQ ID NO: 139 - protein, 2090 aa, synthetic construct
MPAAKRVKLDGGDKKYSIGLDIGTNSVGWAVITDEYKVPSKKFKVLGNTDRHSIKKNLIGALLFDSGETAEATRLKRTARRRYTRRKNRICYLQEIFSNEMAKVDDSFFHRLEESFLVEEDKKHERHPIFGNIVDEVAYHEKYPTIYHLRKKLVDSTDKADLRLIYLALAHMIKFRGHFLIEGDLNPDNSDVDKLFIQLVQTYNQLFEENPINASGVDAKAILSARLSKSRRLENLIAQLPGEKKNGLFGNLIALSLGLTPNFKSNFDLAEDAKLQLSKDTYDDDLDNLLAQIGDQYADLFLAAKNLSDAILLSDILRVNTEITKAPLSASMIKRYDEHHQDLTLLKALVRQQLPEKYKEIFFDQSKNGYAGYIDGGASQEEFYKFIKPILEKMDGTEELLVKLNREDLLRKQRTFDNGSIPHQIHLGELHAILRRQEDFYPFLKDNREKIEKILTFRIPYYVGPLARGNSRFAWMTRKSEETITPWNFEEVVDKGASAQSFIERMTNFDKNLPNEKVLPKHSLLYEYFTVYNELTKVKYVTEGMRKPAFLSGEQKKAIVDLLFKTNRKVTVKQLKEDYFKKIECFDSVEISGVEDRFNASLGTYHDLLKIIKDKDFLDNEENEDILEDIVLTLTLFEDREMIEERLKTYAHLFDDKVMKQLKRRRYTGWGRLSRKLINGIRDKQSGKTILDFLKSDGFANRNFMQLIHDDSLTFKEDIQKAQVSGQGDSLHEHIANLAGSPAIKKGILQTVKVVDELVKVMGRHKPENIVIEMARENQTTQKGQKNSRERMKRIEEGIKELGSQILKEHPVENTQLQNEKLYLYYLQNGRDMYVDQELDINRLSDYDVDHIVPQSFLKDDSIDNKVLTRSDKARGKSDNVPSEEVVKKMKNYWRQLLNAKLITQRKFDNLTKAERGGLSELDKAGFIKRQLVETRQITKHVAQILDSRMNTKYDENDKLIREVKVITLKSKLVSDFRKDFQFYKVREINNYHHAHDAYLNAVVGTALIKKYPKLESEFVYGDYKVYDVRKMIAKSEQEIGKATAKYFFYSNIMNFFKTEITLANGEIRKRPLIETNGETGEIVWDKGRDFATVRKVLSMPQVNIVKKTEVQTGGFSKESILPKRNSDKLIARKKDWDPKKYGGFDSPTVAYSVLVVAKVEKGKSKKLKSVKELLGITIMERSSFEKNPIDFLEAKGYKEVKKDLIIKLPKYSLFELENGRKRMLASAGELQKGNELALPSKYVNFLYLASHYEKLKGSPEDNEQKQLFVEQHKHYLDEIIEQISEFSKRVILADANLDKVLSAYNKHRDKPIREQAENIIHLFTLTNLGAPAAFKYFDTTIDRKRYTSTKEVLDATLIHQSITGLYETRIDLSQLGGDGGGGSGSSEAAAKGGTLQLDDEYRLYSPLVKPDQNIQFWLEQFPQAWAETAGMGLAKQVPPQVIQLKASATPVSVRQYPLSKEAQEGIRPHVQRLIQQGILVPVQSPWNTPLLPVRKPGTNDYRPVQDLREVNKRVQDIHPTVPNPYNLLCALPPQRSWYTVLDLKDAFFCLRLHPTSQPLFAFEWRDPGTGRTGQLTWTRLPQGFKNSPTIFNEALHRDLANFRIQHPQVTLLQYVDDLLLAGATKQDCLEGTKALLLELSDLGYRASAKKAQICRREVTYLGYSLRDGQRWLTEARKKTVVQIPAPTTAKQVREFLGTAGFCRLWIPGFATLAAPLYPLTKPKGEFSWAPEHQKAFDAIKKALLSAPALALPDVTKPFTLYVDERKGVARGVLTQTLGPWRRPVAYLSKKLDPVASGWPVCLKAIAAVAILVKDADKLTLGQNITVIAPHALENIVRQPPDRWMTNARMTHYQSLLLTERVTFAPPAALNPATLLPEETDEPVTHDCHQLLIEETGVRKDLTDIPLTGEVLTWFTDGSSYVVEGKRMAGAAVVDGTRTIWASSLPEGTSAQKAELMALTQALRLAEGKSINIYTDSRYAFATAHVHGAIYKQRGWLTSAGREIKNKEEILSLLEALHLPKRLAIIHCPGHQKAKDPISRGNQMADRVAKQAAQGVNLLAGKRTADGSEFEKRTADGSEFESPKKKAKVE

SEQ ID NO: 140 - protein, 2112 aa, synthetic construct
MPAAKRVKLDGGDKKYSIGLDIGTNSVGWAVITDEYKVPSKKFKVLGNTDRHSIKKNLIGALLFDSGETAEATRLKRTARRRYTRRKNRICYLQEIFSNEMAKVDDSFFHRLEESFLVEEDKKHERHPIFGNIVDEVAYHEKYPTIYHLRKKLVDSTDKADLRLIYLALAHMIKFRGHFLIEGDLNPDNSDVDKLFIQLVQTYNQLFEENPINASGVDAKAILSARLSKSRRLENLIAQLPGEKKNGLFGNLIALSLGLTPNFKSNFDLAEDAKLQLSKDTYDDDLDNLLAQIGDQYADLFLAAKNLSDAILLSDILRVNTEITKAPLSASMIKRYDEHHQDLTLLKALVRQQLPEKYKEIFFDQSKNGYAGYIDGGASQEEFYKFIKPILEKMDGTEELLVKLNREDLLRKQRTFDNGSIPHQIHLGELHAILRRQEDFYPFLKDNREKIEKILTFRIPYYVGPLARGNSRFAWMTRKSEETITPWNFEEVVDKGASAQSFIERMTNFDKNLPNEKVLPKHSLLYEYFTVYNELTKVKYVTEGMRKPAFLSGEQKKAIVDLLFKTNRKVTVKQLKEDYFKKIECFDSVEISGVEDRFNASLGTYHDLLKIIKDKDFLDNEENEDILEDIVLTLTLFEDREMIEERLKTYAHLFDDKVMKQLKRRRYTGWGRLSRKLINGIRDKQSGKTILDFLKSDGFANRNFMQLIHDDSLTFKEDIQKAQVSGQGDSLHEHIANLAGSPAIKKGILQTVKVVDELVKVMGRHKPENIVIEMARENQTTQKGQKNSRERMKRIEEGIKELGSQILKEHPVENTQLQNEKLYLYYLQNGRDMYVDQELDINRLSDYDVDHIVPQSFLKDDSIDNKVLTRSDKARGKSDNVPSEEVVKKMKNYWRQLLNAKLITQRKFDNLTKAERGGLSELDKAGFIKRQLVETRQITKHVAQILDSRMNTKYDENDKLIREVKVITLKSKLVSDFRKDFQFYKVREINNYHHAHDAYLNAVVGTALIKKYPKLESEFVYGDYKVYDVRKMIAKSEQEIGKATAKYFFYSNIMNFFKTEITLANGEIRKRPLIETNGETGEIVWDKGRDFATVRKVLSMPQVNIVKKTEVQTGGFSKESILPKRNSDKLIARKKDWDPKKYGGFDSPTVAYSVLVVAKVEKGKSKKLKSVKELLGITIMERSSFEKNPIDFLEAKGYKEVKKDLIIKLPKYSLFELENGRKRMLASAGELQKGNELALPSKYVNFLYLASHYEKLKGSPEDNEQKQLFVEQHKHYLDEIIEQISEFSKRVILADANLDKVLSAYNKHRDKPIREQAENIIHLFTLTNLGAPAAFKYFDTTIDRKRYTSTKEVLDATLIHQSITGLYETRIDLSQLGGDGGSGGSSGGSSGSETPGTSESATPESSGGSSGGSSGGTLQLDDEYRLYSPLVKPDQNIQFWLEQFPQAWAETAGMGLAKQVPPQVIQLKASATPVSVRQYPLSKEAQEGIRPHVQRLIQQGILVPVQSPWNTPLLPVRKPGTNDYRPVQDLREVNKRVQDIHPTVPNPYNLLCALPPQRSWYTVLDLKDAFFCLRLHPTSQPLFAFEWRDPGTGRTGQLTWTRLPQGFKNSPTIFNEALHRDLANFRIQHPQVTLLQYVDDLLLAGATKQDCLEGTKALLLELSDLGYRASAKKAQICRREVTYLGYSLRDGQRWLTEARKKTVVQIPAPTTAKQVREFLGTAGFCRLWIPGFATLAAPLYPLTKPKGEFSWAPEHQKAFDAIKKALLSAPALALPDVTKPFTLYVDERKGVARGVLTQTLGPWRRPVAYLSKKLDPVASGWPVCLKAIAAVAILVKDADKLTLGQNITVIAPHALENIVRQPPDRWMTNARMTHYQSLLLTERVTFAPPAALNPATLLPEETDEPVTHDCHQLLIEETGVRKDLTDIPLTGEVLTWFTDGSSYVVEGKRMAGAAVVDGTRTIWASSLPEGTSAQKAELMALTQALRLAEGKSINIYTDSRYAFATAHVHGAIYKQRGWLTSAGREIKNKEEILSLLEALHLPKRLAIIHCPGHQKAKDPISRGNQMADRVAKQAAQGVNLLAGKRTADGSEFEKRTADGSEFESPKKKAKVE

SEQ ID NO: 141 - protein, 2090 aa, synthetic construct
MPAAKRVKLDGGDKKYSIGLDIGTNSVGWAVITDEYKVPSKKFKVLGNTDRHSIKKNLIGALLFDSGETAEATRLKRTARRRYTRRKNRICYLQEIFSNEMAKVDDSFFHRLEESFLVEEDKKHERHPIFGNIVDEVAYHEKYPTIYHLRKKLVDSTDKADLRLIYLALAHMIKFRGHFLIEGDLNPDNSDVDKLFIQLVQTYNQLFEENPINASGVDAKAILSARLSKSRRLENLIAQLPGEKKNGLFGNLIALSLGLTPNFKSNFDLAEDAKLQLSKDTYDDDLDNLLAQIGDQYADLFLAAKNLSDAILLSDILRVNTEITKAPLSASMIKRYDEHHQDLTLLKALVRQQLPEKYKEIFFDQSKNGYAGYIDGGASQEEFYKFIKPILEKMDGTEELLVKLNREDLLRKQRTFDNGSIPHQIHLGELHAILRRQEDFYPFLKDNREKIEKILTFRIPYYVGPLARGNSRFAWMTRKSEETITPWNFEEVVDKGASAQSFIERMTNFDKNLPNEKVLPKHSLLYEYFTVYNELTKVKYVTEGMRKPAFLSGEQKKAIVDLLFKTNRKVTVKQLKEDYFKKIECFDSVEISGVEDRFNASLGTYHDLLKIIKDKDFLDNEENEDILEDIVLTLTLFEDREMIEERLKTYAHLFDDKVMKQLKRRRYTGWGRLSRKLINGIRDKQSGKTILDFLKSDGFANRNFMQLIHDDSLTFKEDIQKAQVSGQGDSLHEHIANLAGSPAIKKGILQTVKVVDELVKVMGRHKPENIVIEMARENQTTQKGQKNSRERMKRIEEGIKELGSQILKEHPVENTQLQNEKLYLYYLQNGRDMYVDQELDINRLSDYDVDHIVPQSFLKDDSIDNKVLTRSDKARGKSDNVPSEEVVKKMKNYWRQLLNAKLITQRKFDNLTKAERGGLSELDKAGFIKRQLVETRQITKHVAQILDSRMNTKYDENDKLIREVKVITLKSKLVSDFRKDFQFYKVREINNYHHAHDAYLNAVVGTALIKKYPKLESEFVYGDYKVYDVRKMIAKSEQEIGKATAKYFFYSNIMNFFKTEITLANGEIRKRPLIETNGETGEIVWDKGRDFATVRKVLSMPQVNIVKKTEVQTGGFSKESILPKRNSDKLIARKKDWDPKKYGGFDSPTVAYSVLVVAKVEKGKSKKLKSVKELLGITIMERSSFEKNPIDFLEAKGYKEVKKDLIIKLPKYSLFELENGRKRMLASAGELQKGNELALPSKYVNFLYLASHYEKLKGSPEDNEQKQLFVEQHKHYLDEIIEQISEFSKRVILADANLDKVLSAYNKHRDKPIREQAENIIHLFTLTNLGAPAAFKYFDTTIDRKRYTSTKEVLDATLIHQSITGLYETRIDLSQLGGDGGEAAAKGGSPAPGGTLQLDDEYRLYSPLVKPDQNIQFWLEQFPQAWAETAGMGLAKQVPPQVIQLKASATPVSVRQYPLSKEAQEGIRPHVQRLIQQGILVPVQSPWNTPLLPVRKPGTNDYRPVQDLREVNKRVQDIHPTVPNPYNLLCALPPQRSWYTVLDLKDAFFCLRLHPTSQPLFAFEWRDPGTGRTGQLTWTRLPQGFKNSPTIFNEALHRDLANFRIQHPQVTLLQYVDDLLLAGATKQDCLEGTKALLLELSDLGYRASAKKAQICRREVTYLGYSLRDGQRWLTEARKKTVVQIPAPTTAKQVREFLGTAGFCRLWIPGFATLAAPLYPLTKPKGEFSWAPEHQKAFDAIKKALLSAPALALPDVTKPFTLYVDERKGVARGVLTQTLGPWRRPVAYLSKKLDPVASGWPVCLKAIAAVAILVKDADKLTLGQNITVIAPHALENIVRQPPDRWMTNARMTHYQSLLLTERVTFAPPAALNPATLLPEETDEPVTHDCHQLLIEETGVRKDLTDIPLTGEVLTWFTDGSSYVVEGKRMAGAAVVDGTRTIWASSLPEGTSAQKAELMALTQALRLAEGKSINIYTDSRYAFATAHVHGAIYKQRGWLTSAGREIKNKEEILSLLEALHLPKRLAIIHCPGHQKAKDPISRGNQMADRVAKQAAQGVNLLAGKRTADGSEFEKRTADGSEFESPKKKAKVE

SEQ ID NO: 142 - protein, 2097 aa, synthetic construct
MPAAKRVKLDGGDKKYSIGLDIGTNSVGWAVITDEYKVPSKKFKVLGNTDRHSIKKNLIGALLFDSGETAEATRLKRTARRRYTRRKNRICYLQEIFSNEMAKVDDSFFHRLEESFLVEEDKKHERHPIFGNIVDEVAYHEKYPTIYHLRKKLVDSTDKADLRLIYLALAHMIKFRGHFLIEGDLNPDNSDVDKLFIQLVQTYNQLFEENPINASGVDAKAILSARLSKSRRLENLIAQLPGEKKNGLFGNLIALSLGLTPNFKSNFDLAEDAKLQLSKDTYDDDLDNLLAQIGDQYADLFLAAKNLSDAILLSDILRVNTEITKAPLSASMIKRYDEHHQDLTLLKALVRQQLPEKYKEIFFDQSKNGYAGYIDGGASQEEFYKFIKPILEKMDGTEELLVKLNREDLLRKQRTFDNGSIPHQIHLGELHAILRRQEDFYPFLKDNREKIEKILTFRIPYYVGPLARGNSRFAWMTRKSEETITPWNFEEVVDKGASAQSFIERMTNFDKNLPNEKVLPKHSLLYEYFTVYNELTKVKYVTEGMRKPAFLSGEQKKAIVDLLFKTNRKVTVKQLKEDYFKKIECFDSVEISGVEDRFNASLGTYHDLLKIIKDKDFLDNEENEDILEDIVLTLTLFEDREMIEERLKTYAHLFDDKVMKQLKRRRYTGWGRLSRKLINGIRDKQSGKTILDFLKSDGFANRNFMQLIHDDSLTFKEDIQKAQVSGQGDSLHEHIANLAGSPAIKKGILQTVKVVDELVKVMGRHKPENIVIEMARENQTTQKGQKNSRERMKRIEEGIKELGSQILKEHPVENTQLQNEKLYLYYLQNGRDMYVDQELDINRLSDYDVDHIVPQSFLKDDSIDNKVLTRSDKARGKSDNVPSEEVVKKMKNYWRQLLNAKLITQRKFDNLTKAERGGLSELDKAGFIKRQLVETRQITKHVAQILDSRMNTKYDENDKLIREVKVITLKSKLVSDFRKDFQFYKVREINNYHHAHDAYLNAVVGTALIKKYPKLESEFVYGDYKVYDVRKMIAKSEQEIGKATAKYFFYSNIMNFFKTEITLANGEIRKRPLIETNGETGEIVWDKGRDFATVRKVLSMPQVNIVKKTEVQTGGFSKESILPKRNSDKLIARKKDWDPKKYGGFDSPTVAYSVLVVAKVEKGKSKKLKSVKELLGITIMERSSFEKNPIDFLEAKGYKEVKKDLIIKLPKYSLFELENGRKRMLASAGELQKGNELALPSKYVNFLYLASHYEKLKGSPEDNEQKQLFVEQHKHYLDEIIEQISEFSKRVILADANLDKVLSAYNKHRDKPIREQAENIIHLFTLTNLGAPAAFKYFDTTIDRKRYTSTKEVLDATLIHQSITGLYETRIDLSQLGGDGGGGSGGSGGSGGSGGSGGSGGTLQLDDEYRLYSPLVKPDQNIQFWLEQFPQAWAETAGMGLAKQVPPQVIQLKASATPVSVRQYPLSKEAQEGIRPHVQRLIQQGILVPVQSPWNTPLLPVRKPGTNDYRPVQDLREVNKRVQDIHPTVPNPYNLLCALPPQRSWYTVLDLKDAFFCLRLHPTSQPLFAFEWRDPGTGRTGQLTWTRLPQGFKNSPTIFNEALHRDLANFRIQHPQVTLLQYVDDLLLAGATKQDCLEGTKALLLELSDLGYRASAKKAQICRREVTYLGYSLRDGQRWLTEARKKTVVQIPAPTTAKQVREFLGTAGFCRLWIPGFATLAAPLYPLTKPKGEFSWAPEHQKAFDAIKKALLSAPALALPDVTKPFTLYVDERKGVARGVLTQTLGPWRRPVAYLSKKLDPVASGWPVCLKAIAAVAILVKDADKLTLGQNITVIAPHALENIVRQPPDRWMTNARMTHYQSLLLTERVTFAPPAALNPATLLPEETDEPVTHDCHQLLIEETGVRKDLTDIPLTGEVLTWFTDGSSYVVEGKRMAGAAVVDGTRTIWASSLPEGTSAQKAELMALTQALRLAEGKSINIYTDSRYAFATAHVHGAIYKQRGWLTSAGREIKNKEEILSLLEALHLPKRLAIIHCPGHQKAKDPISRGNQMADRVAKQAAQGVNLLAGKRTADGSEFEKRTADGSEFESPKKKAKVE

SEQ ID NO: 143 - protein, 2085 aa, synthetic construct
MPAAKRVKLDGGDKKYSIGLDIGTNSVGWAVITDEYKVPSKKFKVLGNTDRHSIKKNLIGALLFDSGETAEATRLKRTARRRYTRRKNRICYLQEIFSNEMAKVDDSFFHRLEESFLVEEDKKHERHPIFGNIVDEVAYHEKYPTIYHLRKKLVDSTDKADLRLIYLALAHMIKFRGHFLIEGDLNPDNSDVDKLFIQLVQTYNQLFEENPINASGVDAKAILSARLSKSRRLENLIAQLPGEKKNGLFGNLIALSLGLTPNFKSNFDLAEDAKLQLSKDTYDDDLDNLLAQIGDQYADLFLAAKNLSDAILLSDILRVNTEITKAPLSASMIKRYDEHHQDLTLLKALVRQQLPEKYKEIFFDQSKNGYAGYIDGGASQEEFYKFIKPILEKMDGTEELLVKLNREDLLRKQRTFDNGSIPHQIHLGELHAILRRQEDFYPFLKDNREKIEKILTFRIPYYVGPLARGNSRFAWMTRKSEETITPWNFEEVVDKGASAQSFIERMTNFDKNLPNEKVLPKHSLLYEYFTVYNELTKVKYVTEGMRKPAFLSGEQKKAIVDLLFKTNRKVTVKQLKEDYFKKIECFDSVEISGVEDRFNASLGTYHDLLKIIKDKDFLDNEENEDILEDIVLTLTLFEDREMIEERLKTYAHLFDDKVMKQLKRRRYTGWGRLSRKLINGIRDKQSGKTILDFLKSDGFANRNFMQLIHDDSLTFKEDIQKAQVSGQGDSLHEHIANLAGSPAIKKGILQTVKVVDELVKVMGRHKPENIVIEMARENQTTQKGQKNSRERMKRIEEGIKELGSQILKEHPVENTQLQNEKLYLYYLQNGRDMYVDQELDINRLSDYDVDHIVPQSFLKDDSIDNKVLTRSDKARGKSDNVPSEEVVKKMKNYWRQLLNAKLITQRKFDNLTKAERGGLSELDKAGFIKRQLVETRQITKHVAQILDSRMNTKYDENDKLIREVKVITLKSKLVSDFRKDFQFYKVREINNYHHAHDAYLNAVVGTALIKKYPKLESEFVYGDYKVYDVRKMIAKSEQEIGKATAKYFFYSNIMNFFKTEITLANGEIRKRPLIETNGETGEIVWDKGRDFATVRKVLSMPQVNIVKKTEVQTGGFSKESILPKRNSDKLIARKKDWDPKKYGGFDSPTVAYSVLVVAKVEKGKSKKLKSVKELLGITIMERSSFEKNPIDFLEAKGYKEVKKDLIIKLPKYSLFELENGRKRMLASAGELQKGNELALPSKYVNFLYLASHYEKLKGSPEDNEQKQLFVEQHKHYLDEIIEQISEFSKRVILADANLDKVLSAYNKHRDKPIREQAENIIHLFTLTNLGAPAAFKYFDTTIDRKRYTSTKEVLDATLIHQSITGLYETRIDLSQLGGDGGGGGPAPGGTLQLDDEYRLYSPLVKPDQNIQFWLEQFPQAWAETAGMGLAKQVPPQVIQLKASATPVSVRQYPLSKEAQEGIRPHVQRLIQQGILVPVQSPWNTPLLPVRKPGTNDYRPVQDLREVNKRVQDIHPTVPNPYNLLCALPPQRSWYTVLDLKDAFFCLRLHPTSQPLFAFEWRDPGTGRTGQLTWTRLPQGFKNSPTIFNEALHRDLANFRIQHPQVTLLQYVDDLLLAGATKQDCLEGTKALLLELSDLGYRASAKKAQICRREVTYLGYSLRDGQRWLTEARKKTVVQIPAPTTAKQVREFLGTAGFCRLWIPGFATLAAPLYPLTKPKGEFSWAPEHQKAFDAIKKALLSAPALALPDVTKPFTLYVDERKGVARGVLTQTLGPWRRPVAYLSKKLDPVASGWPVCLKAIAAVAILVKDADKLTLGQNITVIAPHALENIVRQPPDRWMTNARMTHYQSLLLTERVTFAPPAALNPATLLPEETDEPVTHDCHQLLIEETGVRKDLTDIPLTGEVLTWFTDGSSYVVEGKRMAGAAVVDGTRTIWASSLPEGTSAQKAELMALTQALRLAEGKSINIYTDSRYAFATAHVHGAIYKQRGWLTSAGREIKNKEEILSLLEALHLPKRLAIIHCPGHQKAKDPISRGNQMADRVAKQAAQGVNLLAGKRTADGSEFEKRTADGSEFESPKKKAKVE

SEQ ID NO: 144 - protein, 2088 aa, synthetic construct
MPAAKRVKLDGGDKKYSIGLDIGTNSVGWAVITDEYKVPSKKFKVLGNTDRHSIKKNLIGALLFDSGETAEATRLKRTARRRYTRRKNRICYLQEIFSNEMAKVDDSFFHRLEESFLVEEDKKHERHPIFGNIVDEVAYHEKYPTIYHLRKKLVDSTDKADLRLIYLALAHMIKFRGHFLIEGDLNPDNSDVDKLFIQLVQTYNQLFEENPINASGVDAKAILSARLSKSRRLENLIAQLPGEKKNGLFGNLIALSLGLTPNFKSNFDLAEDAKLQLSKDTYDDDLDNLLAQIGDQYADLFLAAKNLSDAILLSDILRVNTEITKAPLSASMIKRYDEHHQDLTLLKALVRQQLPEKYKEIFFDQSKNGYAGYIDGGASQEEFYKFIKPILEKMDGTEELLVKLNREDLLRKQRTFDNGSIPHQIHLGELHAILRRQEDFYPFLKDNREKIEKILTFRIPYYVGPLARGNSRFAWMTRKSEETITPWNFEEVVDKGASAQSFIERMTNFDKNLPNEKVLPKHSLLYEYFTVYNELTKVKYVTEGMRKPAFLSGEQKKAIVDLLFKTNRKVTVKQLKEDYFKKIECFDSVEISGVEDRFNASLGTYHDLLKIIKDKDFLDNEENEDILEDIVLTLTLFEDREMIEERLKTYAHLFDDKVMKQLKRRRYTGWGRLSRKLINGIRDKQSGKTILDFLKSDGFANRNFMQLIHDDSLTFKEDIQKAQVSGQGDSLHEHIANLAGSPAIKKGILQTVKVVDELVKVMGRHKPENIVIEMARENQTTQKGQKNSRERMKRIEEGIKELGSQILKEHPVENTQLQNEKLYLYYLQNGRDMYVDQELDINRLSDYDVDHIVPQSFLKDDSIDNKVLTRSDKARGKSDNVPSEEVVKKMKNYWRQLLNAKLITQRKFDNLTKAERGGLSELDKAGFIKRQLVETRQITKHVAQILDSRMNTKYDENDKLIREVKVITLKSKLVSDFRKDFQFYKVREINNYHHAHDAYLNAVVGTALIKKYPKLESEFVYGDYKVYDVRKMIAKSEQEIGKATAKYFFYSNIMNFFKTEITLANGEIRKRPLIETNGETGEIVWDKGRDFATVRKVLSMPQVNIVKKTEVQTGGFSKESILPKRNSDKLIARKKDWDPKKYGGFDSPTVAYSVLVVAKVEKGKSKKLKSVKELLGITIMERSSFEKNPIDFLEAKGYKEVKKDLIIKLPKYSLFELENGRKRMLASAGELQKGNELALPSKYVNFLYLASHYEKLKGSPEDNEQKQLFVEQHKHYLDEIIEQISEFSKRVILADANLDKVLSAYNKHRDKPIREQAENIIHLFTLTNLGAPAAFKYFDTTIDRKRYTSTKEVLDATLIHQSITGLYETRIDLSQLGGDGGGGSGSSGGGGGTLQLDDEYRLYSPLVKPDQNIQFWLEQFPQAWAETAGMGLAKQVPPQVIQLKASATPVSVRQYPLSKEAQEGIRPHVQRLIQQGILVPVQSPWNTPLLPVRKPGTNDYRPVQDLREVNKRVQDIHPTVPNPYNLLCALPPQRSWYTVLDLKDAFFCLRLHPTSQPLFAFEWRDPGTGRTGQLTWTRLPQGFKNSPTIFNEALHRDLANFRIQHPQVTLLQYVDDLLLAGATKQDCLEGTKALLLELSDLGYRASAKKAQICRREVTYLGYSLRDGQRWLTEARKKTVVQIPAPTTAKQVREFLGTAGFCRLWIPGFATLAAPLYPLTKPKGEFSWAPEHQKAFDAIKKALLSAPALALPDVTKPFTLYVDERKGVARGVLTQTLGPWRRPVAYLSKKLDPVASGWPVCLKAIAAVAILVKDADKLTLGQNITVIAPHALENIVRQPPDRWMTNARMTHYQSLLLTERVTFAPPAALNPATLLPEETDEPVTHDCHQLLIEETGVRKDLTDIPLTGEVLTWFTDGSSYVVEGKRMAGAAVVDGTRTIWASSLPEGTSAQKAELMALTQALRLAEGKSINIYTDSRYAFATAHVHGAIYKQRGWLTSAGREIKNKEEILSLLEALHLPKRLAIIHCPGHQKAKDPISRGNQMADRVAKQAAQGVNLLAGKRTADGSEFEKRTADGSEFESPKKKAKVE

SEQ ID NO: 145 - protein, 2091 aa, synthetic construct
MPAAKRVKLDGGDKKYSIGLDIGTNSVGWAVITDEYKVPSKKFKVLGNTDRHSIKKNLIGALLFDSGETAEATRLKRTARRRYTRRKNRICYLQEIFSNEMAKVDDSFFHRLEESFLVEEDKKHERHPIFGNIVDEVAYHEKYPTIYHLRKKLVDSTDKADLRLIYLALAHMIKFRGHFLIEGDLNPDNSDVDKLFIQLVQTYNQLFEENPINASGVDAKAILSARLSKSRRLENLIAQLPGEKKNGLFGNLIALSLGLTPNFKSNFDLAEDAKLQLSKDTYDDDLDNLLAQIGDQYADLFLAAKNLSDAILLSDILRVNTEITKAPLSASMIKRYDEHHQDLTLLKALVRQQLPEKYKEIFFDQSKNGYAGYIDGGASQEEFYKFIKPILEKMDGTEELLVKLNREDLLRKQRTFDNGSIPHQIHLGELHAILRRQEDFYPFLKDNREKIEKILTFRIPYYVGPLARGNSRFAWMTRKSEETITPWNFEEVVDKGASAQSFIERMTNFDKNLPNEKVLPKHSLLYEYFTVYNELTKVKYVTEGMRKPAFLSGEQKKAIVDLLFKTNRKVTVKQLKEDYFKKIECFDSVEISGVEDRFNASLGTYHDLLKIIKDKDFLDNEENEDILEDIVLTLTLFEDREMIEERLKTYAHLFDDKVMKQLKRRRYTGWGRLSRKLINGIRDKQSGKTILDFLKSDGFANRNFMQLIHDDSLTFKEDIQKAQVSGQGDSLHEHIANLAGSPAIKKGILQTVKVVDELVKVMGRHKPENIVIEMARENQTTQKGQKNSRERMKRIEEGIKELGSQILKEHPVENTQLQNEKLYLYYLQNGRDMYVDQELDINRLSDYDVDHIVPQSFLKDDSIDNKVLTRSDKARGKSDNVPSEEVVKKMKNYWRQLLNAKLITQRKFDNLTKAERGGLSELDKAGFIKRQLVETRQITKHVAQILDSRMNTKYDENDKLIREVKVITLKSKLVSDFRKDFQFYKVREINNYHHAHDAYLNAVVGTALIKKYPKLESEFVYGDYKVYDVRKMIAKSEQEIGKATAKYFFYSNIMNFFKTEITLANGEIRKRPLIETNGETGEIVWDKGRDFATVRKVLSMPQVNIVKKTEVQTGGFSKESILPKRNSDKLIARKKDWDPKKYGGFDSPTVAYSVLVVAKVEKGKSKKLKSVKELLGITIMERSSFEKNPIDFLEAKGYKEVKKDLIIKLPKYSLFELENGRKRMLASAGELQKGNELALPSKYVNFLYLASHYEKLKGSPEDNEQKQLFVEQHKHYLDEIIEQISEFSKRVILADANLDKVLSAYNKHRDKPIREQAENIIHLFTLTNLGAPAAFKYFDTTIDRKRYTSTKEVLDATLIHQSITGLYETRIDLSQLGGDGGGGSGGSGGSGGSGGTLQLDDEYRLYSPLVKPDQNIQFWLEQFPQAWAETAGMGLAKQVPPQVIQLKASATPVSVRQYPLSKEAQEGIRPHVQRLIQQGILVPVQSPWNTPLLPVRKPGTNDYRPVQDLREVNKRVQDIHPTVPNPYNLLCALPPQRSWYTVLDLKDAFFCLRLHPTSQPLFAFEWRDPGTGRTGQLTWTRLPQGFKNSPTIFNEALHRDLANFRIQHPQVTLLQYVDDLLLAGATKQDCLEGTKALLLELSDLGYRASAKKAQICRREVTYLGYSLRDGQRWLTEARKKTVVQIPAPTTAKQVREFLGTAGFCRLWIPGFATLAAPLYPLTKPKGEFSWAPEHQKAFDAIKKALLSAPALALPDVTKPFTLYVDERKGVARGVLTQTLGPWRRPVAYLSKKLDPVASGWPVCLKAIAAVAILVKDADKLTLGQNITVIAPHALENIVRQPPDRWMTNARMTHYQSLLLTERVTFAPPAALNPATLLPEETDEPVTHDCHQLLIEETGVRKDLTDIPLTGEVLTWFTDGSSYVVEGKRMAGAAVVDGTRTIWASSLPEGTSAQKAELMALTQALRLAEGKSINIYTDSRYAFATAHVHGAIYKQRGWLTSAGREIKNKEEILSLLEALHLPKRLAIIHCPGHQKAKDPISRGNQMADRVAKQAAQGVNLLAGKRTADGSEFEKRTADGSEFESPKKKAKVE

SEQ ID NO: 146 - protein, 2090 aa, synthetic construct
MPAAKRVKLDGGDKKYSIGLDIGTNSVGWAVITDEYKVPSKKFKVLGNTDRHSIKKNLIGALLFDSGETAEATRLKRTARRRYTRRKNRICYLQEIFSNEMAKVDDSFFHRLEESFLVEEDKKHERHPIFGNIVDEVAYHEKYPTIYHLRKKLVDSTDKADLRLIYLALAHMIKFRGHFLIEGDLNPDNSDVDKLFIQLVQTYNQLFEENPINASGVDAKAILSARLSKSRRLENLIAQLPGEKKNGLFGNLIALSLGLTPNFKSNFDLAEDAKLQLSKDTYDDDLDNLLAQIGDQYADLFLAAKNLSDAILLSDILRVNTEITKAPLSASMIKRYDEHHQDLTLLKALVRQQLPEKYKEIFFDQSKNGYAGYIDGGASQEEFYKFIKPILEKMDGTEELLVKLNREDLLRKQRTFDNGSIPHQIHLGELHAILRRQEDFYPFLKDNREKIEKILTFRIPYYVGPLARGNSRFAWMTRKSEETITPWNFEEVVDKGASAQSFIERMTNFDKNLPNEKVLPKHSLLYEYFTVYNELTKVKYVTEGMRKPAFLSGEQKKAIVDLLFKTNRKVTVKQLKEDYFKKIECFDSVEISGVEDRFNASLGTYHDLLKIIKDKDFLDNEENEDILEDIVLTLTLFEDREMIEERLKTYAHLFDDKVMKQLKRRRYTGWGRLSRKLINGIRDKQSGKTILDFLKSDGFANRNFMQLIHDDSLTFKEDIQKAQVSGQGDSLHEHIANLAGSPAIKKGILQTVKVVDELVKVMGRHKPENIVIEMARENQTTQKGQKNSRERMKRIEEGIKELGSQILKEHPVENTQLQNEKLYLYYLQNGRDMYVDQELDINRLSDYDVDHIVPQSFLKDDSIDNKVLTRSDKARGKSDNVPSEEVVKKMKNYWRQLLNAKLITQRKFDNLTKAERGGLSELDKAGFIKRQLVETRQITKHVAQILDSRMNTKYDENDKLIREVKVITLKSKLVSDFRKDFQFYKVREINNYHHAHDAYLNAVVGTALIKKYPKLESEFVYGDYKVYDVRKMIAKSEQEIGKATAKYFFYSNIMNFFKTEITLANGEIRKRPLIETNGETGEIVWDKGRDFATVRKVLSMPQVNIVKKTEVQTGGFSKESILPKRNSDKLIARKKDWDPKKYGGFDSPTVAYSVLVVAKVEKGKSKKLKSVKELLGITIMERSSFEKNPIDFLEAKGYKEVKKDLIIKLPKYSLFELENGRKRMLASAGELQKGNELALPSKYVNFLYLASHYEKLKGSPEDNEQKQLFVEQHKHYLDEIIEQISEFSKRVILADANLDKVLSAYNKHRDKPIREQAENIIHLFTLTNLGAPAAFKYFDTTIDRKRYTSTKEVLDATLIHQSITGLYETRIDLSQLGGDGGEAAAKGGGGSSGGTLQLDDEYRLYSPLVKPDQNIQFWLEQFPQAWAETAGMGLAKQVPPQVIQLKASATPVSVRQYPLSKEAQEGIRPHVQRLIQQGILVPVQSPWNTPLLPVRKPGTNDYRPVQDLREVNKRVQDIHPTVPNPYNLLCALPPQRSWYTVLDLKDAFFCLRLHPTSQPLFAFEWRDPGTGRTGQLTWTRLPQGFKNSPTIFNEALHRDLANFRIQHPQVTLLQYVDDLLLAGATKQDCLEGTKALLLELSDLGYRASAKKAQICRREVTYLGYSLRDGQRWLTEARKKTVVQIPAPTTAKQVREFLGTAGFCRLWIPGFATLAAPLYPLTKPKGEFSWAPEHQKAFDAIKKALLSAPALALPDVTKPFTLYVDERKGVARGVLTQTLGPWRRPVAYLSKKLDPVASGWPVCLKAIAAVAILVKDADKLTLGQNITVIAPHALENIVRQPPDRWMTNARMTHYQSLLLTERVTFAPPAALNPATLLPEETDEPVTHDCHQLLIEETGVRKDLTDIPLTGEVLTWFTDGSSYVVEGKRMAGAAVVDGTRTIWASSLPEGTSAQKAELMALTQALRLAEGKSINIYTDSRYAFATAHVHGAIYKQRGWLTSAGREIKNKEEILSLLEALHLPKRLAIIHCPGHQKAKDPISRGNQMADRVAKQAAQGVNLLAGKRTADGSEFEKRTADGSEFESPKKKAKVE

SEQ ID NO: 147 - protein, 2084 aa, synthetic construct
MPAAKRVKLDGGDKKYSIGLDIGTNSVGWAVITDEYKVPSKKFKVLGNTDRHSIKKNLIGALLFDSGETAEATRLKRTARRRYTRRKNRICYLQEIFSNEMAKVDDSFFHRLEESFLVEEDKKHERHPIFGNIVDEVAYHEKYPTIYHLRKKLVDSTDKADLRLIYLALAHMIKFRGHFLIEGDLNPDNSDVDKLFIQLVQTYNQLFEENPINASGVDAKAILSARLSKSRRLENLIAQLPGEKKNGLFGNLIALSLGLTPNFKSNFDLAEDAKLQLSKDTYDDDLDNLLAQIGDQYADLFLAAKNLSDAILLSDILRVNTEITKAPLSASMIKRYDEHHQDLTLLKALVRQQLPEKYKEIFFDQSKNGYAGYIDGGASQEEFYKFIKPILEKMDGTEELLVKLNREDLLRKQRTFDNGSIPHQIHLGELHAILRRQEDFYPFLKDNREKIEKILTFRIPYYVGPLARGNSRFAWMTRKSEETITPWNFEEVVDKGASAQSFIERMTNFDKNLPNEKVLPKHSLLYEYFTVYNELTKVKYVTEGMRKPAFLSGEQKKAIVDLLFKTNRKVTVKQLKEDYFKKIECFDSVEISGVEDRFNASLGTYHDLLKIIKDKDFLDNEENEDILEDIVLTLTLFEDREMIEERLKTYAHLFDDKVMKQLKRRRYTGWGRLSRKLINGIRDKQSGKTILDFLKSDGFANRNFMQLIHDDSLTFKEDIQKAQVSGQGDSLHEHIANLAGSPAIKKGILQTVKVVDELVKVMGRHKPENIVIEMARENQTTQKGQKNSRERMKRIEEGIKELGSQILKEHPVENTQLQNEKLYLYYLQNGRDMYVDQELDINRLSDYDVDHIVPQSFLKDDSIDNKVLTRSDKARGKSDNVPSEEVVKKMKNYWRQLLNAKLITQRKFDNLTKAERGGLSELDKAGFIKRQLVETRQITKHVAQILDSRMNTKYDENDKLIREVKVITLKSKLVSDFRKDFQFYKVREINNYHHAHDAYLNAVVGTALIKKYPKLESEFVYGDYKVYDVRKMIAKSEQEIGKATAKYFFYSNIMNFFKTEITLANGEIRKRPLIETNGETGEIVWDKGRDFATVRKVLSMPQVNIVKKTEVQTGGFSKESILPKRNSDKLIARKKDWDPKKYGGFDSPTVAYSVLVVAKVEKGKSKKLKSVKELLGITIMERSSFEKNPIDFLEAKGYKEVKKDLIIKLPKYSLFELENGRKRMLASAGELQKGNELALPSKYVNFLYLASHYEKLKGSPEDNEQKQLFVEQHKHYLDEIIEQISEFSKRVILADANLDKVLSAYNKHRDKPIREQAENIIHLFTLTNLGAPAAFKYFDTTIDRKRYTSTKEVLDATLIHQSITGLYETRIDLSQLGGDGGGGGGSGGTLQLDDEYRLYSPLVKPDQNIQFWLEQFPQAWAETAGMGLAKQVPPQVIQLKASATPVSVRQYPLSKEAQEGIRPHVQRLIQQGILVPVQSPWNTPLLPVRKPGTNDYRPVQDLREVNKRVQDIHPTVPNPYNLLCALPPQRSWYTVLDLKDAFFCLRLHPTSQPLFAFEWRDPGTGRTGQLTWTRLPQGFKNSPTIFNEALHRDLANFRIQHPQVTLLQYVDDLLLAGATKQDCLEGTKALLLELSDLGYRASAKKAQICRREVTYLGYSLRDGQRWLTEARKKTVVQIPAPTTAKQVREFLGTAGFCRLWIPGFATLAAPLYPLTKPKGEFSWAPEHQKAFDAIKKALLSAPALALPDVTKPFTLYVDERKGVARGVLTQTLGPWRRPVAYLSKKLDPVASGWPVCLKAIAAVAILVKDADKLTLGQNITVIAPHALENIVRQPPDRWMTNARMTHYQSLLLTERVTFAPPAALNPATLLPEETDEPVTHDCHQLLIEETGVRKDLTDIPLTGEVLTWFTDGSSYVVEGKRMAGAAVVDGTRTIWASSLPEGTSAQKAELMALTQALRLAEGKSINIYTDSRYAFATAHVHGAIYKQRGWLTSAGREIKNKEEILSLLEALHLPKRLAIIHCPGHQKAKDPISRGNQMADRVAKQAAQGVNLLAGKRTADGSEFEKRTADGSEFESPKKKAKVE

SEQ ID NO: 148 - protein, 2085 aa, synthetic construct
MPAAKRVKLDGGDKKYSIGLDIGTNSVGWAVITDEYKVPSKKFKVLGNTDRHSIKKNLIGALLFDSGETAEATRLKRTARRRYTRRKNRICYLQEIFSNEMAKVDDSFFHRLEESFLVEEDKKHERHPIFGNIVDEVAYHEKYPTIYHLRKKLVDSTDKADLRLIYLALAHMIKFRGHFLIEGDLNPDNSDVDKLFIQLVQTYNQLFEENPINASGVDAKAILSARLSKSRRLENLIAQLPGEKKNGLFGNLIALSLGLTPNFKSNFDLAEDAKLQLSKDTYDDDLDNLLAQIGDQYADLFLAAKNLSDAILLSDILRVNTEITKAPLSASMIKRYDEHHQDLTLLKALVRQQLPEKYKEIFFDQSKNGYAGYIDGGASQEEFYKFIKPILEKMDGTEELLVKLNREDLLRKQRTFDNGSIPHQIHLGELHAILRRQEDFYPFLKDNREKIEKILTFRIPYYVGPLARGNSRFAWMTRKSEETITPWNFEEVVDKGASAQSFIERMTNFDKNLPNEKVLPKHSLLYEYFTVYNELTKVKYVTEGMRKPAFLSGEQKKAIVDLLFKTNRKVTVKQLKEDYFKKIECFDSVEISGVEDRFNASLGTYHDLLKIIKDKDFLDNEENEDILEDIVLTLTLFEDREMIEERLKTYAHLFDDKVMKQLKRRRYTGWGRLSRKLINGIRDKQSGKTILDFLKSDGFANRNFMQLIHDDSLTFKEDIQKAQVSGQGDSLHEHIANLAGSPAIKKGILQTVKVVDELVKVMGRHKPENIVIEMARENQTTQKGQKNSRERMKRIEEGIKELGSQILKEHPVENTQLQNEKLYLYYLQNGRDMYVDQELDINRLSDYDVDHIVPQSFLKDDSIDNKVLTRSDKARGKSDNVPSEEVVKKMKNYWRQLLNAKLITQRKFDNLTKAERGGLSELDKAGFIKRQLVETRQITKHVAQILDSRMNTKYDENDKLIREVKVITLKSKLVSDFRKDFQFYKVREINNYHHAHDAYLNAVVGTALIKKYPKLESEFVYGDYKVYDVRKMIAKSEQEIGKATAKYFFYSNIMNFFKTEITLANGEIRKRPLIETNGETGEIVWDKGRDFATVRKVLSMPQVNIVKKTEVQTGGFSKESILPKRNSDKLIARKKDWDPKKYGGFDSPTVAYSVLVVAKVEKGKSKKLKSVKELLGITIMERSSFEKNPIDFLEAKGYKEVKKDLIIKLPKYSLFELENGRKRMLASAGELQKGNELALPSKYVNFLYLASHYEKLKGSPEDNEQKQLFVEQHKHYLDEIIEQISEFSKRVILADANLDKVLSAYNKHRDKPIREQAENIIHLFTLTNLGAPAAFKYFDTTIDRKRYTSTKEVLDATLIHQSITGLYETRIDLSQLGGDGGGSSPAPGGTLQLDDEYRLYSPLVKPDQNIQFWLEQFPQAWAETAGMGLAKQVPPQVIQLKASATPVSVRQYPLSKEAQEGIRPHVQRLIQQGILVPVQSPWNTPLLPVRKPGTNDYRPVQDLREVNKRVQDIHPTVPNPYNLLCALPPQRSWYTVLDLKDAFFCLRLHPTSQPLFAFEWRDPGTGRTGQLTWTRLPQGFKNSPTIFNEALHRDLANFRIQHPQVTLLQYVDDLLLAGATKQDCLEGTKALLLELSDLGYRASAKKAQICRREVTYLGYSLRDGQRWLTEARKKTVVQIPAPTTAKQVREFLGTAGFCRLWIPGFATLAAPLYPLTKPKGEFSWAPEHQKAFDAIKKALLSAPALALPDVTKPFTLYVDERKGVARGVLTQTLGPWRRPVAYLSKKLDPVASGWPVCLKAIAAVAILVKDADKLTLGQNITVIAPHALENIVRQPPDRWMTNARMTHYQSLLLTERVTFAPPAALNPATLLPEETDEPVTHDCHQLLIEETGVRKDLTDIPLTGEVLTWFTDGSSYVVEGKRMAGAAVVDGTRTIWASSLPEGTSAQKAELMALTQALRLAEGKSINIYTDSRYAFATAHVHGAIYKQRGWLTSAGREIKNKEEILSLLEALHLPKRLAIIHCPGHQKAKDPISRGNQMADRVAKQAAQGVNLLAGKRTADGSEFEKRTADGSEFESPKKKAKVE

SEQ ID NO: 149 - protein, 2083 aa, synthetic construct
MPAAKRVKLDGGDKKYSIGLDIGTNSVGWAVITDEYKVPSKKFKVLGNTDRHSIKKNLIGALLFDSGETAEATRLKRTARRRYTRRKNRICYLQEIFSNEMAKVDDSFFHRLEESFLVEEDKKHERHPIFGNIVDEVAYHEKYPTIYHLRKKLVDSTDKADLRLIYLALAHMIKFRGHFLIEGDLNPDNSDVDKLFIQLVQTYNQLFEENPINASGVDAKAILSARLSKSRRLENLIAQLPGEKKNGLFGNLIALSLGLTPNFKSNFDLAEDAKLQLSKDTYDDDLDNLLAQIGDQYADLFLAAKNLSDAILLSDILRVNTEITKAPLSASMIKRYDEHHQDLTLLKALVRQQLPEKYKEIFFDQSKNGYAGYIDGGASQEEFYKFIKPILEKMDGTEELLVKLNREDLLRKQRTFDNGSIPHQIHLGELHAILRRQEDFYPFLKDNREKIEKILTFRIPYYVGPLARGNSRFAWMTRKSEETITPWNFEEVVDKGASAQSFIERMTNFDKNLPNEKVLPKHSLLYEYFTVYNELTKVKYVTEGMRKPAFLSGEQKKAIVDLLFKTNRKVTVKQLKEDYFKKIECFDSVEISGVEDRFNASLGTYHDLLKIIKDKDFLDNEENEDILEDIVLTLTLFEDREMIEERLKTYAHLFDDKVMKQLKRRRYTGWGRLSRKLINGIRDKQSGKTILDFLKSDGFANRNFMQLIHDDSLTFKEDIQKAQVSGQGDSLHEHIANLAGSPAIKKGILQTVKVVDELVKVMGRHKPENIVIEMARENQTTQKGQKNSRERMKRIEEGIKELGSQILKEHPVENTQLQNEKLYLYYLQNGRDMYVDQELDINRLSDYDVDHIVPQSFLKDDSIDNKVLTRSDKARGKSDNVPSEEVVKKMKNYWRQLLNAKLITQRKFDNLTKAERGGLSELDKAGFIKRQLVETRQITKHVAQILDSRMNTKYDENDKLIREVKVITLKSKLVSDFRKDFQFYKVREINNYHHAHDAYLNAVVGTALIKKYPKLESEFVYGDYKVYDVRKMIAKSEQEIGKATAKYFFYSNIMNFFKTEITLANGEIRKRPLIETNGETGEIVWDKGRDFATVRKVLSMPQVNIVKKTEVQTGGFSKESILPKRNSDKLIARKKDWDPKKYGGFDSPTVAYSVLVVAKVEKGKSKKLKSVKELLGITIMERSSFEKNPIDFLEAKGYKEVKKDLIIKLPKYSLFELENGRKRMLASAGELQKGNELALPSKYVNFLYLASHYEKLKGSPEDNEQKQLFVEQHKHYLDEIIEQISEFSKRVILADANLDKVLSAYNKHRDKPIREQAENIIHLFTLTNLGAPAAFKYFDTTIDRKRYTSTKEVLDATLIHQSITGLYETRIDLSQLGGDGGGGGGGGTLQLDDEYRLYSPLVKPDQNIQFWLEQFPQAWAETAGMGLAKQVPPQVIQLKASATPVSVRQYPLSKEAQEGIRPHVQRLIQQGILVPVQSPWNTPLLPVRKPGTNDYRPVQDLREVNKRVQDIHPTVPNPYNLLCALPPQRSWYTVLDLKDAFFCLRLHPTSQPLFAFEWRDPGTGRTGQLTWTRLPQGFKNSPTIFNEALHRDLANFRIQHPQVTLLQYVDDLLLAGATKQDCLEGTKALLLELSDLGYRASAKKAQICRREVTYLGYSLRDGQRWLTEARKKTVVQIPAPTTAKQVREFLGTAGFCRLWIPGFATLAAPLYPLTKPKGEFSWAPEHQKAFDAIKKALLSAPALALPDVTKPFTLYVDERKGVARGVLTQTLGPWRRPVAYLSKKLDPVASGWPVCLKAIAAVAILVKDADKLTLGQNITVIAPHALENIVRQPPDRWMTNARMTHYQSLLLTERVTFAPPAALNPATLLPEETDEPVTHDCHQLLIEETGVRKDLTDIPLTGEVLTWFTDGSSYVVEGKRMAGAAVVDGTRTIWASSLPEGTSAQKAELMALTQALRLAEGKSINIYTDSRYAFATAHVHGAIYKQRGWLTSAGREIKNKEEILSLLEALHLPKRLAIIHCPGHQKAKDPISRGNQMADRVAKQAAQGVNLLAGKRTADGSEFEKRTADGSEFESPKKKAKVE

SEQ ID NO: 150 - protein, 2104 aa, synthetic construct
MPAAKRVKLDGGDKKYSIGLDIGTNSVGWAVITDEYKVPSKKFKVLGNTDRHSIKKNLIGALLFDSGETAEATRLKRTARRRYTRRKNRICYLQEIFSNEMAKVDDSFFHRLEESFLVEEDKKHERHPIFGNIVDEVAYHEKYPTIYHLRKKLVDSTDKADLRLIYLALAHMIKFRGHFLIEGDLNPDNSDVDKLFIQLVQTYNQLFEENPINASGVDAKAILSARLSKSRRLENLIAQLPGEKKNGLFGNLIALSLGLTPNFKSNFDLAEDAKLQLSKDTYDDDLDNLLAQIGDQYADLFLAAKNLSDAILLSDILRVNTEITKAPLSASMIKRYDEHHQDLTLLKALVRQQLPEKYKEIFFDQSKNGYAGYIDGGASQEEFYKFIKPILEKMDGTEELLVKLNREDLLRKQRTFDNGSIPHQIHLGELHAILRRQEDFYPFLKDNREKIEKILTFRIPYYVGPLARGNSRFAWMTRKSEETITPWNFEEVVDKGASAQSFIERMTNFDKNLPNEKVLPKHSLLYEYFTVYNELTKVKYVTEGMRKPAFLSGEQKKAIVDLLFKTNRKVTVKQLKEDYFKKIECFDSVEISGVEDRFNASLGTYHDLLKIIKDKDFLDNEENEDILEDIVLTLTLFEDREMIEERLKTYAHLFDDKVMKQLKRRRYTGWGRLSRKLINGIRDKQSGKTILDFLKSDGFANRNFMQLIHDDSLTFKEDIQKAQVSGQGDSLHEHIANLAGSPAIKKGILQTVKVVDELVKVMGRHKPENIVIEMARENQTTQKGQKNSRERMKRIEEGIKELGSQILKEHPVENTQLQNEKLYLYYLQNGRDMYVDQELDINRLSDYDVDHIVPQSFLKDDSIDNKVLTRSDKARGKSDNVPSEEVVKKMKNYWRQLLNAKLITQRKFDNLTKAERGGLSELDKAGFIKRQLVETRQITKHVAQILDSRMNTKYDENDKLIREVKVITLKSKLVSDFRKDFQFYKVREINNYHHAHDAYLNAVVGTALIKKYPKLESEFVYGDYKVYDVRKMIAKSEQEIGKATAKYFFYSNIMNFFKTEITLANGEIRKRPLIETNGETGEIVWDKGRDFATVRKVLSMPQVNIVKKTEVQTGGFSKESILPKRNSDKLIARKKDWDPKKYGGFDSPTVAYSVLVVAKVEKGKSKKLKSVKELLGITIMERSSFEKNPIDFLEAKGYKEVKKDLIIKLPKYSLFELENGRKRMLASAGELQKGNELALPSKYVNFLYLASHYEKLKGSPEDNEQKQLFVEQHKHYLDEIIEQISEFSKRVILADANLDKVLSAYNKHRDKPIREQAENIIHLFTLTNLGAPAAFKYFDTTIDRKRYTSTKEVLDATLIHQSITGLYETRIDLSQLGGDGGEAAAKEAAAKEAAAKEAAAKEAAAKGGTLQLDDEYRLYSPLVKPDQNIQFWLEQFPQAWAETAGMGLAKQVPPQVIQLKASATPVSVRQYPLSKEAQEGIRPHVQRLIQQGILVPVQSPWNTPLLPVRKPGTNDYRPVQDLREVNKRVQDIHPTVPNPYNLLCALPPQRSWYTVLDLKDAFFCLRLHPTSQPLFAFEWRDPGTGRTGQLTWTRLPQGFKNSPTIFNEALHRDLANFRIQHPQVTLLQYVDDLLLAGATKQDCLEGTKALLLELSDLGYRASAKKAQICRREVTYLGYSLRDGQRWLTEARKKTVVQIPAPTTAKQVREFLGTAGFCRLWIPGFATLAAPLYPLTKPKGEFSWAPEHQKAFDAIKKALLSAPALALPDVTKPFTLYVDERKGVARGVLTQTLGPWRRPVAYLSKKLDPVASGWPVCLKAIAAVAILVKDADKLTLGQNITVIAPHALENIVRQPPDRWMTNARMTHYQSLLLTERVTFAPPAALNPATLLPEETDEPVTHDCHQLLIEETGVRKDLTDIPLTGEVLTWFTDGSSYVVEGKRMAGAAVVDGTRTIWASSLPEGTSAQKAELMALTQALRLAEGKSINIYTDSRYAFATAHVHGAIYKQRGWLTSAGREIKNKEEILSLLEALHLPKRLAIIHCPGHQKAKDPISRGNQMADRVAKQAAQGVNLLAGKRTADGSEFEKRTADGSEFESPKKKAKVE

SEQ ID NO: 151 - protein, 2084 aa, synthetic construct
MPAAKRVKLDGGDKKYSIGLDIGTNSVGWAVITDEYKVPSKKFKVLGNTDRHSIKKNLIGALLFDSGETAEATRLKRTARRRYTRRKNRICYLQEIFSNEMAKVDDSFFHRLEESFLVEEDKKHERHPIFGNIVDEVAYHEKYPTIYHLRKKLVDSTDKADLRLIYLALAHMIKFRGHFLIEGDLNPDNSDVDKLFIQLVQTYNQLFEENPINASGVDAKAILSARLSKSRRLENLIAQLPGEKKNGLFGNLIALSLGLTPNFKSNFDLAEDAKLQLSKDTYDDDLDNLLAQIGDQYADLFLAAKNLSDAILLSDILRVNTEITKAPLSASMIKRYDEHHQDLTLLKALVRQQLPEKYKEIFFDQSKNGYAGYIDGGASQEEFYKFIKPILEKMDGTEELLVKLNREDLLRKQRTFDNGSIPHQIHLGELHAILRRQEDFYPFLKDNREKIEKILTFRIPYYVGPLARGNSRFAWMTRKSEETITPWNFEEVVDKGASAQSFIERMTNFDKNLPNEKVLPKHSLLYEYFTVYNELTKVKYVTEGMRKPAFLSGEQKKAIVDLLFKTNRKVTVKQLKEDYFKKIECFDSVEISGVEDRFNASLGTYHDLLKIIKDKDFLDNEENEDILEDIVLTLTLFEDREMIEERLKTYAHLFDDKVMKQLKRRRYTGWGRLSRKLINGIRDKQSGKTILDFLKSDGFANRNFMQLIHDDSLTFKEDIQKAQVSGQGDSLHEHIANLAGSPAIKKGILQTVKVVDELVKVMGRHKPENIVIEMARENQTTQKGQKNSRERMKRIEEGIKELGSQILKEHPVENTQLQNEKLYLYYLQNGRDMYVDQELDINRLSDYDVDHIVPQSFLKDDSIDNKVLTRSDKARGKSDNVPSEEVVKKMKNYWRQLLNAKLITQRKFDNLTKAERGGLSELDKAGFIKRQLVETRQITKHVAQILDSRMNTKYDENDKLIREVKVITLKSKLVSDFRKDFQFYKVREINNYHHAHDAYLNAVVGTALIKKYPKLESEFVYGDYKVYDVRKMIAKSEQEIGKATAKYFFYSNIMNFFKTEITLANGEIRKRPLIETNGETGEIVWDKGRDFATVRKVLSMPQVNIVKKTEVQTGGFSKESILPKRNSDKLIARKKDWDPKKYGGFDSPTVAYSVLVVAKVEKGKSKKLKSVKELLGITIMERSSFEKNPIDFLEAKGYKEVKKDLIIKLPKYSLFELENGRKRMLASAGELQKGNELALPSKYVNFLYLASHYEKLKGSPEDNEQKQLFVEQHKHYLDEIIEQISEFSKRVILADANLDKVLSAYNKHRDKPIREQAENIIHLFTLTNLGAPAAFKYFDTTIDRKRYTSTKEVLDATLIHQSITGLYETRIDLSQLGGDGGEAAAKGGTLQLDDEYRLYSPLVKPDQNIQFWLEQFPQAWAETAGMGLAKQVPPQVIQLKASATPVSVRQYPLSKEAQEGIRPHVQRLIQQGILVPVQSPWNTPLLPVRKPGTNDYRPVQDLREVNKRVQDIHPTVPNPYNLLCALPPQRSWYTVLDLKDAFFCLRLHPTSQPLFAFEWRDPGTGRTGQLTWTRLPQGFKNSPTIFNEALHRDLANFRIQHPQVTLLQYVDDLLLAGATKQDCLEGTKALLLELSDLGYRASAKKAQICRREVTYLGYSLRDGQRWLTEARKKTVVQIPAPTTAKQVREFLGTAGFCRLWIPGFATLAAPLYPLTKPKGEFSWAPEHQKAFDAIKKALLSAPALALPDVTKPFTLYVDERKGVARGVLTQTLGPWRRPVAYLSKKLDPVASGWPVCLKAIAAVAILVKDADKLTLGQNITVIAPHALENIVRQPPDRWMTNARMTHYQSLLLTERVTFAPPAALNPATLLPEETDEPVTHDCHQLLIEETGVRKDLTDIPLTGEVLTWFTDGSSYVVEGKRMAGAAVVDGTRTIWASSLPEGTSAQKAELMALTQALRLAEGKSINIYTDSRYAFATAHVHGAIYKQRGWLTSAGREIKNKEEILSLLEALHLPKRLAIIHCPGHQKAKDPISRGNQMADRVAKQAAQGVNLLAGKRTADGSEFEKRTADGSEFESPKKKAKVE

SEQ ID NO: 152 - protein, 2086 aa, synthetic construct
MPAAKRVKLDGGDKKYSIGLDIGTNSVGWAVITDEYKVPSKKFKVLGNTDRHSIKKNLIGALLFDSGETAEATRLKRTARRRYTRRKNRICYLQEIFSNEMAKVDDSFFHRLEESFLVEEDKKHERHPIFGNIVDEVAYHEKYPTIYHLRKKLVDSTDKADLRLIYLALAHMIKFRGHFLIEGDLNPDNSDVDKLFIQLVQTYNQLFEENPINASGVDAKAILSARLSKSRRLENLIAQLPGEKKNGLFGNLIALSLGLTPNFKSNFDLAEDAKLQLSKDTYDDDLDNLLAQIGDQYADLFLAAKNLSDAILLSDILRVNTEITKAPLSASMIKRYDEHHQDLTLLKALVRQQLPEKYKEIFFDQSKNGYAGYIDGGASQEEFYKFIKPILEKMDGTEELLVKLNREDLLRKQRTFDNGSIPHQIHLGELHAILRRQEDFYPFLKDNREKIEKILTFRIPYYVGPLARGNSRFAWMTRKSEETITPWNFEEVVDKGASAQSFIERMTNFDKNLPNEKVLPKHSLLYEYFTVYNELTKVKYVTEGMRKPAFLSGEQKKAIVDLLFKTNRKVTVKQLKEDYFKKIECFDSVEISGVEDRFNASLGTYHDLLKIIKDKDFLDNEENEDILEDIVLTLTLFEDREMIEERLKTYAHLFDDKVMKQLKRRRYTGWGRLSRKLINGIRDKQSGKTILDFLKSDGFANRNFMQLIHDDSLTFKEDIQKAQVSGQGDSLHEHIANLAGSPAIKKGILQTVKVVDELVKVMGRHKPENIVIEMARENQTTQKGQKNSRERMKRIEEGIKELGSQILKEHPVENTQLQNEKLYLYYLQNGRDMYVDQELDINRLSDYDVDHIVPQSFLKDDSIDNKVLTRSDKARGKSDNVPSEEVVKKMKNYWRQLLNAKLITQRKFDNLTKAERGGLSELDKAGFIKRQLVETRQITKHVAQILDSRMNTKYDENDKLIREVKVITLKSKLVSDFRKDFQFYKVREINNYHHAHDAYLNAVVGTALIKKYPKLESEFVYGDYKVYDVRKMIAKSEQEIGKATAKYFFYSNIMNFFKTEITLANGEIRKRPLIETNGETGEIVWDKGRDFATVRKVLSMPQVNIVKKTEVQTGGFSKESILPKRNSDKLIARKKDWDPKKYGGFDSPTVAYSVLVVAKVEKGKSKKLKSVKELLGITIMERSSFEKNPIDFLEAKGYKEVKKDLIIKLPKYSLFELENGRKRMLASAGELQKGNELALPSKYVNFLYLASHYEKLKGSPEDNEQKQLFVEQHKHYLDEIIEQISEFSKRVILADANLDKVLSAYNKHRDKPIREQAENIIHLFTLTNLGAPAAFKYFDTTIDRKRYTSTKEVLDATLIHQSITGLYETRIDLSQLGGDGGGGGGGGGGGTLQLDDEYRLYSPLVKPDQNIQFWLEQFPQAWAETAGMGLAKQVPPQVIQLKASATPVSVRQYPLSKEAQEGIRPHVQRLIQQGILVPVQSPWNTPLLPVRKPGTNDYRPVQDLREVNKRVQDIHPTVPNPYNLLCALPPQRSWYTVLDLKDAFFCLRLHPTSQPLFAFEWRDPGTGRTGQLTWTRLPQGFKNSPTIFNEALHRDLANFRIQHPQVTLLQYVDDLLLAGATKQDCLEGTKALLLELSDLGYRASAKKAQICRREVTYLGYSLRDGQRWLTEARKKTVVQIPAPTTAKQVREFLGTAGFCRLWIPGFATLAAPLYPLTKPKGEFSWAPEHQKAFDAIKKALLSAPALALPDVTKPFTLYVDERKGVARGVLTQTLGPWRRPVAYLSKKLDPVASGWPVCLKAIAAVAILVKDADKLTLGQNITVIAPHALENIVRQPPDRWMTNARMTHYQSLLLTERVTFAPPAALNPATLLPEETDEPVTHDCHQLLIEETGVRKDLTDIPLTGEVLTWFTDGSSYVVEGKRMAGAAVVDGTRTIWASSLPEGTSAQKAELMALTQALRLAEGKSINIYTDSRYAFATAHVHGAIYKQRGWLTSAGREIKNKEEILSLLEALHLPKRLAIIHCPGHQKAKDPISRGNQMADRVAKQAAQGVNLLAGKRTADGSEFEKRTADGSEFESPKKKAKVE

SEQ ID NO: 153 - protein, 2091 aa, synthetic construct
MPAAKRVKLDGGDKKYSIGLDIGTNSVGWAVITDEYKVPSKKFKVLGNTDRHSIKKNLIGALLFDSGETAEATRLKRTARRRYTRRKNRICYLQEIFSNEMAKVDDSFFHRLEESFLVEEDKKHERHPIFGNIVDEVAYHEKYPTIYHLRKKLVDSTDKADLRLIYLALAHMIKFRGHFLIEGDLNPDNSDVDKLFIQLVQTYNQLFEENPINASGVDAKAILSARLSKSRRLENLIAQLPGEKKNGLFGNLIALSLGLTPNFKSNFDLAEDAKLQLSKDTYDDDLDNLLAQIGDQYADLFLAAKNLSDAILLSDILRVNTEITKAPLSASMIKRYDEHHQDLTLLKALVRQQLPEKYKEIFFDQSKNGYAGYIDGGASQEEFYKFIKPILEKMDGTEELLVKLNREDLLRKQRTFDNGSIPHQIHLGELHAILRRQEDFYPFLKDNREKIEKILTFRIPYYVGPLARGNSRFAWMTRKSEETITPWNFEEVVDKGASAQSFIERMTNFDKNLPNEKVLPKHSLLYEYFTVYNELTKVKYVTEGMRKPAFLSGEQKKAIVDLLFKTNRKVTVKQLKEDYFKKIECFDSVEISGVEDRFNASLGTYHDLLKIIKDKDFLDNEENEDILEDIVLTLTLFEDREMIEERLKTYAHLFDDKVMKQLKRRRYTGWGRLSRKLINGIRDKQSGKTILDFLKSDGFANRNFMQLIHDDSLTFKEDIQKAQVSGQGDSLHEHIANLAGSPAIKKGILQTVKVVDELVKVMGRHKPENIVIEMARENQTTQKGQKNSRERMKRIEEGIKELGSQILKEHPVENTQLQNEKLYLYYLQNGRDMYVDQELDINRLSDYDVDHIVPQSFLKDDSIDNKVLTRSDKARGKSDNVPSEEVVKKMKNYWRQLLNAKLITQRKFDNLTKAERGGLSELDKAGFIKRQLVETRQITKHVAQILDSRMNTKYDENDKLIREVKVITLKSKLVSDFRKDFQFYKVREINNYHHAHDAYLNAVVGTALIKKYPKLESEFVYGDYKVYDVRKMIAKSEQEIGKATAKYFFYSNIMNFFKTEITLANGEIRKRPLIETNGETGEIVWDKGRDFATVRKVLSMPQVNIVKKTEVQTGGFSKESILPKRNSDKLIARKKDWDPKKYGGFDSPTVAYSVLVVAKVEKGKSKKLKSVKELLGITIMERSSFEKNPIDFLEAKGYKEVKKDLIIKLPKYSLFELENGRKRMLASAGELQKGNELALPSKYVNFLYLASHYEKLKGSPEDNEQKQLFVEQHKHYLDEIIEQISEFSKRVILADANLDKVLSAYNKHRDKPIREQAENIIHLFTLTNLGAPAAFKYFDTTIDRKRYTSTKEVLDATLIHQSITGLYETRIDLSQLGGDGGGSAGSAAGSGEFGGTLQLDDEYRLYSPLVKPDQNIQFWLEQFPQAWAETAGMGLAKQVPPQVIQLKASATPVSVRQYPLSKEAQEGIRPHVQRLIQQGILVPVQSPWNTPLLPVRKPGTNDYRPVQDLREVNKRVQDIHPTVPNPYNLLCALPPQRSWYTVLDLKDAFFCLRLHPTSQPLFAFEWRDPGTGRTGQLTWTRLPQGFKNSPTIFNEALHRDLANFRIQHPQVTLLQYVDDLLLAGATKQDCLEGTKALLLELSDLGYRASAKKAQICRREVTYLGYSLRDGQRWLTEARKKTVVQIPAPTTAKQVREFLGTAGFCRLWIPGFATLAAPLYPLTKPKGEFSWAPEHQKAFDAIKKALLSAPALALPDVTKPFTLYVDERKGVARGVLTQTLGPWRRPVAYLSKKLDPVASGWPVCLKAIAAVAILVKDADKLTLGQNITVIAPHALENIVRQPPDRWMTNARMTHYQSLLLTERVTFAPPAALNPATLLPEETDEPVTHDCHQLLIEETGVRKDLTDIPLTGEVLTWFTDGSSYVVEGKRMAGAAVVDGTRTIWASSLPEGTSAQKAELMALTQALRLAEGKSINIYTDSRYAFATAHVHGAIYKQRGWLTSAGREIKNKEEILSLLEALHLPKRLAIIHCPGHQKAKDPISRGNQMADRVAKQAAQGVNLLAGKRTADGSEFEKRTADGSEFESPKKKAKVE

SEQ ID NO: 154 - protein, 2090 aa, synthetic construct
MPAAKRVKLDGGDKKYSIGLDIGTNSVGWAVITDEYKVPSKKFKVLGNTDRHSIKKNLIGALLFDSGETAEATRLKRTARRRYTRRKNRICYLQEIFSNEMAKVDDSFFHRLEESFLVEEDKKHERHPIFGNIVDEVAYHEKYPTIYHLRKKLVDSTDKADLRLIYLALAHMIKFRGHFLIEGDLNPDNSDVDKLFIQLVQTYNQLFEENPINASGVDAKAILSARLSKSRRLENLIAQLPGEKKNGLFGNLIALSLGLTPNFKSNFDLAEDAKLQLSKDTYDDDLDNLLAQIGDQYADLFLAAKNLSDAILLSDILRVNTEITKAPLSASMIKRYDEHHQDLTLLKALVRQQLPEKYKEIFFDQSKNGYAGYIDGGASQEEFYKFIKPILEKMDGTEELLVKLNREDLLRKQRTFDNGSIPHQIHLGELHAILRRQEDFYPFLKDNREKIEKILTFRIPYYVGPLARGNSRFAWMTRKSEETITPWNFEEVVDKGASAQSFIERMTNFDKNLPNEKVLPKHSLLYEYFTVYNELTKVKYVTEGMRKPAFLSGEQKKAIVDLLFKTNRKVTVKQLKEDYFKKIECFDSVEISGVEDRFNASLGTYHDLLKIIKDKDFLDNEENEDILEDIVLTLTLFEDREMIEERLKTYAHLFDDKVMKQLKRRRYTGWGRLSRKLINGIRDKQSGKTILDFLKSDGFANRNFMQLIHDDSLTFKEDIQKAQVSGQGDSLHEHIANLAGSPAIKKGILQTVKVVDELVKVMGRHKPENIVIEMARENQTTQKGQKNSRERMKRIEEGIKELGSQILKEHPVENTQLQNEKLYLYYLQNGRDMYVDQELDINRLSDYDVDHIVPQSFLKDDSIDNKVLTRSDKARGKSDNVPSEEVVKKMKNYWRQLLNAKLITQRKFDNLTKAERGGLSELDKAGFIKRQLVETRQITKHVAQILDSRMNTKYDENDKLIREVKVITLKSKLVSDFRKDFQFYKVREINNYHHAHDAYLNAVVGTALIKKYPKLESEFVYGDYKVYDVRKMIAKSEQEIGKATAKYFFYSNIMNFFKTEITLANGEIRKRPLIETNGETGEIVWDKGRDFATVRKVLSMPQVNIVKKTEVQTGGFSKESILPKRNSDKLIARKKDWDPKKYGGFDSPTVAYSVLVVAKVEKGKSKKLKSVKELLGITIMERSSFEKNPIDFLEAKGYKEVKKDLIIKLPKYSLFELENGRKRMLASAGELQKGNELALPSKYVNFLYLASHYEKLKGSPEDNEQKQLFVEQHKHYLDEIIEQISEFSKRVILADANLDKVLSAYNKHRDKPIREQAENIIHLFTLTNLGAPAAFKYFDTTIDRKRYTSTKEVLDATLIHQSITGLYETRIDLSQLGGDGGGGSEAAAKPAPGGTLQLDDEYRLYSPLVKPDQNIQFWLEQFPQAWAETAGMGLAKQVPPQVIQLKASATPVSVRQYPLSKEAQEGIRPHVQRLIQQGILVPVQSPWNTPLLPVRKPGTNDYRPVQDLREVNKRVQDIHPTVPNPYNLLCALPPQRSWYTVLDLKDAFFCLRLHPTSQPLFAFEWRDPGTGRTGQLTWTRLPQGFKNSPTIFNEALHRDLANFRIQHPQVTLLQYVDDLLLAGATKQDCLEGTKALLLELSDLGYRASAKKAQICRREVTYLGYSLRDGQRWLTEARKKTVVQIPAPTTAKQVREFLGTAGFCRLWIPGFATLAAPLYPLTKPKGEFSWAPEHQKAFDAIKKALLSAPALALPDVTKPFTLYVDERKGVARGVLTQTLGPWRRPVAYLSKKLDPVASGWPVCLKAIAAVAILVKDADKLTLGQNITVIAPHALENIVRQPPDRWMTNARMTHYQSLLLTERVTFAPPAALNPATLLPEETDEPVTHDCHQLLIEETGVRKDLTDIPLTGEVLTWFTDGSSYVVEGKRMAGAAVVDGTRTIWASSLPEGTSAQKAELMALTQALRLAEGKSINIYTDSRYAFATAHVHGAIYKQRGWLTSAGREIKNKEEILSLLEALHLPKRLAIIHCPGHQKAKDPISRGNQMADRVAKQAAQGVNLLAGKRTADGSEFEKRTADGSEFESPKKKAKVE

SEQ ID NO: 155 - protein, 2088 aa, synthetic construct
MPAAKRVKLDGGDKKYSIGLDIGTNSVGWAVITDEYKVPSKKFKVLGNTDRHSIKKNLIGALLFDSGETAEATRLKRTARRRYTRRKNRICYLQEIFSNEMAKVDDSFFHRLEESFLVEEDKKHERHPIFGNIVDEVAYHEKYPTIYHLRKKLVDSTDKADLRLIYLALAHMIKFRGHFLIEGDLNPDNSDVDKLFIQLVQTYNQLFEENPINASGVDAKAILSARLSKSRRLENLIAQLPGEKKNGLFGNLIALSLGLTPNFKSNFDLAEDAKLQLSKDTYDDDLDNLLAQIGDQYADLFLAAKNLSDAILLSDILRVNTEITKAPLSASMIKRYDEHHQDLTLLKALVRQQLPEKYKEIFFDQSKNGYAGYIDGGASQEEFYKFIKPILEKMDGTEELLVKLNREDLLRKQRTFDNGSIPHQIHLGELHAILRRQEDFYPFLKDNREKIEKILTFRIPYYVGPLARGNSRFAWMTRKSEETITPWNFEEVVDKGASAQSFIERMTNFDKNLPNEKVLPKHSLLYEYFTVYNELTKVKYVTEGMRKPAFLSGEQKKAIVDLLFKTNRKVTVKQLKEDYFKKIECFDSVEISGVEDRFNASLGTYHDLLKIIKDKDFLDNEENEDILEDIVLTLTLFEDREMIEERLKTYAHLFDDKVMKQLKRRRYTGWGRLSRKLINGIRDKQSGKTILDFLKSDGFANRNFMQLIHDDSLTFKEDIQKAQVSGQGDSLHEHIANLAGSPAIKKGILQTVKVVDELVKVMGRHKPENIVIEMARENQTTQKGQKNSRERMKRIEEGIKELGSQILKEHPVENTQLQNEKLYLYYLQNGRDMYVDQELDINRLSDYDVDHIVPQSFLKDDSIDNKVLTRSDKARGKSDNVPSEEVVKKMKNYWRQLLNAKLITQRKFDNLTKAERGGLSELDKAGFIKRQLVETRQITKHVAQILDSRMNTKYDENDKLIREVKVITLKSKLVSDFRKDFQFYKVREINNYHHAHDAYLNAVVGTALIKKYPKLESEFVYGDYKVYDVRKMIAKSEQEIGKATAKYFFYSNIMNFFKTEITLANGEIRKRPLIETNGETGEIVWDKGRDFATVRKVLSMPQVNIVKKTEVQTGGFSKESILPKRNSDKLIARKKDWDPKKYGGFDSPTVAYSVLVVAKVEKGKSKKLKSVKELLGITIMERSSFEKNPIDFLEAKGYKEVKKDLIIKLPKYSLFELENGRKRMLASAGELQKGNELALPSKYVNFLYLASHYEKLKGSPEDNEQKQLFVEQHKHYLDEIIEQISEFSKRVILADANLDKVLSAYNKHRDKPIREQAENIIHLFTLTNLGAPAAFKYFDTTIDRKRYTSTKEVLDATLIHQSITGLYETRIDLSQLGGDGGGGSGSSPAPGGTLQLDDEYRLYSPLVKPDQNIQFWLEQFPQAWAETAGMGLAKQVPPQVIQLKASATPVSVRQYPLSKEAQEGIRPHVQRLIQQGILVPVQSPWNTPLLPVRKPGTNDYRPVQDLREVNKRVQDIHPTVPNPYNLLCALPPQRSWYTVLDLKDAFFCLRLHPTSQPLFAFEWRDPGTGRTGQLTWTRLPQGFKNSPTIFNEALHRDLANFRIQHPQVTLLQYVDDLLLAGATKQDCLEGTKALLLELSDLGYRASAKKAQICRREVTYLGYSLRDGQRWLTEARKKTVVQIPAPTTAKQVREFLGTAGFCRLWIPGFATLAAPLYPLTKPKGEFSWAPEHQKAFDAIKKALLSAPALALPDVTKPFTLYVDERKGVARGVLTQTLGPWRRPVAYLSKKLDPVASGWPVCLKAIAAVAILVKDADKLTLGQNITVIAPHALENIVRQPPDRWMTNARMTHYQSLLLTERVTFAPPAALNPATLLPEETDEPVTHDCHQLLIEETGVRKDLTDIPLTGEVLTWFTDGSSYVVEGKRMAGAAVVDGTRTIWASSLPEGTSAQKAELMALTQALRLAEGKSINIYTDSRYAFATAHVHGAIYKQRGWLTSAGREIKNKEEILSLLEALHLPKRLAIIHCPGHQKAKDPISRGNQMADRVAKQAAQGVNLLAGKRTADGSEFEKRTADGSEFESPKKKAKVE

SEQ ID NO: 156 - protein, 2125 aa, synthetic construct
MPAAKRVKLDGGDKKYSIGLDIGTNSVGWAVITDEYKVPSKKFKVLGNTDRHSIKKNLIGALLFDSGETAEATRLKRTARRRYTRRKNRICYLQEIFSNEMAKVDDSFFHRLEESFLVEEDKKHERHPIFGNIVDEVAYHEKYPTIYHLRKKLVDSTDKADLRLIYLALAHMIKFRGHFLIEGDLNPDNSDVDKLFIQLVQTYNQLFEENPINASGVDAKAILSARLSKSRRLENLIAQLPGEKKNGLFGNLIALSLGLTPNFKSNFDLAEDAKLQLSKDTYDDDLDNLLAQIGDQYADLFLAAKNLSDAILLSDILRVNTEITKAPLSASMIKRYDEHHQDLTLLKALVRQQLPEKYKEIFFDQSKNGYAGYIDGGASQEEFYKFIKPILEKMDGTEELLVKLNREDLLRKQRTFDNGSIPHQIHLGELHAILRRQEDFYPFLKDNREKIEKILTFRIPYYVGPLARGNSRFAWMTRKSEETITPWNFEEVVDKGASAQSFIERMTNFDKNLPNEKVLPKHSLLYEYFTVYNELTKVKYVTEGMRKPAFLSGEQKKAIVDLLFKTNRKVTVKQLKEDYFKKIECFDSVEISGVEDRFNASLGTYHDLLKIIKDKDFLDNEENEDILEDIVLTLTLFEDREMIEERLKTYAHLFDDKVMKQLKRRRYTGWGRLSRKLINGIRDKQSGKTILDFLKSDGFANRNFMQLIHDDSLTFKEDIQKAQVSGQGDSLHEHIANLAGSPAIKKGILQTVKVVDELVKVMGRHKPENIVIEMARENQTTQKGQKNSRERMKRIEEGIKELGSQILKEHPVENTQLQNEKLYLYYLQNGRDMYVDQELDINRLSDYDVDHIVPQSFLKDDSIDNKVLTRSDKARGKSDNVPSEEVVKKMKNYWRQLLNAKLITQRKFDNLTKAERGGLSELDKAGFIKRQLVETRQITKHVAQILDSRMNTKYDENDKLIREVKVITLKSKLVSDFRKDFQFYKVREINNYHHAHDAYLNAVVGTALIKKYPKLESEFVYGDYKVYDVRKMIAKSEQEIGKATAKYFFYSNIMNFFKTEITLANGEIRKRPLIETNGETGEIVWDKGRDFATVRKVLSMPQVNIVKKTEVQTGGFSKESILPKRNSDKLIARKKDWDPKKYGGFDSPTVAYSVLVVAKVEKGKSKKLKSVKELLGITIMERSSFEKNPIDFLEAKGYKEVKKDLIIKLPKYSLFELENGRKRMLASAGELQKGNELALPSKYVNFLYLASHYEKLKGSPEDNEQKQLFVEQHKHYLDEIIEQISEFSKRVILADANLDKVLSAYNKHRDKPIREQAENIIHLFTLTNLGAPAAFKYFDTTIDRKRYTSTKEVLDATLIHQSITGLYETRIDLSQLGGDGGAEAAAKEAAAKEAAAKEAAAKALEAEAAAKEAAAKEAAAKEAAAKAGGTLQLDDEYRLYSPLVKPDQNIQFWLEQFPQAWAETAGMGLAKQVPPQVIQLKASATPVSVRQYPLSKEAQEGIRPHVQRLIQQGILVPVQSPWNTPLLPVRKPGTNDYRPVQDLREVNKRVQDIHPTVPNPYNLLCALPPQRSWYTVLDLKDAFFCLRLHPTSQPLFAFEWRDPGTGRTGQLTWTRLPQGFKNSPTIFNEALHRDLANFRIQHPQVTLLQYVDDLLLAGATKQDCLEGTKALLLELSDLGYRASAKKAQICRREVTYLGYSLRDGQRWLTEARKKTVVQIPAPTTAKQVREFLGTAGFCRLWIPGFATLAAPLYPLTKPKGEFSWAPEHQKAFDAIKKALLSAPALALPDVTKPFTLYVDERKGVARGVLTQTLGPWRRPVAYLSKKLDPVASGWPVCLKAIAAVAILVKDADKLTLGQNITVIAPHALENIVRQPPDRWMTNARMTHYQSLLLTERVTFAPPAALNPATLLPEETDEPVTHDCHQLLIEETGVRKDLTDIPLTGEVLTWFTDGSSYVVEGKRMAGAAVVDGTRTIWASSLPEGTSAQKAELMALTQALRLAEGKSINIYTDSRYAFATAHVHGAIYKQRGWLTSAGREIKNKEEILSLLEALHLPKRLAIIHCPGHQKAKDPISRGNQMADRVAKQAAQGVNLLAGKRTADGSEFEKRTADGSEFESPKKKAKVE

SEQ ID NO: 157 - protein, 2092 aa, synthetic construct
MPAAKRVKLDGGDKKYSIGLDIGTNSVGWAVITDEYKVPSKKFKVLGNTDRHSIKKNLIGALLFDSGETAEATRLKRTARRRYTRRKNRICYLQEIFSNEMAKVDDSFFHRLEESFLVEEDKKHERHPIFGNIVDEVAYHEKYPTIYHLRKKLVDSTDKADLRLIYLALAHMIKFRGHFLIEGDLNPDNSDVDKLFIQLVQTYNQLFEENPINASGVDAKAILSARLSKSRRLENLIAQLPGEKKNGLFGNLIALSLGLTPNFKSNFDLAEDAKLQLSKDTYDDDLDNLLAQIGDQYADLFLAAKNLSDAILLSDILRVNTEITKAPLSASMIKRYDEHHQDLTLLKALVRQQLPEKYKEIFFDQSKNGYAGYIDGGASQEEFYKFIKPILEKMDGTEELLVKLNREDLLRKQRTFDNGSIPHQIHLGELHAILRRQEDFYPFLKDNREKIEKILTFRIPYYVGPLARGNSRFAWMTRKSEETITPWNFEEVVDKGASAQSFIERMTNFDKNLPNEKVLPKHSLLYEYFTVYNELTKVKYVTEGMRKPAFLSGEQKKAIVDLLFKTNRKVTVKQLKEDYFKKIECFDSVEISGVEDRFNASLGTYHDLLKIIKDKDFLDNEENEDILEDIVLTLTLFEDREMIEERLKTYAHLFDDKVMKQLKRRRYTGWGRLSRKLINGIRDKQSGKTILDFLKSDGFANRNFMQLIHDDSLTFKEDIQKAQVSGQGDSLHEHIANLAGSPAIKKGILQTVKVVDELVKVMGRHKPENIVIEMARENQTTQKGQKNSRERMKRIEEGIKELGSQILKEHPVENTQLQNEKLYLYYLQNGRDMYVDQELDINRLSDYDVDHIVPQSFLKDDSIDNKVLTRSDKARGKSDNVPSEEVVKKMKNYWRQLLNAKLITQRKFDNLTKAERGGLSELDKAGFIKRQLVETRQITKHVAQILDSRMNTKYDENDKLIREVKVITLKSKLVSDFRKDFQFYKVREINNYHHAHDAYLNAVVGTALIKKYPKLESEFVYGDYKVYDVRKMIAKSEQEIGKATAKYFFYSNIMNFFKTEITLANGEIRKRPLIETNGETGEIVWDKGRDFATVRKVLSMPQVNIVKKTEVQTGGFSKESILPKRNSDKLIARKKDWDPKKYGGFDSPTVAYSVLVVAKVEKGKSKKLKSVKELLGITIMERSSFEKNPIDFLEAKGYKEVKKDLIIKLPKYSLFELENGRKRMLASAGELQKGNELALPSKYVNFLYLASHYEKLKGSPEDNEQKQLFVEQHKHYLDEIIEQISEFSKRVILADANLDKVLSAYNKHRDKPIREQAENIIHLFTLTNLGAPAAFKYFDTTIDRKRYTSTKEVLDATLIHQSITGLYETRIDLSQLGGDGGPAPAPAPAPAPAPGGTLQLDDEYRLYSPLVKPDQNIQFWLEQFPQAWAETAGMGLAKQVPPQVIQLKASATPVSVRQYPLSKEAQEGIRPHVQRLIQQGILVPVQSPWNTPLLPVRKPGTNDYRPVQDLREVNKRVQDIHPTVPNPYNLLCALPPQRSWYTVLDLKDAFFCLRLHPTSQPLFAFEWRDPGTGRTGQLTWTRLPQGFKNSPTIFNEALHRDLANFRIQHPQVTLLQYVDDLLLAGATKQDCLEGTKALLLELSDLGYRASAKKAQICRREVTYLGYSLRDGQRWLTEARKKTVVQIPAPTTAKQVREFLGTAGFCRLWIPGFATLAAPLYPLTKPKGEFSWAPEHQKAFDAIKKALLSAPALALPDVTKPFTLYVDERKGVARGVLTQTLGPWRRPVAYLSKKLDPVASGWPVCLKAIAAVAILVKDADKLTLGQNITVIAPHALENIVRQPPDRWMTNARMTHYQSLLLTERVTFAPPAALNPATLLPEETDEPVTHDCHQLLIEETGVRKDLTDIPLTGEVLTWFTDGSSYVVEGKRMAGAAVVDGTRTIWASSLPEGTSAQKAELMALTQALRLAEGKSINIYTDSRYAFATAHVHGAIYKQRGWLTSAGREIKNKEEILSLLEALHLPKRLAIIHCPGHQKAKDPISRGNQMADRVAKQAAQGVNLLAGKRTADGSEFEKRTADGSEFESPKKKAKVE

SEQ ID NO: 158 - protein, 2087 aa, synthetic construct
MPAAKRVKLDGGDKKYSIGLDIGTNSVGWAVITDEYKVPSKKFKVLGNTDRHSIKKNLIGALLFDSGETAEATRLKRTARRRYTRRKNRICYLQEIFSNEMAKVDDSFFHRLEESFLVEEDKKHERHPIFGNIVDEVAYHEKYPTIYHLRKKLVDSTDKADLRLIYLALAHMIKFRGHFLIEGDLNPDNSDVDKLFIQLVQTYNQLFEENPINASGVDAKAILSARLSKSRRLENLIAQLPGEKKNGLFGNLIALSLGLTPNFKSNFDLAEDAKLQLSKDTYDDDLDNLLAQIGDQYADLFLAAKNLSDAILLSDILRVNTEITKAPLSASMIKRYDEHHQDLTLLKALVRQQLPEKYKEIFFDQSKNGYAGYIDGGASQEEFYKFIKPILEKMDGTEELLVKLNREDLLRKQRTFDNGSIPHQIHLGELHAILRRQEDFYPFLKDNREKIEKILTFRIPYYVGPLARGNSRFAWMTRKSEETITPWNFEEVVDKGASAQSFIERMTNFDKNLPNEKVLPKHSLLYEYFTVYNELTKVKYVTEGMRKPAFLSGEQKKAIVDLLFKTNRKVTVKQLKEDYFKKIECFDSVEISGVEDRFNASLGTYHDLLKIIKDKDFLDNEENEDILEDIVLTLTLFEDREMIEERLKTYAHLFDDKVMKQLKRRRYTGWGRLSRKLINGIRDKQSGKTILDFLKSDGFANRNFMQLIHDDSLTFKEDIQKAQVSGQGDSLHEHIANLAGSPAIKKGILQTVKVVDELVKVMGRHKPENIVIEMARENQTTQKGQKNSRERMKRIEEGIKELGSQILKEHPVENTQLQNEKLYLYYLQNGRDMYVDQELDINRLSDYDVDHIVPQSFLKDDSIDNKVLTRSDKARGKSDNVPSEEVVKKMKNYWRQLLNAKLITQRKFDNLTKAERGGLSELDKAGFIKRQLVETRQITKHVAQILDSRMNTKYDENDKLIREVKVITLKSKLVSDFRKDFQFYKVREINNYHHAHDAYLNAVVGTALIKKYPKLESEFVYGDYKVYDVRKMIAKSEQEIGKATAKYFFYSNIMNFFKTEITLANGEIRKRPLIETNGETGEIVWDKGRDFATVRKVLSMPQVNIVKKTEVQTGGFSKESILPKRNSDKLIARKKDWDPKKYGGFDSPTVAYSVLVVAKVEKGKSKKLKSVKELLGITIMERSSFEKNPIDFLEAKGYKEVKKDLIIKLPKYSLFELENGRKRMLASAGELQKGNELALPSKYVNFLYLASHYEKLKGSPEDNEQKQLFVEQHKHYLDEIIEQISEFSKRVILADANLDKVLSAYNKHRDKPIREQAENIIHLFTLTNLGAPAAFKYFDTTIDRKRYTSTKEVLDATLIHQSITGLYETRIDLSQLGGDGGEAAAKGGSGGTLQLDDEYRLYSPLVKPDQNIQFWLEQFPQAWAETAGMGLAKQVPPQVIQLKASATPVSVRQYPLSKEAQEGIRPHVQRLIQQGILVPVQSPWNTPLLPVRKPGTNDYRPVQDLREVNKRVQDIHPTVPNPYNLLCALPPQRSWYTVLDLKDAFFCLRLHPTSQPLFAFEWRDPGTGRTGQLTWTRLPQGFKNSPTIFNEALHRDLANFRIQHPQVTLLQYVDDLLLAGATKQDCLEGTKALLLELSDLGYRASAKKAQICRREVTYLGYSLRDGQRWLTEARKKTVVQIPAPTTAKQVREFLGTAGFCRLWIPGFATLAAPLYPLTKPKGEFSWAPEHQKAFDAIKKALLSAPALALPDVTKPFTLYVDERKGVARGVLTQTLGPWRRPVAYLSKKLDPVASGWPVCLKAIAAVAILVKDADKLTLGQNITVIAPHALENIVRQPPDRWMTNARMTHYQSLLLTERVTFAPPAALNPATLLPEETDEPVTHDCHQLLIEETGVRKDLTDIPLTGEVLTWFTDGSSYVVEGKRMAGAAVVDGTRTIWASSLPEGTSAQKAELMALTQALRLAEGKSINIYTDSRYAFATAHVHGAIYKQRGWLTSAGREIKNKEEILSLLEALHLPKRLAIIHCPGHQKAKDPISRGNQMADRVAKQAAQGVNLLAGKRTADGSEFEKRTADGSEFESPKKKAKVE

SEQ ID NO: 159 - protein, 2094 aa, synthetic construct
MPAAKRVKLDGGDKKYSIGLDIGTNSVGWAVITDEYKVPSKKFKVLGNTDRHSIKKNLIGALLFDSGETAEATRLKRTARRRYTRRKNRICYLQEIFSNEMAKVDDSFFHRLEESFLVEEDKKHERHPIFGNIVDEVAYHEKYPTIYHLRKKLVDSTDKADLRLIYLALAHMIKFRGHFLIEGDLNPDNSDVDKLFIQLVQTYNQLFEENPINASGVDAKAILSARLSKSRRLENLIAQLPGEKKNGLFGNLIALSLGLTPNFKSNFDLAEDAKLQLSKDTYDDDLDNLLAQIGDQYADLFLAAKNLSDAILLSDILRVNTEITKAPLSASMIKRYDEHHQDLTLLKALVRQQLPEKYKEIFFDQSKNGYAGYIDGGASQEEFYKFIKPILEKMDGTEELLVKLNREDLLRKQRTFDNGSIPHQIHLGELHAILRRQEDFYPFLKDNREKIEKILTFRIPYYVGPLARGNSRFAWMTRKSEETITPWNFEEVVDKGASAQSFIERMTNFDKNLPNEKVLPKHSLLYEYFTVYNELTKVKYVTEGMRKPAFLSGEQKKAIVDLLFKTNRKVTVKQLKEDYFKKIECFDSVEISGVEDRFNASLGTYHDLLKIIKDKDFLDNEENEDILEDIVLTLTLFEDREMIEERLKTYAHLFDDKVMKQLKRRRYTGWGRLSRKLINGIRDKQSGKTILDFLKSDGFANRNFMQLIHDDSLTFKEDIQKAQVSGQGDSLHEHIANLAGSPAIKKGILQTVKVVDELVKVMGRHKPENIVIEMARENQTTQKGQKNSRERMKRIEEGIKELGSQILKEHPVENTQLQNEKLYLYYLQNGRDMYVDQELDINRLSDYDVDHIVPQSFLKDDSIDNKVLTRSDKARGKSDNVPSEEVVKKMKNYWRQLLNAKLITQRKFDNLTKAERGGLSELDKAGFIKRQLVETRQITKHVAQILDSRMNTKYDENDKLIREVKVITLKSKLVSDFRKDFQFYKVREINNYHHAHDAYLNAVVGTALIKKYPKLESEFVYGDYKVYDVRKMIAKSEQEIGKATAKYFFYSNIMNFFKTEITLANGEIRKRPLIETNGETGEIVWDKGRDFATVRKVLSMPQVNIVKKTEVQTGGFSKESILPKRNSDKLIARKKDWDPKKYGGFDSPTVAYSVLVVAKVEKGKSKKLKSVKELLGITIMERSSFEKNPIDFLEAKGYKEVKKDLIIKLPKYSLFELENGRKRMLASAGELQKGNELALPSKYVNFLYLASHYEKLKGSPEDNEQKQLFVEQHKHYLDEIIEQISEFSKRVILADANLDKVLSAYNKHRDKPIREQAENIIHLFTLTNLGAPAAFKYFDTTIDRKRYTSTKEVLDATLIHQSITGLYETRIDLSQLGGDGGGGGGSGGGGSGGGGSGGTLQLDDEYRLYSPLVKPDQNIQFWLEQFPQAWAETAGMGLAKQVPPQVIQLKASATPVSVRQYPLSKEAQEGIRPHVQRLIQQGILVPVQSPWNTPLLPVRKPGTNDYRPVQDLREVNKRVQDIHPTVPNPYNLLCALPPQRSWYTVLDLKDAFFCLRLHPTSQPLFAFEWRDPGTGRTGQLTWTRLPQGFKNSPTIFNEALHRDLANFRIQHPQVTLLQYVDDLLLAGATKQDCLEGTKALLLELSDLGYRASAKKAQICRREVTYLGYSLRDGQRWLTEARKKTVVQIPAPTTAKQVREFLGTAGFCRLWIPGFATLAAPLYPLTKPKGEFSWAPEHQKAFDAIKKALLSAPALALPDVTKPFTLYVDERKGVARGVLTQTLGPWRRPVAYLSKKLDPVASGWPVCLKAIAAVAILVKDADKLTLGQNITVIAPHALENIVRQPPDRWMTNARMTHYQSLLLTERVTFAPPAALNPATLLPEETDEPVTHDCHQLLIEETGVRKDLTDIPLTGEVLTWFTDGSSYVVEGKRMAGAAVVDGTRTIWASSLPEGTSAQKAELMALTQALRLAEGKSINIYTDSRYAFATAHVHGAIYKQRGWLTSAGREIKNKEEILSLLEALHLPKRLAIIHCPGHQKAKDPISRGNQMADRVAKQAAQGVNLLAGKRTADGSEFEKRTADGSEFESPKKKAKVE

SEQ ID NO: 160 - protein, 2090 aa, synthetic construct
MPAAKRVKLDGGDKKYSIGLDIGTNSVGWAVITDEYKVPSKKFKVLGNTDRHSIKKNLIGALLFDSGETAEATRLKRTARRRYTRRKNRICYLQEIFSNEMAKVDDSFFHRLEESFLVEEDKKHERHPIFGNIVDEVAYHEKYPTIYHLRKKLVDSTDKADLRLIYLALAHMIKFRGHFLIEGDLNPDNSDVDKLFIQLVQTYNQLFEENPINASGVDAKAILSARLSKSRRLENLIAQLPGEKKNGLFGNLIALSLGLTPNFKSNFDLAEDAKLQLSKDTYDDDLDNLLAQIGDQYADLFLAAKNLSDAILLSDILRVNTEITKAPLSASMIKRYDEHHQDLTLLKALVRQQLPEKYKEIFFDQSKNGYAGYIDGGASQEEFYKFIKPILEKMDGTEELLVKLNREDLLRKQRTFDNGSIPHQIHLGELHAILRRQEDFYPFLKDNREKIEKILTFRIPYYVGPLARGNSRFAWMTRKSEETITPWNFEEVVDKGASAQSFIERMTNFDKNLPNEKVLPKHSLLYEYFTVYNELTKVKYVTEGMRKPAFLSGEQKKAIVDLLFKTNRKVTVKQLKEDYFKKIECFDSVEISGVEDRFNASLGTYHDLLKIIKDKDFLDNEENEDILEDIVLTLTLFEDREMIEERLKTYAHLFDDKVMKQLKRRRYTGWGRLSRKLINGIRDKQSGKTILDFLKSDGFANRNFMQLIHDDSLTFKEDIQKAQVSGQGDSLHEHIANLAGSPAIKKGILQTVKVVDELVKVMGRHKPENIVIEMARENQTTQKGQKNSRERMKRIEEGIKELGSQILKEHPVENTQLQNEKLYLYYLQNGRDMYVDQELDINRLSDYDVDHIVPQSFLKDDSIDNKVLTRSDKARGKSDNVPSEEVVKKMKNYWRQLLNAKLITQRKFDNLTKAERGGLSELDKAGFIKRQLVETRQITKHVAQILDSRMNTKYDENDKLIREVKVITLKSKLVSDFRKDFQFYKVREINNYHHAHDAYLNAVVGTALIKKYPKLESEFVYGDYKVYDVRKMIAKSEQEIGKATAKYFFYSNIMNFFKTEITLANGEIRKRPLIETNGETGEIVWDKGRDFATVRKVLSMPQVNIVKKTEVQTGGFSKESILPKRNSDKLIARKKDWDPKKYGGFDSPTVAYSVLVVAKVEKGKSKKLKSVKELLGITIMERSSFEKNPIDFLEAKGYKEVKKDLIIKLPKYSLFELENGRKRMLASAGELQKGNELALPSKYVNFLYLASHYEKLKGSPEDNEQKQLFVEQHKHYLDEIIEQISEFSKRVILADANLDKVLSAYNKHRDKPIREQAENIIHLFTLTNLGAPAAFKYFDTTIDRKRYTSTKEVLDATLIHQSITGLYETRIDLSQLGGDGGEAAAKGSSGGGGGTLQLDDEYRLYSPLVKPDQNIQFWLEQFPQAWAETAGMGLAKQVPPQVIQLKASATPVSVRQYPLSKEAQEGIRPHVQRLIQQGILVPVQSPWNTPLLPVRKPGTNDYRPVQDLREVNKRVQDIHPTVPNPYNLLCALPPQRSWYTVLDLKDAFFCLRLHPTSQPLFAFEWRDPGTGRTGQLTWTRLPQGFKNSPTIFNEALHRDLANFRIQHPQVTLLQYVDDLLLAGATKQDCLEGTKALLLELSDLGYRASAKKAQICRREVTYLGYSLRDGQRWLTEARKKTVVQIPAPTTAKQVREFLGTAGFCRLWIPGFATLAAPLYPLTKPKGEFSWAPEHQKAFDAIKKALLSAPALALPDVTKPFTLYVDERKGVARGVLTQTLGPWRRPVAYLSKKLDPVASGWPVCLKAIAAVAILVKDADKLTLGQNITVIAPHALENIVRQPPDRWMTNARMTHYQSLLLTERVTFAPPAALNPATLLPEETDEPVTHDCHQLLIEETGVRKDLTDIPLTGEVLTWFTDGSSYVVEGKRMAGAAVVDGTRTIWASSLPEGTSAQKAELMALTQALRLAEGKSINIYTDSRYAFATAHVHGAIYKQRGWLTSAGREIKNKEEILSLLEALHLPKRLAIIHCPGHQKAKDPISRGNQMADRVAKQAAQGVNLLAGKRTADGSEFEKRTADGSEFESPKKKAKVE

SEQ ID NO: 161 - protein, 2094 aa, synthetic construct
MPAAKRVKLDGGDKKYSIGLDIGTNSVGWAVITDEYKVPSKKFKVLGNTDRHSIKKNLIGALLFDSGETAEATRLKRTARRRYTRRKNRICYLQEIFSNEMAKVDDSFFHRLEESFLVEEDKKHERHPIFGNIVDEVAYHEKYPTIYHLRKKLVDSTDKADLRLIYLALAHMIKFRGHFLIEGDLNPDNSDVDKLFIQLVQTYNQLFEENPINASGVDAKAILSARLSKSRRLENLIAQLPGEKKNGLFGNLIALSLGLTPNFKSNFDLAEDAKLQLSKDTYDDDLDNLLAQIGDQYADLFLAAKNLSDAILLSDILRVNTEITKAPLSASMIKRYDEHHQDLTLLKALVRQQLPEKYKEIFFDQSKNGYAGYIDGGASQEEFYKFIKPILEKMDGTEELLVKLNREDLLRKQRTFDNGSIPHQIHLGELHAILRRQEDFYPFLKDNREKIEKILTFRIPYYVGPLARGNSRFAWMTRKSEETITPWNFEEVVDKGASAQSFIERMTNFDKNLPNEKVLPKHSLLYEYFTVYNELTKVKYVTEGMRKPAFLSGEQKKAIVDLLFKTNRKVTVKQLKEDYFKKIECFDSVEISGVEDRFNASLGTYHDLLKIIKDKDFLDNEENEDILEDIVLTLTLFEDREMIEERLKTYAHLFDDKVMKQLKRRRYTGWGRLSRKLINGIRDKQSGKTILDFLKSDGFANRNFMQLIHDDSLTFKEDIQKAQVSGQGDSLHEHIANLAGSPAIKKGILQTVKVVDELVKVMGRHKPENIVIEMARENQTTQKGQKNSRERMKRIEEGIKELGSQILKEHPVENTQLQNEKLYLYYLQNGRDMYVDQELDINRLSDYDVDHIVPQSFLKDDSIDNKVLTRSDKARGKSDNVPSEEVVKKMKNYWRQLLNAKLITQRKFDNLTKAERGGLSELDKAGFIKRQLVETRQITKHVAQILDSRMNTKYDENDKLIREVKVITLKSKLVSDFRKDFQFYKVREINNYHHAHDAYLNAVVGTALIKKYPKLESEFVYGDYKVYDVRKMIAKSEQEIGKATAKYFFYSNIMNFFKTEITLANGEIRKRPLIETNGETGEIVWDKGRDFATVRKVLSMPQVNIVKKTEVQTGGFSKESILPKRNSDKLIARKKDWDPKKYGGFDSPTVAYSVLVVAKVEKGKSKKLKSVKELLGITIMERSSFEKNPIDFLEAKGYKEVKKDLIIKLPKYSLFELENGRKRMLASAGELQKGNELALPSKYVNFLYLASHYEKLKGSPEDNEQKQLFVEQHKHYLDEIIEQISEFSKRVILADANLDKVLSAYNKHRDKPIREQAENIIHLFTLTNLGAPAAFKYFDTTIDRKRYTSTKEVLDATLIHQSITGLYETRIDLSQLGGDGGGGGGSEAAAKGGGGSGGTLQLDDEYRLYSPLVKPDQNIQFWLEQFPQAWAETAGMGLAKQVPPQVIQLKASATPVSVRQYPLSKEAQEGIRPHVQRLIQQGILVPVQSPWNTPLLPVRKPGTNDYRPVQDLREVNKRVQDIHPTVPNPYNLLCALPPQRSWYTVLDLKDAFFCLRLHPTSQPLFAFEWRDPGTGRTGQLTWTRLPQGFKNSPTIFNEALHRDLANFRIQHPQVTLLQYVDDLLLAGATKQDCLEGTKALLLELSDLGYRASAKKAQICRREVTYLGYSLRDGQRWLTEARKKTVVQIPAPTTAKQVREFLGTAGFCRLWIPGFATLAAPLYPLTKPKGEFSWAPEHQKAFDAIKKALLSAPALALPDVTKPFTLYVDERKGVARGVLTQTLGPWRRPVAYLSKKLDPVASGWPVCLKAIAAVAILVKDADKLTLGQNITVIAPHALENIVRQPPDRWMTNARMTHYQSLLLTERVTFAPPAALNPATLLPEETDEPVTHDCHQLLIEETGVRKDLTDIPLTGEVLTWFTDGSSYVVEGKRMAGAAVVDGTRTIWASSLPEGTSAQKAELMALTQALRLAEGKSINIYTDSRYAFATAHVHGAIYKQRGWLTSAGREIKNKEEILSLLEALHLPKRLAIIHCPGHQKAKDPISRGNQMADRVAKQAAQGVNLLAGKRTADGSEFEKRTADGSEFESPKKKAKVE

SEQ ID NO: 162 - protein, 2088 aa, synthetic construct
MPAAKRVKLDGGDKKYSIGLDIGTNSVGWAVITDEYKVPSKKFKVLGNTDRHSIKKNLIGALLFDSGETAEATRLKRTARRRYTRRKNRICYLQEIFSNEMAKVDDSFFHRLEESFLVEEDKKHERHPIFGNIVDEVAYHEKYPTIYHLRKKLVDSTDKADLRLIYLALAHMIKFRGHFLIEGDLNPDNSDVDKLFIQLVQTYNQLFEENPINASGVDAKAILSARLSKSRRLENLIAQLPGEKKNGLFGNLIALSLGLTPNFKSNFDLAEDAKLQLSKDTYDDDLDNLLAQIGDQYADLFLAAKNLSDAILLSDILRVNTEITKAPLSASMIKRYDEHHQDLTLLKALVRQQLPEKYKEIFFDQSKNGYAGYIDGGASQEEFYKFIKPILEKMDGTEELLVKLNREDLLRKQRTFDNGSIPHQIHLGELHAILRRQEDFYPFLKDNREKIEKILTFRIPYYVGPLARGNSRFAWMTRKSEETITPWNFEEVVDKGASAQSFIERMTNFDKNLPNEKVLPKHSLLYEYFTVYNELTKVKYVTEGMRKPAFLSGEQKKAIVDLLFKTNRKVTVKQLKEDYFKKIECFDSVEISGVEDRFNASLGTYHDLLKIIKDKDFLDNEENEDILEDIVLTLTLFEDREMIEERLKTYAHLFDDKVMKQLKRRRYTGWGRLSRKLINGIRDKQSGKTILDFLKSDGFANRNFMQLIHDDSLTFKEDIQKAQVSGQGDSLHEHIANLAGSPAIKKGILQTVKVVDELVKVMGRHKPENIVIEMARENQTTQKGQKNSRERMKRIEEGIKELGSQILKEHPVENTQLQNEKLYLYYLQNGRDMYVDQELDINRLSDYDVDHIVPQSFLKDDSIDNKVLTRSDKARGKSDNVPSEEVVKKMKNYWRQLLNAKLITQRKFDNLTKAERGGLSELDKAGFIKRQLVETRQITKHVAQILDSRMNTKYDENDKLIREVKVITLKSKLVSDFRKDFQFYKVREINNYHHAHDAYLNAVVGTALIKKYPKLESEFVYGDYKVYDVRKMIAKSEQEIGKATAKYFFYSNIMNFFKTEITLANGEIRKRPLIETNGETGEIVWDKGRDFATVRKVLSMPQVNIVKKTEVQTGGFSKESILPKRNSDKLIARKKDWDPKKYGGFDSPTVAYSVLVVAKVEKGKSKKLKSVKELLGITIMERSSFEKNPIDFLEAKGYKEVKKDLIIKLPKYSLFELENGRKRMLASAGELQKGNELALPSKYVNFLYLASHYEKLKGSPEDNEQKQLFVEQHKHYLDEIIEQISEFSKRVILADANLDKVLSAYNKHRDKPIREQAENIIHLFTLTNLGAPAAFKYFDTTIDRKRYTSTKEVLDATLIHQSITGLYETRIDLSQLGGDGGGSSGGGGGSGGTLQLDDEYRLYSPLVKPDQNIQFWLEQFPQAWAETAGMGLAKQVPPQVIQLKASATPVSVRQYPLSKEAQEGIRPHVQRLIQQGILVPVQSPWNTPLLPVRKPGTNDYRPVQDLREVNKRVQDIHPTVPNPYNLLCALPPQRSWYTVLDLKDAFFCLRLHPTSQPLFAFEWRDPGTGRTGQLTWTRLPQGFKNSPTIFNEALHRDLANFRIQHPQVTLLQYVDDLLLAGATKQDCLEGTKALLLELSDLGYRASAKKAQICRREVTYLGYSLRDGQRWLTEARKKTVVQIPAPTTAKQVREFLGTAGFCRLWIPGFATLAAPLYPLTKPKGEFSWAPEHQKAFDAIKKALLSAPALALPDVTKPFTLYVDERKGVARGVLTQTLGPWRRPVAYLSKKLDPVASGWPVCLKAIAAVAILVKDADKLTLGQNITVIAPHALENIVRQPPDRWMTNARMTHYQSLLLTERVTFAPPAALNPATLLPEETDEPVTHDCHQLLIEETGVRKDLTDIPLTGEVLTWFTDGSSYVVEGKRMAGAAVVDGTRTIWASSLPEGTSAQKAELMALTQALRLAEGKSINIYTDSRYAFATAHVHGAIYKQRGWLTSAGREIKNKEEILSLLEALHLPKRLAIIHCPGHQKAKDPISRGNQMADRVAKQAAQGVNLLAGKRTADGSEFEKRTADGSEFESPKKKAKVE

SEQ ID NO: 163 - protein, 2084 aa, synthetic construct
MPAAKRVKLDGGDKKYSIGLDIGTNSVGWAVITDEYKVPSKKFKVLGNTDRHSIKKNLIGALLFDSGETAEATRLKRTARRRYTRRKNRICYLQEIFSNEMAKVDDSFFHRLEESFLVEEDKKHERHPIFGNIVDEVAYHEKYPTIYHLRKKLVDSTDKADLRLIYLALAHMIKFRGHFLIEGDLNPDNSDVDKLFIQLVQTYNQLFEENPINASGVDAKAILSARLSKSRRLENLIAQLPGEKKNGLFGNLIALSLGLTPNFKSNFDLAEDAKLQLSKDTYDDDLDNLLAQIGDQYADLFLAAKNLSDAILLSDILRVNTEITKAPLSASMIKRYDEHHQDLTLLKALVRQQLPEKYKEIFFDQSKNGYAGYIDGGASQEEFYKFIKPILEKMDGTEELLVKLNREDLLRKQRTFDNGSIPHQIHLGELHAILRRQEDFYPFLKDNREKIEKILTFRIPYYVGPLARGNSRFAWMTRKSEETITPWNFEEVVDKGASAQSFIERMTNFDKNLPNEKVLPKHSLLYEYFTVYNELTKVKYVTEGMRKPAFLSGEQKKAIVDLLFKTNRKVTVKQLKEDYFKKIECFDSVEISGVEDRFNASLGTYHDLLKIIKDKDFLDNEENEDILEDIVLTLTLFEDREMIEERLKTYAHLFDDKVMKQLKRRRYTGWGRLSRKLINGIRDKQSGKTILDFLKSDGFANRNFMQLIHDDSLTFKEDIQKAQVSGQGDSLHEHIANLAGSPAIKKGILQTVKVVDELVKVMGRHKPENIVIEMARENQTTQKGQKNSRERMKRIEEGIKELGSQILKEHPVENTQLQNEKLYLYYLQNGRDMYVDQELDINRLSDYDVDHIVPQSFLKDDSIDNKVLTRSDKARGKSDNVPSEEVVKKMKNYWRQLLNAKLITQRKFDNLTKAERGGLSELDKAGFIKRQLVETRQITKHVAQILDSRMNTKYDENDKLIREVKVITLKSKLVSDFRKDFQFYKVREINNYHHAHDAYLNAVVGTALIKKYPKLESEFVYGDYKVYDVRKMIAKSEQEIGKATAKYFFYSNIMNFFKTEITLANGEIRKRPLIETNGETGEIVWDKGRDFATVRKVLSMPQVNIVKKTEVQTGGFSKESILPKRNSDKLIARKKDWDPKKYGGFDSPTVAYSVLVVAKVEKGKSKKLKSVKELLGITIMERSSFEKNPIDFLEAKGYKEVKKDLIIKLPKYSLFELENGRKRMLASAGELQKGNELALPSKYVNFLYLASHYEKLKGSPEDNEQKQLFVEQHKHYLDEIIEQISEFSKRVILADANLDKVLSAYNKHRDKPIREQAENIIHLFTLTNLGAPAAFKYFDTTIDRKRYTSTKEVLDATLIHQSITGLYETRIDLSQLGGDGGPAPAPGGTLQLDDEYRLYSPLVKPDQNIQFWLEQFPQAWAETAGMGLAKQVPPQVIQLKASATPVSVRQYPLSKEAQEGIRPHVQRLIQQGILVPVQSPWNTPLLPVRKPGTNDYRPVQDLREVNKRVQDIHPTVPNPYNLLCALPPQRSWYTVLDLKDAFFCLRLHPTSQPLFAFEWRDPGTGRTGQLTWTRLPQGFKNSPTIFNEALHRDLANFRIQHPQVTLLQYVDDLLLAGATKQDCLEGTKALLLELSDLGYRASAKKAQICRREVTYLGYSLRDGQRWLTEARKKTVVQIPAPTTAKQVREFLGTAGFCRLWIPGFATLAAPLYPLTKPKGEFSWAPEHQKAFDAIKKALLSAPALALPDVTKPFTLYVDERKGVARGVLTQTLGPWRRPVAYLSKKLDPVASGWPVCLKAIAAVAILVKDADKLTLGQNITVIAPHALENIVRQPPDRWMTNARMTHYQSLLLTERVTFAPPAALNPATLLPEETDEPVTHDCHQLLIEETGVRKDLTDIPLTGEVLTWFTDGSSYVVEGKRMAGAAVVDGTRTIWASSLPEGTSAQKAELMALTQALRLAEGKSINIYTDSRYAFATAHVHGAIYKQRGWLTSAGREIKNKEEILSLLEALHLPKRLAIIHCPGHQKAKDPISRGNQMADRVAKQAAQGVNLLAGKRTADGSEFEKRTADGSEFESPKKKAKVE

SEQ ID NO: 164 - protein, 2090 aa, synthetic construct
MPAAKRVKLDGGDKKYSIGLDIGTNSVGWAVITDEYKVPSKKFKVLGNTDRHSIKKNLIGALLFDSGETAEATRLKRTARRRYTRRKNRICYLQEIFSNEMAKVDDSFFHRLEESFLVEEDKKHERHPIFGNIVDEVAYHEKYPTIYHLRKKLVDSTDKADLRLIYLALAHMIKFRGHFLIEGDLNPDNSDVDKLFIQLVQTYNQLFEENPINASGVDAKAILSARLSKSRRLENLIAQLPGEKKNGLFGNLIALSLGLTPNFKSNFDLAEDAKLQLSKDTYDDDLDNLLAQIGDQYADLFLAAKNLSDAILLSDILRVNTEITKAPLSASMIKRYDEHHQDLTLLKALVRQQLPEKYKEIFFDQSKNGYAGYIDGGASQEEFYKFIKPILEKMDGTEELLVKLNREDLLRKQRTFDNGSIPHQIHLGELHAILRRQEDFYPFLKDNREKIEKILTFRIPYYVGPLARGNSRFAWMTRKSEETITPWNFEEVVDKGASAQSFIERMTNFDKNLPNEKVLPKHSLLYEYFTVYNELTKVKYVTEGMRKPAFLSGEQKKAIVDLLFKTNRKVTVKQLKEDYFKKIECFDSVEISGVEDRFNASLGTYHDLLKIIKDKDFLDNEENEDILEDIVLTLTLFEDREMIEERLKTYAHLFDDKVMKQLKRRRYTGWGRLSRKLINGIRDKQSGKTILDFLKSDGFANRNFMQLIHDDSLTFKEDIQKAQVSGQGDSLHEHIANLAGSPAIKKGILQTVKVVDELVKVMGRHKPENIVIEMARENQTTQKGQKNSRERMKRIEEGIKELGSQILKEHPVENTQLQNEKLYLYYLQNGRDMYVDQELDINRLSDYDVDHIVPQSFLKDDSIDNKVLTRSDKARGKSDNVPSEEVVKKMKNYWRQLLNAKLITQRKFDNLTKAERGGLSELDKAGFIKRQLVETRQITKHVAQILDSRMNTKYDENDKLIREVKVITLKSKLVSDFRKDFQFYKVREINNYHHAHDAYLNAVVGTALIKKYPKLESEFVYGDYKVYDVRKMIAKSEQEIGKATAKYFFYSNIMNFFKTEITLANGEIRKRPLIETNGETGEIVWDKGRDFATVRKVLSMPQVNIVKKTEVQTGGFSKESILPKRNSDKLIARKKDWDPKKYGGFDSPTVAYSVLVVAKVEKGKSKKLKSVKELLGITIMERSSFEKNPIDFLEAKGYKEVKKDLIIKLPKYSLFELENGRKRMLASAGELQKGNELALPSKYVNFLYLASHYEKLKGSPEDNEQKQLFVEQHKHYLDEIIEQISEFSKRVILADANLDKVLSAYNKHRDKPIREQAENIIHLFTLTNLGAPAAFKYFDTTIDRKRYTSTKEVLDATLIHQSITGLYETRIDLSQLGGDGGGGSPAPEAAAKGGTLQLDDEYRLYSPLVKPDQNIQFWLEQFPQAWAETAGMGLAKQVPPQVIQLKASATPVSVRQYPLSKEAQEGIRPHVQRLIQQGILVPVQSPWNTPLLPVRKPGTNDYRPVQDLREVNKRVQDIHPTVPNPYNLLCALPPQRSWYTVLDLKDAFFCLRLHPTSQPLFAFEWRDPGTGRTGQLTWTRLPQGFKNSPTIFNEALHRDLANFRIQHPQVTLLQYVDDLLLAGATKQDCLEGTKALLLELSDLGYRASAKKAQICRREVTYLGYSLRDGQRWLTEARKKTVVQIPAPTTAKQVREFLGTAGFCRLWIPGFATLAAPLYPLTKPKGEFSWAPEHQKAFDAIKKALLSAPALALPDVTKPFTLYVDERKGVARGVLTQTLGPWRRPVAYLSKKLDPVASGWPVCLKAIAAVAILVKDADKLTLGQNITVIAPHALENIVRQPPDRWMTNARMTHYQSLLLTERVTFAPPAALNPATLLPEETDEPVTHDCHQLLIEETGVRKDLTDIPLTGEVLTWFTDGSSYVVEGKRMAGAAVVDGTRTIWASSLPEGTSAQKAELMALTQALRLAEGKSINIYTDSRYAFATAHVHGAIYKQRGWLTSAGREIKNKEEILSLLEALHLPKRLAIIHCPGHQKAKDPISRGNQMADRVAKQAAQGVNLLAGKRTADGSEFEKRTADGSEFESPKKKAKVE

SEQ ID NO: 165 - protein, 2085 aa, synthetic construct
MPAAKRVKLDGGDKKYSIGLDIGTNSVGWAVITDEYKVPSKKFKVLGNTDRHSIKKNLIGALLFDSGETAEATRLKRTARRRYTRRKNRICYLQEIFSNEMAKVDDSFFHRLEESFLVEEDKKHERHPIFGNIVDEVAYHEKYPTIYHLRKKLVDSTDKADLRLIYLALAHMIKFRGHFLIEGDLNPDNSDVDKLFIQLVQTYNQLFEENPINASGVDAKAILSARLSKSRRLENLIAQLPGEKKNGLFGNLIALSLGLTPNFKSNFDLAEDAKLQLSKDTYDDDLDNLLAQIGDQYADLFLAAKNLSDAILLSDILRVNTEITKAPLSASMIKRYDEHHQDLTLLKALVRQQLPEKYKEIFFDQSKNGYAGYIDGGASQEEFYKFIKPILEKMDGTEELLVKLNREDLLRKQRTFDNGSIPHQIHLGELHAILRRQEDFYPFLKDNREKIEKILTFRIPYYVGPLARGNSRFAWMTRKSEETITPWNFEEVVDKGASAQSFIERMTNFDKNLPNEKVLPKHSLLYEYFTVYNELTKVKYVTEGMRKPAFLSGEQKKAIVDLLFKTNRKVTVKQLKEDYFKKIECFDSVEISGVEDRFNASLGTYHDLLKIIKDKDFLDNEENEDILEDIVLTLTLFEDREMIEERLKTYAHLFDDKVMKQLKRRRYTGWGRLSRKLINGIRDKQSGKTILDFLKSDGFANRNFMQLIHDDSLTFKEDIQKAQVSGQGDSLHEHIANLAGSPAIKKGILQTVKVVDELVKVMGRHKPENIVIEMARENQTTQKGQKNSRERMKRIEEGIKELGSQILKEHPVENTQLQNEKLYLYYLQNGRDMYVDQELDINRLSDYDVDHIVPQSFLKDDSIDNKVLTRSDKARGKSDNVPSEEVVKKMKNYWRQLLNAKLITQRKFDNLTKAERGGLSELDKAGFIKRQLVETRQITKHVAQILDSRMNTKYDENDKLIREVKVITLKSKLVSDFRKDFQFYKVREINNYHHAHDAYLNAVVGTALIKKYPKLESEFVYGDYKVYDVRKMIAKSEQEIGKATAKYFFYSNIMNFFKTEITLANGEIRKRPLIETNGETGEIVWDKGRDFATVRKVLSMPQVNIVKKTEVQTGGFSKESILPKRNSDKLIARKKDWDPKKYGGFDSPTVAYSVLVVAKVEKGKSKKLKSVKELLGITIMERSSFEKNPIDFLEAKGYKEVKKDLIIKLPKYSLFELENGRKRMLASAGELQKGNELALPSKYVNFLYLASHYEKLKGSPEDNEQKQLFVEQHKHYLDEIIEQISEFSKRVILADANLDKVLSAYNKHRDKPIREQAENIIHLFTLTNLGAPAAFKYFDTTIDRKRYTSTKEVLDATLIHQSITGLYETRIDLSQLGGDGGGSSGGSGGTLQLDDEYRLYSPLVKPDQNIQFWLEQFPQAWAETAGMGLAKQVPPQVIQLKASATPVSVRQYPLSKEAQEGIRPHVQRLIQQGILVPVQSPWNTPLLPVRKPGTNDYRPVQDLREVNKRVQDIHPTVPNPYNLLCALPPQRSWYTVLDLKDAFFCLRLHPTSQPLFAFEWRDPGTGRTGQLTWTRLPQGFKNSPTIFNEALHRDLANFRIQHPQVTLLQYVDDLLLAGATKQDCLEGTKALLLELSDLGYRASAKKAQICRREVTYLGYSLRDGQRWLTEARKKTVVQIPAPTTAKQVREFLGTAGFCRLWIPGFATLAAPLYPLTKPKGEFSWAPEHQKAFDAIKKALLSAPALALPDVTKPFTLYVDERKGVARGVLTQTLGPWRRPVAYLSKKLDPVASGWPVCLKAIAAVAILVKDADKLTLGQNITVIAPHALENIVRQPPDRWMTNARMTHYQSLLLTERVTFAPPAALNPATLLPEETDEPVTHDCHQLLIEETGVRKDLTDIPLTGEVLTWFTDGSSYVVEGKRMAGAAVVDGTRTIWASSLPEGTSAQKAELMALTQALRLAEGKSINIYTDSRYAFATAHVHGAIYKQRGWLTSAGREIKNKEEILSLLEALHLPKRLAIIHCPGHQKAKDPISRGNQMADRVAKQAAQGVNLLAGKRTADGSEFEKRTADGSEFESPKKKAKVE

SEQ ID NO: 166 - protein, 2084 aa, synthetic construct
MPAAKRVKLDGGDKKYSIGLDIGTNSVGWAVITDEYKVPSKKFKVLGNTDRHSIKKNLIGALLFDSGETAEATRLKRTARRRYTRRKNRICYLQEIFSNEMAKVDDSFFHRLEESFLVEEDKKHERHPIFGNIVDEVAYHEKYPTIYHLRKKLVDSTDKADLRLIYLALAHMIKFRGHFLIEGDLNPDNSDVDKLFIQLVQTYNQLFEENPINASGVDAKAILSARLSKSRRLENLIAQLPGEKKNGLFGNLIALSLGLTPNFKSNFDLAEDAKLQLSKDTYDDDLDNLLAQIGDQYADLFLAAKNLSDAILLSDILRVNTEITKAPLSASMIKRYDEHHQDLTLLKALVRQQLPEKYKEIFFDQSKNGYAGYIDGGASQEEFYKFIKPILEKMDGTEELLVKLNREDLLRKQRTFDNGSIPHQIHLGELHAILRRQEDFYPFLKDNREKIEKILTFRIPYYVGPLARGNSRFAWMTRKSEETITPWNFEEVVDKGASAQSFIERMTNFDKNLPNEKVLPKHSLLYEYFTVYNELTKVKYVTEGMRKPAFLSGEQKKAIVDLLFKTNRKVTVKQLKEDYFKKIECFDSVEISGVEDRFNASLGTYHDLLKIIKDKDFLDNEENEDILEDIVLTLTLFEDREMIEERLKTYAHLFDDKVMKQLKRRRYTGWGRLSRKLINGIRDKQSGKTILDFLKSDGFANRNFMQLIHDDSLTFKEDIQKAQVSGQGDSLHEHIANLAGSPAIKKGILQTVKVVDELVKVMGRHKPENIVIEMARENQTTQKGQKNSRERMKRIEEGIKELGSQILKEHPVENTQLQNEKLYLYYLQNGRDMYVDQELDINRLSDYDVDHIVPQSFLKDDSIDNKVLTRSDKARGKSDNVPSEEVVKKMKNYWRQLLNAKLITQRKFDNLTKAERGGLSELDKAGFIKRQLVETRQITKHVAQILDSRMNTKYDENDKLIREVKVITLKSKLVSDFRKDFQFYKVREINNYHHAHDAYLNAVVGTALIKKYPKLESEFVYGDYKVYDVRKMIAKSEQEIGKATAKYFFYSNIMNFFKTEITLANGEIRKRPLIETNGETGEIVWDKGRDFATVRKVLSMPQVNIVKKTEVQTGGFSKESILPKRNSDKLIARKKDWDPKKYGGFDSPTVAYSVLVVAKVEKGKSKKLKSVKELLGITIMERSSFEKNPIDFLEAKGYKEVKKDLIIKLPKYSLFELENGRKRMLASAGELQKGNELALPSKYVNFLYLASHYEKLKGSPEDNEQKQLFVEQHKHYLDEIIEQISEFSKRVILADANLDKVLSAYNKHRDKPIREQAENIIHLFTLTNLGAPAAFKYFDTTIDRKRYTSTKEVLDATLIHQSITGLYETRIDLSQLGGDGGGGGGGGGTLQLDDEYRLYSPLVKPDQNIQFWLEQFPQAWAETAGMGLAKQVPPQVIQLKASATPVSVRQYPLSKEAQEGIRPHVQRLIQQGILVPVQSPWNTPLLPVRKPGTNDYRPVQDLREVNKRVQDIHPTVPNPYNLLCALPPQRSWYTVLDLKDAFFCLRLHPTSQPLFAFEWRDPGTGRTGQLTWTRLPQGFKNSPTIFNEALHRDLANFRIQHPQVTLLQYVDDLLLAGATKQDCLEGTKALLLELSDLGYRASAKKAQICRREVTYLGYSLRDGQRWLTEARKKTVVQIPAPTTAKQVREFLGTAGFCRLWIPGFATLAAPLYPLTKPKGEFSWAPEHQKAFDAIKKALLSAPALALPDVTKPFTLYVDERKGVARGVLTQTLGPWRRPVAYLSKKLDPVASGWPVCLKAIAAVAILVKDADKLTLGQNITVIAPHALENIVRQPPDRWMTNARMTHYQSLLLTERVTFAPPAALNPATLLPEETDEPVTHDCHQLLIEETGVRKDLTDIPLTGEVLTWFTDGSSYVVEGKRMAGAAVVDGTRTIWASSLPEGTSAQKAELMALTQALRLAEGKSINIYTDSRYAFATAHVHGAIYKQRGWLTSAGREIKNKEEILSLLEALHLPKRLAIIHCPGHQKAKDPISRGNQMADRVAKQAAQGVNLLAGKRTADGSEFEKRTADGSEFESPKKKAKVE

SEQ ID NO: 167 - protein, 2088 aa, synthetic construct
MPAAKRVKLDGGDKKYSIGLDIGTNSVGWAVITDEYKVPSKKFKVLGNTDRHSIKKNLIGALLFDSGETAEATRLKRTARRRYTRRKNRICYLQEIFSNEMAKVDDSFFHRLEESFLVEEDKKHERHPIFGNIVDEVAYHEKYPTIYHLRKKLVDSTDKADLRLIYLALAHMIKFRGHFLIEGDLNPDNSDVDKLFIQLVQTYNQLFEENPINASGVDAKAILSARLSKSRRLENLIAQLPGEKKNGLFGNLIALSLGLTPNFKSNFDLAEDAKLQLSKDTYDDDLDNLLAQIGDQYADLFLAAKNLSDAILLSDILRVNTEITKAPLSASMIKRYDEHHQDLTLLKALVRQQLPEKYKEIFFDQSKNGYAGYIDGGASQEEFYKFIKPILEKMDGTEELLVKLNREDLLRKQRTFDNGSIPHQIHLGELHAILRRQEDFYPFLKDNREKIEKILTFRIPYYVGPLARGNSRFAWMTRKSEETITPWNFEEVVDKGASAQSFIERMTNFDKNLPNEKVLPKHSLLYEYFTVYNELTKVKYVTEGMRKPAFLSGEQKKAIVDLLFKTNRKVTVKQLKEDYFKKIECFDSVEISGVEDRFNASLGTYHDLLKIIKDKDFLDNEENEDILEDIVLTLTLFEDREMIEERLKTYAHLFDDKVMKQLKRRRYTGWGRLSRKLINGIRDKQSGKTILDFLKSDGFANRNFMQLIHDDSLTFKEDIQKAQVSGQGDSLHEHIANLAGSPAIKKGILQTVKVVDELVKVMGRHKPENIVIEMARENQTTQKGQKNSRERMKRIEEGIKELGSQILKEHPVENTQLQNEKLYLYYLQNGRDMYVDQELDINRLSDYDVDHIVPQSFLKDDSIDNKVLTRSDKARGKSDNVPSEEVVKKMKNYWRQLLNAKLITQRKFDNLTKAERGGLSELDKAGFIKRQLVETRQITKHVAQILDSRMNTKYDENDKLIREVKVITLKSKLVSDFRKDFQFYKVREINNYHHAHDAYLNAVVGTALIKKYPKLESEFVYGDYKVYDVRKMIAKSEQEIGKATAKYFFYSNIMNFFKTEITLANGEIRKRPLIETNGETGEIVWDKGRDFATVRKVLSMPQVNIVKKTEVQTGGFSKESILPKRNSDKLIARKKDWDPKKYGGFDSPTVAYSVLVVAKVEKGKSKKLKSVKELLGITIMERSSFEKNPIDFLEAKGYKEVKKDLIIKLPKYSLFELENGRKRMLASAGELQKGNELALPSKYVNFLYLASHYEKLKGSPEDNEQKQLFVEQHKHYLDEIIEQISEFSKRVILADANLDKVLSAYNKHRDKPIREQAENIIHLFTLTNLGAPAAFKYFDTTIDRKRYTSTKEVLDATLIHQSITGLYETRIDLSQLGGDGGPAPGGSGGGGGTLQLDDEYRLYSPLVKPDQNIQFWLEQFPQAWAETAGMGLAKQVPPQVIQLKASATPVSVRQYPLSKEAQEGIRPHVQRLIQQGILVPVQSPWNTPLLPVRKPGTNDYRPVQDLREVNKRVQDIHPTVPNPYNLLCALPPQRSWYTVLDLKDAFFCLRLHPTSQPLFAFEWRDPGTGRTGQLTWTRLPQGFKNSPTIFNEALHRDLANFRIQHPQVTLLQYVDDLLLAGATKQDCLEGTKALLLELSDLGYRASAKKAQICRREVTYLGYSLRDGQRWLTEARKKTVVQIPAPTTAKQVREFLGTAGFCRLWIPGFATLAAPLYPLTKPKGEFSWAPEHQKAFDAIKKALLSAPALALPDVTKPFTLYVDERKGVARGVLTQTLGPWRRPVAYLSKKLDPVASGWPVCLKAIAAVAILVKDADKLTLGQNITVIAPHALENIVRQPPDRWMTNARMTHYQSLLLTERVTFAPPAALNPATLLPEETDEPVTHDCHQLLIEETGVRKDLTDIPLTGEVLTWFTDGSSYVVEGKRMAGAAVVDGTRTIWASSLPEGTSAQKAELMALTQALRLAEGKSINIYTDSRYAFATAHVHGAIYKQRGWLTSAGREIKNKEEILSLLEALHLPKRLAIIHCPGHQKAKDPISRGNQMADRVAKQAAQGVNLLAGKRTADGSEFEKRTADGSEFESPKKKAKVE

SEQ ID NO: 168 - protein, 2090 aa, synthetic construct
MPAAKRVKLDGGDKKYSIGLDIGTNSVGWAVITDEYKVPSKKFKVLGNTDRHSIKKNLIGALLFDSGETAEATRLKRTARRRYTRRKNRICYLQEIFSNEMAKVDDSFFHRLEESFLVEEDKKHERHPIFGNIVDEVAYHEKYPTIYHLRKKLVDSTDKADLRLIYLALAHMIKFRGHFLIEGDLNPDNSDVDKLFIQLVQTYNQLFEENPINASGVDAKAILSARLSKSRRLENLIAQLPGEKKNGLFGNLIALSLGLTPNFKSNFDLAEDAKLQLSKDTYDDDLDNLLAQIGDQYADLFLAAKNLSDAILLSDILRVNTEITKAPLSASMIKRYDEHHQDLTLLKALVRQQLPEKYKEIFFDQSKNGYAGYIDGGASQEEFYKFIKPILEKMDGTEELLVKLNREDLLRKQRTFDNGSIPHQIHLGELHAILRRQEDFYPFLKDNREKIEKILTFRIPYYVGPLARGNSRFAWMTRKSEETITPWNFEEVVDKGASAQSFIERMTNFDKNLPNEKVLPKHSLLYEYFTVYNELTKVKYVTEGMRKPAFLSGEQKKAIVDLLFKTNRKVTVKQLKEDYFKKIECFDSVEISGVEDRFNASLGTYHDLLKIIKDKDFLDNEENEDILEDIVLTLTLFEDREMIEERLKTYAHLFDDKVMKQLKRRRYTGWGRLSRKLINGIRDKQSGKTILDFLKSDGFANRNFMQLIHDDSLTFKEDIQKAQVSGQGDSLHEHIANLAGSPAIKKGILQTVKVVDELVKVMGRHKPENIVIEMARENQTTQKGQKNSRERMKRIEEGIKELGSQILKEHPVENTQLQNEKLYLYYLQNGRDMYVDQELDINRLSDYDVDHIVPQSFLKDDSIDNKVLTRSDKARGKSDNVPSEEVVKKMKNYWRQLLNAKLITQRKFDNLTKAERGGLSELDKAGFIKRQLVETRQITKHVAQILDSRMNTKYDENDKLIREVKVITLKSKLVSDFRKDFQFYKVREINNYHHAHDAYLNAVVGTALIKKYPKLESEFVYGDYKVYDVRKMIAKSEQEIGKATAKYFFYSNIMNFFKTEITLANGEIRKRPLIETNGETGEIVWDKGRDFATVRKVLSMPQVNIVKKTEVQTGGFSKESILPKRNSDKLIARKKDWDPKKYGGFDSPTVAYSVLVVAKVEKGKSKKLKSVKELLGITIMERSSFEKNPIDFLEAKGYKEVKKDLIIKLPKYSLFELENGRKRMLASAGELQKGNELALPSKYVNFLYLASHYEKLKGSPEDNEQKQLFVEQHKHYLDEIIEQISEFSKRVILADANLDKVLSAYNKHRDKPIREQAENIIHLFTLTNLGAPAAFKYFDTTIDRKRYTSTKEVLDATLIHQSITGLYETRIDLSQLGGDGGEAAAKPAPGGSGGTLQLDDEYRLYSPLVKPDQNIQFWLEQFPQAWAETAGMGLAKQVPPQVIQLKASATPVSVRQYPLSKEAQEGIRPHVQRLIQQGILVPVQSPWNTPLLPVRKPGTNDYRPVQDLREVNKRVQDIHPTVPNPYNLLCALPPQRSWYTVLDLKDAFFCLRLHPTSQPLFAFEWRDPGTGRTGQLTWTRLPQGFKNSPTIFNEALHRDLANFRIQHPQVTLLQYVDDLLLAGATKQDCLEGTKALLLELSDLGYRASAKKAQICRREVTYLGYSLRDGQRWLTEARKKTVVQIPAPTTAKQVREFLGTAGFCRLWIPGFATLAAPLYPLTKPKGEFSWAPEHQKAFDAIKKALLSAPALALPDVTKPFTLYVDERKGVARGVLTQTLGPWRRPVAYLSKKLDPVASGWPVCLKAIAAVAILVKDADKLTLGQNITVIAPHALENIVRQPPDRWMTNARMTHYQSLLLTERVTFAPPAALNPATLLPEETDEPVTHDCHQLLIEETGVRKDLTDIPLTGEVLTWFTDGSSYVVEGKRMAGAAVVDGTRTIWASSLPEGTSAQKAELMALTQALRLAEGKSINIYTDSRYAFATAHVHGAIYKQRGWLTSAGREIKNKEEILSLLEALHLPKRLAIIHCPGHQKAKDPISRGNQMADRVAKQAAQGVNLLAGKRTADGSEFEKRTADGSEFESPKKKAKVE

SEQ ID NO: 169 - protein, 2088 aa, synthetic construct
MPAAKRVKLDGGDKKYSIGLDIGTNSVGWAVITDEYKVPSKKFKVLGNTDRHSIKKNLIGALLFDSGETAEATRLKRTARRRYTRRKNRICYLQEIFSNEMAKVDDSFFHRLEESFLVEEDKKHERHPIFGNIVDEVAYHEKYPTIYHLRKKLVDSTDKADLRLIYLALAHMIKFRGHFLIEGDLNPDNSDVDKLFIQLVQTYNQLFEENPINASGVDAKAILSARLSKSRRLENLIAQLPGEKKNGLFGNLIALSLGLTPNFKSNFDLAEDAKLQLSKDTYDDDLDNLLAQIGDQYADLFLAAKNLSDAILLSDILRVNTEITKAPLSASMIKRYDEHHQDLTLLKALVRQQLPEKYKEIFFDQSKNGYAGYIDGGASQEEFYKFIKPILEKMDGTEELLVKLNREDLLRKQRTFDNGSIPHQIHLGELHAILRRQEDFYPFLKDNREKIEKILTFRIPYYVGPLARGNSRFAWMTRKSEETITPWNFEEVVDKGASAQSFIERMTNFDKNLPNEKVLPKHSLLYEYFTVYNELTKVKYVTEGMRKPAFLSGEQKKAIVDLLFKTNRKVTVKQLKEDYFKKIECFDSVEISGVEDRFNASLGTYHDLLKIIKDKDFLDNEENEDILEDIVLTLTLFEDREMIEERLKTYAHLFDDKVMKQLKRRRYTGWGRLSRKLINGIRDKQSGKTILDFLKSDGFANRNFMQLIHDDSLTFKEDIQKAQVSGQGDSLHEHIANLAGSPAIKKGILQTVKVVDELVKVMGRHKPENIVIEMARENQTTQKGQKNSRERMKRIEEGIKELGSQILKEHPVENTQLQNEKLYLYYLQNGRDMYVDQELDINRLSDYDVDHIVPQSFLKDDSIDNKVLTRSDKARGKSDNVPSEEVVKKMKNYWRQLLNAKLITQRKFDNLTKAERGGLSELDKAGFIKRQLVETRQITKHVAQILDSRMNTKYDENDKLIREVKVITLKSKLVSDFRKDFQFYKVREINNYHHAHDAYLNAVVGTALIKKYPKLESEFVYGDYKVYDVRKMIAKSEQEIGKATAKYFFYSNIMNFFKTEITLANGEIRKRPLIETNGETGEIVWDKGRDFATVRKVLSMPQVNIVKKTEVQTGGFSKESILPKRNSDKLIARKKDWDPKKYGGFDSPTVAYSVLVVAKVEKGKSKKLKSVKELLGITIMERSSFEKNPIDFLEAKGYKEVKKDLIIKLPKYSLFELENGRKRMLASAGELQKGNELALPSKYVNFLYLASHYEKLKGSPEDNEQKQLFVEQHKHYLDEIIEQISEFSKRVILADANLDKVLSAYNKHRDKPIREQAENIIHLFTLTNLGAPAAFKYFDTTIDRKRYTSTKEVLDATLIHQSITGLYETRIDLSQLGGDGGGGGPAPGGSGGTLQLDDEYRLYSPLVKPDQNIQFWLEQFPQAWAETAGMGLAKQVPPQVIQLKASATPVSVRQYPLSKEAQEGIRPHVQRLIQQGILVPVQSPWNTPLLPVRKPGTNDYRPVQDLREVNKRVQDIHPTVPNPYNLLCALPPQRSWYTVLDLKDAFFCLRLHPTSQPLFAFEWRDPGTGRTGQLTWTRLPQGFKNSPTIFNEALHRDLANFRIQHPQVTLLQYVDDLLLAGATKQDCLEGTKALLLELSDLGYRASAKKAQICRREVTYLGYSLRDGQRWLTEARKKTVVQIPAPTTAKQVREFLGTAGFCRLWIPGFATLAAPLYPLTKPKGEFSWAPEHQKAFDAIKKALLSAPALALPDVTKPFTLYVDERKGVARGVLTQTLGPWRRPVAYLSKKLDPVASGWPVCLKAIAAVAILVKDADKLTLGQNITVIAPHALENIVRQPPDRWMTNARMTHYQSLLLTERVTFAPPAALNPATLLPEETDEPVTHDCHQLLIEETGVRKDLTDIPLTGEVLTWFTDGSSYVVEGKRMAGAAVVDGTRTIWASSLPEGTSAQKAELMALTQALRLAEGKSINIYTDSRYAFATAHVHGAIYKQRGWLTSAGREIKNKEEILSLLEALHLPKRLAIIHCPGHQKAKDPISRGNQMADRVAKQAAQGVNLLAGKRTADGSEFEKRTADGSEFESPKKKAKVE

SEQ ID NO: 170 - protein, 2090 aa, synthetic construct
MPAAKRVKLDGGDKKYSIGLDIGTNSVGWAVITDEYKVPSKKFKVLGNTDRHSIKKNLIGALLFDSGETAEATRLKRTARRRYTRRKNRICYLQEIFSNEMAKVDDSFFHRLEESFLVEEDKKHERHPIFGNIVDEVAYHEKYPTIYHLRKKLVDSTDKADLRLIYLALAHMIKFRGHFLIEGDLNPDNSDVDKLFIQLVQTYNQLFEENPINASGVDAKAILSARLSKSRRLENLIAQLPGEKKNGLFGNLIALSLGLTPNFKSNFDLAEDAKLQLSKDTYDDDLDNLLAQIGDQYADLFLAAKNLSDAILLSDILRVNTEITKAPLSASMIKRYDEHHQDLTLLKALVRQQLPEKYKEIFFDQSKNGYAGYIDGGASQEEFYKFIKPILEKMDGTEELLVKLNREDLLRKQRTFDNGSIPHQIHLGELHAILRRQEDFYPFLKDNREKIEKILTFRIPYYVGPLARGNSRFAWMTRKSEETITPWNFEEVVDKGASAQSFIERMTNFDKNLPNEKVLPKHSLLYEYFTVYNELTKVKYVTEGMRKPAFLSGEQKKAIVDLLFKTNRKVTVKQLKEDYFKKIECFDSVEISGVEDRFNASLGTYHDLLKIIKDKDFLDNEENEDILEDIVLTLTLFEDREMIEERLKTYAHLFDDKVMKQLKRRRYTGWGRLSRKLINGIRDKQSGKTILDFLKSDGFANRNFMQLIHDDSLTFKEDIQKAQVSGQGDSLHEHIANLAGSPAIKKGILQTVKVVDELVKVMGRHKPENIVIEMARENQTTQKGQKNSRERMKRIEEGIKELGSQILKEHPVENTQLQNEKLYLYYLQNGRDMYVDQELDINRLSDYDVDHIVPQSFLKDDSIDNKVLTRSDKARGKSDNVPSEEVVKKMKNYWRQLLNAKLITQRKFDNLTKAERGGLSELDKAGFIKRQLVETRQITKHVAQILDSRMNTKYDENDKLIREVKVITLKSKLVSDFRKDFQFYKVREINNYHHAHDAYLNAVVGTALIKKYPKLESEFVYGDYKVYDVRKMIAKSEQEIGKATAKYFFYSNIMNFFKTEITLANGEIRKRPLIETNGETGEIVWDKGRDFATVRKVLSMPQVNIVKKTEVQTGGFSKESILPKRNSDKLIARKKDWDPKKYGGFDSPTVAYSVLVVAKVEKGKSKKLKSVKELLGITIMERSSFEKNPIDFLEAKGYKEVKKDLIIKLPKYSLFELENGRKRMLASAGELQKGNELALPSKYVNFLYLASHYEKLKGSPEDNEQKQLFVEQHKHYLDEIIEQISEFSKRVILADANLDKVLSAYNKHRDKPIREQAENIIHLFTLTNLGAPAAFKYFDTTIDRKRYTSTKEVLDATLIHQSITGLYETRIDLSQLGGDGGGSSGGSEAAAKGGTLQLDDEYRLYSPLVKPDQNIQFWLEQFPQAWAETAGMGLAKQVPPQVIQLKASATPVSVRQYPLSKEAQEGIRPHVQRLIQQGILVPVQSPWNTPLLPVRKPGTNDYRPVQDLREVNKRVQDIHPTVPNPYNLLCALPPQRSWYTVLDLKDAFFCLRLHPTSQPLFAFEWRDPGTGRTGQLTWTRLPQGFKNSPTIFNEALHRDLANFRIQHPQVTLLQYVDDLLLAGATKQDCLEGTKALLLELSDLGYRASAKKAQICRREVTYLGYSLRDGQRWLTEARKKTVVQIPAPTTAKQVREFLGTAGFCRLWIPGFATLAAPLYPLTKPKGEFSWAPEHQKAFDAIKKALLSAPALALPDVTKPFTLYVDERKGVARGVLTQTLGPWRRPVAYLSKKLDPVASGWPVCLKAIAAVAILVKDADKLTLGQNITVIAPHALENIVRQPPDRWMTNARMTHYQSLLLTERVTFAPPAALNPATLLPEETDEPVTHDCHQLLIEETGVRKDLTDIPLTGEVLTWFTDGSSYVVEGKRMAGAAVVDGTRTIWASSLPEGTSAQKAELMALTQALRLAEGKSINIYTDSRYAFATAHVHGAIYKQRGWLTSAGREIKNKEEILSLLEALHLPKRLAIIHCPGHQKAKDPISRGNQMADRVAKQAAQGVNLLAGKRTADGSEFEKRTADGSEFESPKKKAKVE

SEQ ID NO: 171 - protein, 2088 aa, synthetic construct
MPAAKRVKLDGGDKKYSIGLDIGTNSVGWAVITDEYKVPSKKFKVLGNTDRHSIKKNLIGALLFDSGETAEATRLKRTARRRYTRRKNRICYLQEIFSNEMAKVDDSFFHRLEESFLVEEDKKHERHPIFGNIVDEVAYHEKYPTIYHLRKKLVDSTDKADLRLIYLALAHMIKFRGHFLIEGDLNPDNSDVDKLFIQLVQTYNQLFEENPINASGVDAKAILSARLSKSRRLENLIAQLPGEKKNGLFGNLIALSLGLTPNFKSNFDLAEDAKLQLSKDTYDDDLDNLLAQIGDQYADLFLAAKNLSDAILLSDILRVNTEITKAPLSASMIKRYDEHHQDLTLLKALVRQQLPEKYKEIFFDQSKNGYAGYIDGGASQEEFYKFIKPILEKMDGTEELLVKLNREDLLRKQRTFDNGSIPHQIHLGELHAILRRQEDFYPFLKDNREKIEKILTFRIPYYVGPLARGNSRFAWMTRKSEETITPWNFEEVVDKGASAQSFIERMTNFDKNLPNEKVLPKHSLLYEYFTVYNELTKVKYVTEGMRKPAFLSGEQKKAIVDLLFKTNRKVTVKQLKEDYFKKIECFDSVEISGVEDRFNASLGTYHDLLKIIKDKDFLDNEENEDILEDIVLTLTLFEDREMIEERLKTYAHLFDDKVMKQLKRRRYTGWGRLSRKLINGIRDKQSGKTILDFLKSDGFANRNFMQLIHDDSLTFKEDIQKAQVSGQGDSLHEHIANLAGSPAIKKGILQTVKVVDELVKVMGRHKPENIVIEMARENQTTQKGQKNSRERMKRIEEGIKELGSQILKEHPVENTQLQNEKLYLYYLQNGRDMYVDQELDINRLSDYDVDHIVPQSFLKDDSIDNKVLTRSDKARGKSDNVPSEEVVKKMKNYWRQLLNAKLITQRKFDNLTKAERGGLSELDKAGFIKRQLVETRQITKHVAQILDSRMNTKYDENDKLIREVKVITLKSKLVSDFRKDFQFYKVREINNYHHAHDAYLNAVVGTALIKKYPKLESEFVYGDYKVYDVRKMIAKSEQEIGKATAKYFFYSNIMNFFKTEITLANGEIRKRPLIETNGETGEIVWDKGRDFATVRKVLSMPQVNIVKKTEVQTGGFSKESILPKRNSDKLIARKKDWDPKKYGGFDSPTVAYSVLVVAKVEKGKSKKLKSVKELLGITIMERSSFEKNPIDFLEAKGYKEVKKDLIIKLPKYSLFELENGRKRMLASAGELQKGNELALPSKYVNFLYLASHYEKLKGSPEDNEQKQLFVEQHKHYLDEIIEQISEFSKRVILADANLDKVLSAYNKHRDKPIREQAENIIHLFTLTNLGAPAAFKYFDTTIDRKRYTSTKEVLDATLIHQSITGLYETRIDLSQLGGDGGGSSPAPGGSGGTLQLDDEYRLYSPLVKPDQNIQFWLEQFPQAWAETAGMGLAKQVPPQVIQLKASATPVSVRQYPLSKEAQEGIRPHVQRLIQQGILVPVQSPWNTPLLPVRKPGTNDYRPVQDLREVNKRVQDIHPTVPNPYNLLCALPPQRSWYTVLDLKDAFFCLRLHPTSQPLFAFEWRDPGTGRTGQLTWTRLPQGFKNSPTIFNEALHRDLANFRIQHPQVTLLQYVDDLLLAGATKQDCLEGTKALLLELSDLGYRASAKKAQICRREVTYLGYSLRDGQRWLTEARKKTVVQIPAPTTAKQVREFLGTAGFCRLWIPGFATLAAPLYPLTKPKGEFSWAPEHQKAFDAIKKALLSAPALALPDVTKPFTLYVDERKGVARGVLTQTLGPWRRPVAYLSKKLDPVASGWPVCLKAIAAVAILVKDADKLTLGQNITVIAPHALENIVRQPPDRWMTNARMTHYQSLLLTERVTFAPPAALNPATLLPEETDEPVTHDCHQLLIEETGVRKDLTDIPLTGEVLTWFTDGSSYVVEGKRMAGAAVVDGTRTIWASSLPEGTSAQKAELMALTQALRLAEGKSINIYTDSRYAFATAHVHGAIYKQRGWLTSAGREIKNKEEILSLLEALHLPKRLAIIHCPGHQKAKDPISRGNQMADRVAKQAAQGVNLLAGKRTADGSEFEKRTADGSEFESPKKKAKVE

SEQ ID NO: 172 - protein, 2090 aa, synthetic construct
MPAAKRVKLDGGDKKYSIGLDIGTNSVGWAVITDEYKVPSKKFKVLGNTDRHSIKKNLIGALLFDSGETAEATRLKRTARRRYTRRKNRICYLQEIFSNEMAKVDDSFFHRLEESFLVEEDKKHERHPIFGNIVDEVAYHEKYPTIYHLRKKLVDSTDKADLRLIYLALAHMIKFRGHFLIEGDLNPDNSDVDKLFIQLVQTYNQLFEENPINASGVDAKAILSARLSKSRRLENLIAQLPGEKKNGLFGNLIALSLGLTPNFKSNFDLAEDAKLQLSKDTYDDDLDNLLAQIGDQYADLFLAAKNLSDAILLSDILRVNTEITKAPLSASMIKRYDEHHQDLTLLKALVRQQLPEKYKEIFFDQSKNGYAGYIDGGASQEEFYKFIKPILEKMDGTEELLVKLNREDLLRKQRTFDNGSIPHQIHLGELHAILRRQEDFYPFLKDNREKIEKILTFRIPYYVGPLARGNSRFAWMTRKSEETITPWNFEEVVDKGASAQSFIERMTNFDKNLPNEKVLPKHSLLYEYFTVYNELTKVKYVTEGMRKPAFLSGEQKKAIVDLLFKTNRKVTVKQLKEDYFKKIECFDSVEISGVEDRFNASLGTYHDLLKIIKDKDFLDNEENEDILEDIVLTLTLFEDREMIEERLKTYAHLFDDKVMKQLKRRRYTGWGRLSRKLINGIRDKQSGKTILDFLKSDGFANRNFMQLIHDDSLTFKEDIQKAQVSGQGDSLHEHIANLAGSPAIKKGILQTVKVVDELVKVMGRHKPENIVIEMARENQTTQKGQKNSRERMKRIEEGIKELGSQILKEHPVENTQLQNEKLYLYYLQNGRDMYVDQELDINRLSDYDVDHIVPQSFLKDDSIDNKVLTRSDKARGKSDNVPSEEVVKKMKNYWRQLLNAKLITQRKFDNLTKAERGGLSELDKAGFIKRQLVETRQITKHVAQILDSRMNTKYDENDKLIREVKVITLKSKLVSDFRKDFQFYKVREINNYHHAHDAYLNAVVGTALIKKYPKLESEFVYGDYKVYDVRKMIAKSEQEIGKATAKYFFYSNIMNFFKTEITLANGEIRKRPLIETNGETGEIVWDKGRDFATVRKVLSMPQVNIVKKTEVQTGGFSKESILPKRNSDKLIARKKDWDPKKYGGFDSPTVAYSVLVVAKVEKGKSKKLKSVKELLGITIMERSSFEKNPIDFLEAKGYKEVKKDLIIKLPKYSLFELENGRKRMLASAGELQKGNELALPSKYVNFLYLASHYEKLKGSPEDNEQKQLFVEQHKHYLDEIIEQISEFSKRVILADANLDKVLSAYNKHRDKPIREQAENIIHLFTLTNLGAPAAFKYFDTTIDRKRYTSTKEVLDATLIHQSITGLYETRIDLSQLGGDGGGGSGGGEAAAKGGTLQLDDEYRLYSPLVKPDQNIQFWLEQFPQAWAETAGMGLAKQVPPQVIQLKASATPVSVRQYPLSKEAQEGIRPHVQRLIQQGILVPVQSPWNTPLLPVRKPGTNDYRPVQDLREVNKRVQDIHPTVPNPYNLLCALPPQRSWYTVLDLKDAFFCLRLHPTSQPLFAFEWRDPGTGRTGQLTWTRLPQGFKNSPTIFNEALHRDLANFRIQHPQVTLLQYVDDLLLAGATKQDCLEGTKALLLELSDLGYRASAKKAQICRREVTYLGYSLRDGQRWLTEARKKTVVQIPAPTTAKQVREFLGTAGFCRLWIPGFATLAAPLYPLTKPKGEFSWAPEHQKAFDAIKKALLSAPALALPDVTKPFTLYVDERKGVARGVLTQTLGPWRRPVAYLSKKLDPVASGWPVCLKAIAAVAILVKDADKLTLGQNITVIAPHALENIVRQPPDRWMTNARMTHYQSLLLTERVTFAPPAALNPATLLPEETDEPVTHDCHQLLIEETGVRKDLTDIPLTGEVLTWFTDGSSYVVEGKRMAGAAVVDGTRTIWASSLPEGTSAQKAELMALTQALRLAEGKSINIYTDSRYAFATAHVHGAIYKQRGWLTSAGREIKNKEEILSLLEALHLPKRLAIIHCPGHQKAKDPISRGNQMADRVAKQAAQGVNLLAGKRTADGSEFEKRTADGSEFESPKKKAKVE

SEQ ID NO: 173 - protein, 2088 aa, synthetic construct
MPAAKRVKLDGGDKKYSIGLDIGTNSVGWAVITDEYKVPSKKFKVLGNTDRHSIKKNLIGALLFDSGETAEATRLKRTARRRYTRRKNRICYLQEIFSNEMAKVDDSFFHRLEESFLVEEDKKHERHPIFGNIVDEVAYHEKYPTIYHLRKKLVDSTDKADLRLIYLALAHMIKFRGHFLIEGDLNPDNSDVDKLFIQLVQTYNQLFEENPINASGVDAKAILSARLSKSRRLENLIAQLPGEKKNGLFGNLIALSLGLTPNFKSNFDLAEDAKLQLSKDTYDDDLDNLLAQIGDQYADLFLAAKNLSDAILLSDILRVNTEITKAPLSASMIKRYDEHHQDLTLLKALVRQQLPEKYKEIFFDQSKNGYAGYIDGGASQEEFYKFIKPILEKMDGTEELLVKLNREDLLRKQRTFDNGSIPHQIHLGELHAILRRQEDFYPFLKDNREKIEKILTFRIPYYVGPLARGNSRFAWMTRKSEETITPWNFEEVVDKGASAQSFIERMTNFDKNLPNEKVLPKHSLLYEYFTVYNELTKVKYVTEGMRKPAFLSGEQKKAIVDLLFKTNRKVTVKQLKEDYFKKIECFDSVEISGVEDRFNASLGTYHDLLKIIKDKDFLDNEENEDILEDIVLTLTLFEDREMIEERLKTYAHLFDDKVMKQLKRRRYTGWGRLSRKLINGIRDKQSGKTILDFLKSDGFANRNFMQLIHDDSLTFKEDIQKAQVSGQGDSLHEHIANLAGSPAIKKGILQTVKVVDELVKVMGRHKPENIVIEMARENQTTQKGQKNSRERMKRIEEGIKELGSQILKEHPVENTQLQNEKLYLYYLQNGRDMYVDQELDINRLSDYDVDHIVPQSFLKDDSIDNKVLTRSDKARGKSDNVPSEEVVKKMKNYWRQLLNAKLITQRKFDNLTKAERGGLSELDKAGFIKRQLVETRQITKHVAQILDSRMNTKYDENDKLIREVKVITLKSKLVSDFRKDFQFYKVREINNYHHAHDAYLNAVVGTALIKKYPKLESEFVYGDYKVYDVRKMIAKSEQEIGKATAKYFFYSNIMNFFKTEITLANGEIRKRPLIETNGETGEIVWDKGRDFATVRKVLSMPQVNIVKKTEVQTGGFSKESILPKRNSDKLIARKKDWDPKKYGGFDSPTVAYSVLVVAKVEKGKSKKLKSVKELLGITIMERSSFEKNPIDFLEAKGYKEVKKDLIIKLPKYSLFELENGRKRMLASAGELQKGNELALPSKYVNFLYLASHYEKLKGSPEDNEQKQLFVEQHKHYLDEIIEQISEFSKRVILADANLDKVLSAYNKHRDKPIREQAENIIHLFTLTNLGAPAAFKYFDTTIDRKRYTSTKEVLDATLIHQSITGLYETRIDLSQLGGDGGPAPGGGGGSGGTLQLDDEYRLYSPLVKPDQNIQFWLEQFPQAWAETAGMGLAKQVPPQVIQLKASATPVSVRQYPLSKEAQEGIRPHVQRLIQQGILVPVQSPWNTPLLPVRKPGTNDYRPVQDLREVNKRVQDIHPTVPNPYNLLCALPPQRSWYTVLDLKDAFFCLRLHPTSQPLFAFEWRDPGTGRTGQLTWTRLPQGFKNSPTIFNEALHRDLANFRIQHPQVTLLQYVDDLLLAGATKQDCLEGTKALLLELSDLGYRASAKKAQICRREVTYLGYSLRDGQRWLTEARKKTVVQIPAPTTAKQVREFLGTAGFCRLWIPGFATLAAPLYPLTKPKGEFSWAPEHQKAFDAIKKALLSAPALALPDVTKPFTLYVDERKGVARGVLTQTLGPWRRPVAYLSKKLDPVASGWPVCLKAIAAVAILVKDADKLTLGQNITVIAPHALENIVRQPPDRWMTNARMTHYQSLLLTERVTFAPPAALNPATLLPEETDEPVTHDCHQLLIEETGVRKDLTDIPLTGEVLTWFTDGSSYVVEGKRMAGAAVVDGTRTIWASSLPEGTSAQKAELMALTQALRLAEGKSINIYTDSRYAFATAHVHGAIYKQRGWLTSAGREIKNKEEILSLLEALHLPKRLAIIHCPGHQKAKDPISRGNQMADRVAKQAAQGVNLLAGKRTADGSEFEKRTADGSEFESPKKKAKVE

SEQ ID NO: 174 - protein, 2085 aa, synthetic construct
MPAAKRVKLDGGDKKYSIGLDIGTNSVGWAVITDEYKVPSKKFKVLGNTDRHSIKKNLIGALLFDSGETAEATRLKRTARRRYTRRKNRICYLQEIFSNEMAKVDDSFFHRLEESFLVEEDKKHERHPIFGNIVDEVAYHEKYPTIYHLRKKLVDSTDKADLRLIYLALAHMIKFRGHFLIEGDLNPDNSDVDKLFIQLVQTYNQLFEENPINASGVDAKAILSARLSKSRRLENLIAQLPGEKKNGLFGNLIALSLGLTPNFKSNFDLAEDAKLQLSKDTYDDDLDNLLAQIGDQYADLFLAAKNLSDAILLSDILRVNTEITKAPLSASMIKRYDEHHQDLTLLKALVRQQLPEKYKEIFFDQSKNGYAGYIDGGASQEEFYKFIKPILEKMDGTEELLVKLNREDLLRKQRTFDNGSIPHQIHLGELHAILRRQEDFYPFLKDNREKIEKILTFRIPYYVGPLARGNSRFAWMTRKSEETITPWNFEEVVDKGASAQSFIERMTNFDKNLPNEKVLPKHSLLYEYFTVYNELTKVKYVTEGMRKPAFLSGEQKKAIVDLLFKTNRKVTVKQLKEDYFKKIECFDSVEISGVEDRFNASLGTYHDLLKIIKDKDFLDNEENEDILEDIVLTLTLFEDREMIEERLKTYAHLFDDKVMKQLKRRRYTGWGRLSRKLINGIRDKQSGKTILDFLKSDGFANRNFMQLIHDDSLTFKEDIQKAQVSGQGDSLHEHIANLAGSPAIKKGILQTVKVVDELVKVMGRHKPENIVIEMARENQTTQKGQKNSRERMKRIEEGIKELGSQILKEHPVENTQLQNEKLYLYYLQNGRDMYVDQELDINRLSDYDVDHIVPQSFLKDDSIDNKVLTRSDKARGKSDNVPSEEVVKKMKNYWRQLLNAKLITQRKFDNLTKAERGGLSELDKAGFIKRQLVETRQITKHVAQILDSRMNTKYDENDKLIREVKVITLKSKLVSDFRKDFQFYKVREINNYHHAHDAYLNAVVGTALIKKYPKLESEFVYGDYKVYDVRKMIAKSEQEIGKATAKYFFYSNIMNFFKTEITLANGEIRKRPLIETNGETGEIVWDKGRDFATVRKVLSMPQVNIVKKTEVQTGGFSKESILPKRNSDKLIARKKDWDPKKYGGFDSPTVAYSVLVVAKVEKGKSKKLKSVKELLGITIMERSSFEKNPIDFLEAKGYKEVKKDLIIKLPKYSLFELENGRKRMLASAGELQKGNELALPSKYVNFLYLASHYEKLKGSPEDNEQKQLFVEQHKHYLDEIIEQISEFSKRVILADANLDKVLSAYNKHRDKPIREQAENIIHLFTLTNLGAPAAFKYFDTTIDRKRYTSTKEVLDATLIHQSITGLYETRIDLSQLGGDGGGSSGGGGGTLQLDDEYRLYSPLVKPDQNIQFWLEQFPQAWAETAGMGLAKQVPPQVIQLKASATPVSVRQYPLSKEAQEGIRPHVQRLIQQGILVPVQSPWNTPLLPVRKPGTNDYRPVQDLREVNKRVQDIHPTVPNPYNLLCALPPQRSWYTVLDLKDAFFCLRLHPTSQPLFAFEWRDPGTGRTGQLTWTRLPQGFKNSPTIFNEALHRDLANFRIQHPQVTLLQYVDDLLLAGATKQDCLEGTKALLLELSDLGYRASAKKAQICRREVTYLGYSLRDGQRWLTEARKKTVVQIPAPTTAKQVREFLGTAGFCRLWIPGFATLAAPLYPLTKPKGEFSWAPEHQKAFDAIKKALLSAPALALPDVTKPFTLYVDERKGVARGVLTQTLGPWRRPVAYLSKKLDPVASGWPVCLKAIAAVAILVKDADKLTLGQNITVIAPHALENIVRQPPDRWMTNARMTHYQSLLLTERVTFAPPAALNPATLLPEETDEPVTHDCHQLLIEETGVRKDLTDIPLTGEVLTWFTDGSSYVVEGKRMAGAAVVDGTRTIWASSLPEGTSAQKAELMALTQALRLAEGKSINIYTDSRYAFATAHVHGAIYKQRGWLTSAGREIKNKEEILSLLEALHLPKRLAIIHCPGHQKAKDPISRGNQMADRVAKQAAQGVNLLAGKRTADGSEFEKRTADGSEFESPKKKAKVE

SEQ ID NO: 175 - protein, 2088 aa, synthetic construct
MPAAKRVKLDGGDKKYSIGLDIGTNSVGWAVITDEYKVPSKKFKVLGNTDRHSIKKNLIGALLFDSGETAEATRLKRTARRRYTRRKNRICYLQEIFSNEMAKVDDSFFHRLEESFLVEEDKKHERHPIFGNIVDEVAYHEKYPTIYHLRKKLVDSTDKADLRLIYLALAHMIKFRGHFLIEGDLNPDNSDVDKLFIQLVQTYNQLFEENPINASGVDAKAILSARLSKSRRLENLIAQLPGEKKNGLFGNLIALSLGLTPNFKSNFDLAEDAKLQLSKDTYDDDLDNLLAQIGDQYADLFLAAKNLSDAILLSDILRVNTEITKAPLSASMIKRYDEHHQDLTLLKALVRQQLPEKYKEIFFDQSKNGYAGYIDGGASQEEFYKFIKPILEKMDGTEELLVKLNREDLLRKQRTFDNGSIPHQIHLGELHAILRRQEDFYPFLKDNREKIEKILTFRIPYYVGPLARGNSRFAWMTRKSEETITPWNFEEVVDKGASAQSFIERMTNFDKNLPNEKVLPKHSLLYEYFTVYNELTKVKYVTEGMRKPAFLSGEQKKAIVDLLFKTNRKVTVKQLKEDYFKKIECFDSVEISGVEDRFNASLGTYHDLLKIIKDKDFLDNEENEDILEDIVLTLTLFEDREMIEERLKTYAHLFDDKVMKQLKRRRYTGWGRLSRKLINGIRDKQSGKTILDFLKSDGFANRNFMQLIHDDSLTFKEDIQKAQVSGQGDSLHEHIANLAGSPAIKKGILQTVKVVDELVKVMGRHKPENIVIEMARENQTTQKGQKNSRERMKRIEEGIKELGSQILKEHPVENTQLQNEKLYLYYLQNGRDMYVDQELDINRLSDYDVDHIVPQSFLKDDSIDNKVLTRSDKARGKSDNVPSEEVVKKMKNYWRQLLNAKLITQRKFDNLTKAERGGLSELDKAGFIKRQLVETRQITKHVAQILDSRMNTKYDENDKLIREVKVITLKSKLVSDFRKDFQFYKVREINNYHHAHDAYLNAVVGTALIKKYPKLESEFVYGDYKVYDVRKMIAKSEQEIGKATAKYFFYSNIMNFFKTEITLANGEIRKRPLIETNGETGEIVWDKGRDFATVRKVLSMPQVNIVKKTEVQTGGFSKESILPKRNSDKLIARKKDWDPKKYGGFDSPTVAYSVLVVAKVEKGKSKKLKSVKELLGITIMERSSFEKNPIDFLEAKGYKEVKKDLIIKLPKYSLFELENGRKRMLASAGELQKGNELALPSKYVNFLYLASHYEKLKGSPEDNEQKQLFVEQHKHYLDEIIEQISEFSKRVILADANLDKVLSAYNKHRDKPIREQAENIIHLFTLTNLGAPAAFKYFDTTIDRKRYTSTKEVLDATLIHQSITGLYETRIDLSQLGGDGGGGSPAPGSSGGTLQLDDEYRLYSPLVKPDQNIQFWLEQFPQAWAETAGMGLAKQVPPQVIQLKASATPVSVRQYPLSKEAQEGIRPHVQRLIQQGILVPVQSPWNTPLLPVRKPGTNDYRPVQDLREVNKRVQDIHPTVPNPYNLLCALPPQRSWYTVLDLKDAFFCLRLHPTSQPLFAFEWRDPGTGRTGQLTWTRLPQGFKNSPTIFNEALHRDLANFRIQHPQVTLLQYVDDLLLAGATKQDCLEGTKALLLELSDLGYRASAKKAQICRREVTYLGYSLRDGQRWLTEARKKTVVQIPAPTTAKQVREFLGTAGFCRLWIPGFATLAAPLYPLTKPKGEFSWAPEHQKAFDAIKKALLSAPALALPDVTKPFTLYVDERKGVARGVLTQTLGPWRRPVAYLSKKLDPVASGWPVCLKAIAAVAILVKDADKLTLGQNITVIAPHALENIVRQPPDRWMTNARMTHYQSLLLTERVTFAPPAALNPATLLPEETDEPVTHDCHQLLIEETGVRKDLTDIPLTGEVLTWFTDGSSYVVEGKRMAGAAVVDGTRTIWASSLPEGTSAQKAELMALTQALRLAEGKSINIYTDSRYAFATAHVHGAIYKQRGWLTSAGREIKNKEEILSLLEALHLPKRLAIIHCPGHQKAKDPISRGNQMADRVAKQAAQGVNLLAGKRTADGSEFEKRTADGSEFESPKKKAKVE

SEQ ID NO: 176 - protein, 2085 aa, synthetic construct
MPAAKRVKLDGGDKKYSIGLDIGTNSVGWAVITDEYKVPSKKFKVLGNTDRHSIKKNLIGALLFDSGETAEATRLKRTARRRYTRRKNRICYLQEIFSNEMAKVDDSFFHRLEESFLVEEDKKHERHPIFGNIVDEVAYHEKYPTIYHLRKKLVDSTDKADLRLIYLALAHMIKFRGHFLIEGDLNPDNSDVDKLFIQLVQTYNQLFEENPINASGVDAKAILSARLSKSRRLENLIAQLPGEKKNGLFGNLIALSLGLTPNFKSNFDLAEDAKLQLSKDTYDDDLDNLLAQIGDQYADLFLAAKNLSDAILLSDILRVNTEITKAPLSASMIKRYDEHHQDLTLLKALVRQQLPEKYKEIFFDQSKNGYAGYIDGGASQEEFYKFIKPILEKMDGTEELLVKLNREDLLRKQRTFDNGSIPHQIHLGELHAILRRQEDFYPFLKDNREKIEKILTFRIPYYVGPLARGNSRFAWMTRKSEETITPWNFEEVVDKGASAQSFIERMTNFDKNLPNEKVLPKHSLLYEYFTVYNELTKVKYVTEGMRKPAFLSGEQKKAIVDLLFKTNRKVTVKQLKEDYFKKIECFDSVEISGVEDRFNASLGTYHDLLKIIKDKDFLDNEENEDILEDIVLTLTLFEDREMIEERLKTYAHLFDDKVMKQLKRRRYTGWGRLSRKLINGIRDKQSGKTILDFLKSDGFANRNFMQLIHDDSLTFKEDIQKAQVSGQGDSLHEHIANLAGSPAIKKGILQTVKVVDELVKVMGRHKPENIVIEMARENQTTQKGQKNSRERMKRIEEGIKELGSQILKEHPVENTQLQNEKLYLYYLQNGRDMYVDQELDINRLSDYDVDHIVPQSFLKDDSIDNKVLTRSDKARGKSDNVPSEEVVKKMKNYWRQLLNAKLITQRKFDNLTKAERGGLSELDKAGFIKRQLVETRQITKHVAQILDSRMNTKYDENDKLIREVKVITLKSKLVSDFRKDFQFYKVREINNYHHAHDAYLNAVVGTALIKKYPKLESEFVYGDYKVYDVRKMIAKSEQEIGKATAKYFFYSNIMNFFKTEITLANGEIRKRPLIETNGETGEIVWDKGRDFATVRKVLSMPQVNIVKKTEVQTGGFSKESILPKRNSDKLIARKKDWDPKKYGGFDSPTVAYSVLVVAKVEKGKSKKLKSVKELLGITIMERSSFEKNPIDFLEAKGYKEVKKDLIIKLPKYSLFELENGRKRMLASAGELQKGNELALPSKYVNFLYLASHYEKLKGSPEDNEQKQLFVEQHKHYLDEIIEQISEFSKRVILADANLDKVLSAYNKHRDKPIREQAENIIHLFTLTNLGAPAAFKYFDTTIDRKRYTSTKEVLDATLIHQSITGLYETRIDLSQLGGDGGGGSGSSGGTLQLDDEYRLYSPLVKPDQNIQFWLEQFPQAWAETAGMGLAKQVPPQVIQLKASATPVSVRQYPLSKEAQEGIRPHVQRLIQQGILVPVQSPWNTPLLPVRKPGTNDYRPVQDLREVNKRVQDIHPTVPNPYNLLCALPPQRSWYTVLDLKDAFFCLRLHPTSQPLFAFEWRDPGTGRTGQLTWTRLPQGFKNSPTIFNEALHRDLANFRIQHPQVTLLQYVDDLLLAGATKQDCLEGTKALLLELSDLGYRASAKKAQICRREVTYLGYSLRDGQRWLTEARKKTVVQIPAPTTAKQVREFLGTAGFCRLWIPGFATLAAPLYPLTKPKGEFSWAPEHQKAFDAIKKALLSAPALALPDVTKPFTLYVDERKGVARGVLTQTLGPWRRPVAYLSKKLDPVASGWPVCLKAIAAVAILVKDADKLTLGQNITVIAPHALENIVRQPPDRWMTNARMTHYQSLLLTERVTFAPPAALNPATLLPEETDEPVTHDCHQLLIEETGVRKDLTDIPLTGEVLTWFTDGSSYVVEGKRMAGAAVVDGTRTIWASSLPEGTSAQKAELMALTQALRLAEGKSINIYTDSRYAFATAHVHGAIYKQRGWLTSAGREIKNKEEILSLLEALHLPKRLAIIHCPGHQKAKDPISRGNQMADRVAKQAAQGVNLLAGKRTADGSEFEKRTADGSEFESPKKKAKVE

SEQ ID NO: 177 - protein, 2082 aa, synthetic construct
MPAAKRVKLDGGDKKYSIGLDIGTNSVGWAVITDEYKVPSKKFKVLGNTDRHSIKKNLIGALLFDSGETAEATRLKRTARRRYTRRKNRICYLQEIFSNEMAKVDDSFFHRLEESFLVEEDKKHERHPIFGNIVDEVAYHEKYPTIYHLRKKLVDSTDKADLRLIYLALAHMIKFRGHFLIEGDLNPDNSDVDKLFIQLVQTYNQLFEENPINASGVDAKAILSARLSKSRRLENLIAQLPGEKKNGLFGNLIALSLGLTPNFKSNFDLAEDAKLQLSKDTYDDDLDNLLAQIGDQYADLFLAAKNLSDAILLSDILRVNTEITKAPLSASMIKRYDEHHQDLTLLKALVRQQLPEKYKEIFFDQSKNGYAGYIDGGASQEEFYKFIKPILEKMDGTEELLVKLNREDLLRKQRTFDNGSIPHQIHLGELHAILRRQEDFYPFLKDNREKIEKILTFRIPYYVGPLARGNSRFAWMTRKSEETITPWNFEEVVDKGASAQSFIERMTNFDKNLPNEKVLPKHSLLYEYFTVYNELTKVKYVTEGMRKPAFLSGEQKKAIVDLLFKTNRKVTVKQLKEDYFKKIECFDSVEISGVEDRFNASLGTYHDLLKIIKDKDFLDNEENEDILEDIVLTLTLFEDREMIEERLKTYAHLFDDKVMKQLKRRRYTGWGRLSRKLINGIRDKQSGKTILDFLKSDGFANRNFMQLIHDDSLTFKEDIQKAQVSGQGDSLHEHIANLAGSPAIKKGILQTVKVVDELVKVMGRHKPENIVIEMARENQTTQKGQKNSRERMKRIEEGIKELGSQILKEHPVENTQLQNEKLYLYYLQNGRDMYVDQELDINRLSDYDVDHIVPQSFLKDDSIDNKVLTRSDKARGKSDNVPSEEVVKKMKNYWRQLLNAKLITQRKFDNLTKAERGGLSELDKAGFIKRQLVETRQITKHVAQILDSRMNTKYDENDKLIREVKVITLKSKLVSDFRKDFQFYKVREINNYHHAHDAYLNAVVGTALIKKYPKLESEFVYGDYKVYDVRKMIAKSEQEIGKATAKYFFYSNIMNFFKTEITLANGEIRKRPLIETNGETGEIVWDKGRDFATVRKVLSMPQVNIVKKTEVQTGGFSKESILPKRNSDKLIARKKDWDPKKYGGFDSPTVAYSVLVVAKVEKGKSKKLKSVKELLGITIMERSSFEKNPIDFLEAKGYKEVKKDLIIKLPKYSLFELENGRKRMLASAGELQKGNELALPSKYVNFLYLASHYEKLKGSPEDNEQKQLFVEQHKHYLDEIIEQISEFSKRVILADANLDKVLSAYNKHRDKPIREQAENIIHLFTLTNLGAPAAFKYFDTTIDRKRYTSTKEVLDATLIHQSITGLYETRIDLSQLGGDGGPAPGGTLQLDDEYRLYSPLVKPDQNIQFWLEQFPQAWAETAGMGLAKQVPPQVIQLKASATPVSVRQYPLSKEAQEGIRPHVQRLIQQGILVPVQSPWNTPLLPVRKPGTNDYRPVQDLREVNKRVQDIHPTVPNPYNLLCALPPQRSWYTVLDLKDAFFCLRLHPTSQPLFAFEWRDPGTGRTGQLTWTRLPQGFKNSPTIFNEALHRDLANFRIQHPQVTLLQYVDDLLLAGATKQDCLEGTKALLLELSDLGYRASAKKAQICRREVTYLGYSLRDGQRWLTEARKKTVVQIPAPTTAKQVREFLGTAGFCRLWIPGFATLAAPLYPLTKPKGEFSWAPEHQKAFDAIKKALLSAPALALPDVTKPFTLYVDERKGVARGVLTQTLGPWRRPVAYLSKKLDPVASGWPVCLKAIAAVAILVKDADKLTLGQNITVIAPHALENIVRQPPDRWMTNARMTHYQSLLLTERVTFAPPAALNPATLLPEETDEPVTHDCHQLLIEETGVRKDLTDIPLTGEVLTWFTDGSSYVVEGKRMAGAAVVDGTRTIWASSLPEGTSAQKAELMALTQALRLAEGKSINIYTDSRYAFATAHVHGAIYKQRGWLTSAGREIKNKEEILSLLEALHLPKRLAIIHCPGHQKAKDPISRGNQMADRVAKQAAQGVNLLAGKRTADGSEFEKRTADGSEFESPKKKAKVE

SEQ ID NO: 178 - protein, 2085 aa, synthetic construct
MPAAKRVKLDGGDKKYSIGLDIGTNSVGWAVITDEYKVPSKKFKVLGNTDRHSIKKNLIGALLFDSGETAEATRLKRTARRRYTRRKNRICYLQEIFSNEMAKVDDSFFHRLEESFLVEEDKKHERHPIFGNIVDEVAYHEKYPTIYHLRKKLVDSTDKADLRLIYLALAHMIKFRGHFLIEGDLNPDNSDVDKLFIQLVQTYNQLFEENPINASGVDAKAILSARLSKSRRLENLIAQLPGEKKNGLFGNLIALSLGLTPNFKSNFDLAEDAKLQLSKDTYDDDLDNLLAQIGDQYADLFLAAKNLSDAILLSDILRVNTEITKAPLSASMIKRYDEHHQDLTLLKALVRQQLPEKYKEIFFDQSKNGYAGYIDGGASQEEFYKFIKPILEKMDGTEELLVKLNREDLLRKQRTFDNGSIPHQIHLGELHAILRRQEDFYPFLKDNREKIEKILTFRIPYYVGPLARGNSRFAWMTRKSEETITPWNFEEVVDKGASAQSFIERMTNFDKNLPNEKVLPKHSLLYEYFTVYNELTKVKYVTEGMRKPAFLSGEQKKAIVDLLFKTNRKVTVKQLKEDYFKKIECFDSVEISGVEDRFNASLGTYHDLLKIIKDKDFLDNEENEDILEDIVLTLTLFEDREMIEERLKTYAHLFDDKVMKQLKRRRYTGWGRLSRKLINGIRDKQSGKTILDFLKSDGFANRNFMQLIHDDSLTFKEDIQKAQVSGQGDSLHEHIANLAGSPAIKKGILQTVKVVDELVKVMGRHKPENIVIEMARENQTTQKGQKNSRERMKRIEEGIKELGSQILKEHPVENTQLQNEKLYLYYLQNGRDMYVDQELDINRLSDYDVDHIVPQSFLKDDSIDNKVLTRSDKARGKSDNVPSEEVVKKMKNYWRQLLNAKLITQRKFDNLTKAERGGLSELDKAGFIKRQLVETRQITKHVAQILDSRMNTKYDENDKLIREVKVITLKSKLVSDFRKDFQFYKVREINNYHHAHDAYLNAVVGTALIKKYPKLESEFVYGDYKVYDVRKMIAKSEQEIGKATAKYFFYSNIMNFFKTEITLANGEIRKRPLIETNGETGEIVWDKGRDFATVRKVLSMPQVNIVKKTEVQTGGFSKESILPKRNSDKLIARKKDWDPKKYGGFDSPTVAYSVLVVAKVEKGKSKKLKSVKELLGITIMERSSFEKNPIDFLEAKGYKEVKKDLIIKLPKYSLFELENGRKRMLASAGELQKGNELALPSKYVNFLYLASHYEKLKGSPEDNEQKQLFVEQHKHYLDEIIEQISEFSKRVILADANLDKVLSAYNKHRDKPIREQAENIIHLFTLTNLGAPAAFKYFDTTIDRKRYTSTKEVLDATLIHQSITGLYETRIDLSQLGGDGGGSSGSSGGTLQLDDEYRLYSPLVKPDQNIQFWLEQFPQAWAETAGMGLAKQVPPQVIQLKASATPVSVRQYPLSKEAQEGIRPHVQRLIQQGILVPVQSPWNTPLLPVRKPGTNDYRPVQDLREVNKRVQDIHPTVPNPYNLLCALPPQRSWYTVLDLKDAFFCLRLHPTSQPLFAFEWRDPGTGRTGQLTWTRLPQGFKNSPTIFNEALHRDLANFRIQHPQVTLLQYVDDLLLAGATKQDCLEGTKALLLELSDLGYRASAKKAQICRREVTYLGYSLRDGQRWLTEARKKTVVQIPAPTTAKQVREFLGTAGFCRLWIPGFATLAAPLYPLTKPKGEFSWAPEHQKAFDAIKKALLSAPALALPDVTKPFTLYVDERKGVARGVLTQTLGPWRRPVAYLSKKLDPVASGWPVCLKAIAAVAILVKDADKLTLGQNITVIAPHALENIVRQPPDRWMTNARMTHYQSLLLTERVTFAPPAALNPATLLPEETDEPVTHDCHQLLIEETGVRKDLTDIPLTGEVLTWFTDGSSYVVEGKRMAGAAVVDGTRTIWASSLPEGTSAQKAELMALTQALRLAEGKSINIYTDSRYAFATAHVHGAIYKQRGWLTSAGREIKNKEEILSLLEALHLPKRLAIIHCPGHQKAKDPISRGNQMADRVAKQAAQGVNLLAGKRTADGSEFEKRTADGSEFESPKKKAKVE

SEQ ID NO: 179 - protein, 2085 aa, synthetic construct
MPAAKRVKLDGGDKKYSIGLDIGTNSVGWAVITDEYKVPSKKFKVLGNTDRHSIKKNLIGALLFDSGETAEATRLKRTARRRYTRRKNRICYLQEIFSNEMAKVDDSFFHRLEESFLVEEDKKHERHPIFGNIVDEVAYHEKYPTIYHLRKKLVDSTDKADLRLIYLALAHMIKFRGHFLIEGDLNPDNSDVDKLFIQLVQTYNQLFEENPINASGVDAKAILSARLSKSRRLENLIAQLPGEKKNGLFGNLIALSLGLTPNFKSNFDLAEDAKLQLSKDTYDDDLDNLLAQIGDQYADLFLAAKNLSDAILLSDILRVNTEITKAPLSASMIKRYDEHHQDLTLLKALVRQQLPEKYKEIFFDQSKNGYAGYIDGGASQEEFYKFIKPILEKMDGTEELLVKLNREDLLRKQRTFDNGSIPHQIHLGELHAILRRQEDFYPFLKDNREKIEKILTFRIPYYVGPLARGNSRFAWMTRKSEETITPWNFEEVVDKGASAQSFIERMTNFDKNLPNEKVLPKHSLLYEYFTVYNELTKVKYVTEGMRKPAFLSGEQKKAIVDLLFKTNRKVTVKQLKEDYFKKIECFDSVEISGVEDRFNASLGTYHDLLKIIKDKDFLDNEENEDILEDIVLTLTLFEDREMIEERLKTYAHLFDDKVMKQLKRRRYTGWGRLSRKLINGIRDKQSGKTILDFLKSDGFANRNFMQLIHDDSLTFKEDIQKAQVSGQGDSLHEHIANLAGSPAIKKGILQTVKVVDELVKVMGRHKPENIVIEMARENQTTQKGQKNSRERMKRIEEGIKELGSQILKEHPVENTQLQNEKLYLYYLQNGRDMYVDQELDINRLSDYDVDHIVPQSFLKDDSIDNKVLTRSDKARGKSDNVPSEEVVKKMKNYWRQLLNAKLITQRKFDNLTKAERGGLSELDKAGFIKRQLVETRQITKHVAQILDSRMNTKYDENDKLIREVKVITLKSKLVSDFRKDFQFYKVREINNYHHAHDAYLNAVVGTALIKKYPKLESEFVYGDYKVYDVRKMIAKSEQEIGKATAKYFFYSNIMNFFKTEITLANGEIRKRPLIETNGETGEIVWDKGRDFATVRKVLSMPQVNIVKKTEVQTGGFSKESILPKRNSDKLIARKKDWDPKKYGGFDSPTVAYSVLVVAKVEKGKSKKLKSVKELLGITIMERSSFEKNPIDFLEAKGYKEVKKDLIIKLPKYSLFELENGRKRMLASAGELQKGNELALPSKYVNFLYLASHYEKLKGSPEDNEQKQLFVEQHKHYLDEIIEQISEFSKRVILADANLDKVLSAYNKHRDKPIREQAENIIHLFTLTNLGAPAAFKYFDTTIDRKRYTSTKEVLDATLIHQSITGLYETRIDLSQLGGDGGGGGGGSGGTLQLDDEYRLYSPLVKPDQNIQFWLEQFPQAWAETAGMGLAKQVPPQVIQLKASATPVSVRQYPLSKEAQEGIRPHVQRLIQQGILVPVQSPWNTPLLPVRKPGTNDYRPVQDLREVNKRVQDIHPTVPNPYNLLCALPPQRSWYTVLDLKDAFFCLRLHPTSQPLFAFEWRDPGTGRTGQLTWTRLPQGFKNSPTIFNEALHRDLANFRIQHPQVTLLQYVDDLLLAGATKQDCLEGTKALLLELSDLGYRASAKKAQICRREVTYLGYSLRDGQRWLTEARKKTVVQIPAPTTAKQVREFLGTAGFCRLWIPGFATLAAPLYPLTKPKGEFSWAPEHQKAFDAIKKALLSAPALALPDVTKPFTLYVDERKGVARGVLTQTLGPWRRPVAYLSKKLDPVASGWPVCLKAIAAVAILVKDADKLTLGQNITVIAPHALENIVRQPPDRWMTNARMTHYQSLLLTERVTFAPPAALNPATLLPEETDEPVTHDCHQLLIEETGVRKDLTDIPLTGEVLTWFTDGSSYVVEGKRMAGAAVVDGTRTIWASSLPEGTSAQKAELMALTQALRLAEGKSINIYTDSRYAFATAHVHGAIYKQRGWLTSAGREIKNKEEILSLLEALHLPKRLAIIHCPGHQKAKDPISRGNQMADRVAKQAAQGVNLLAGKRTADGSEFEKRTADGSEFESPKKKAKVE

SEQ ID NO: 180 - protein, 2088 aa, synthetic construct
MPAAKRVKLDGGDKKYSIGLDIGTNSVGWAVITDEYKVPSKKFKVLGNTDRHSIKKNLIGALLFDSGETAEATRLKRTARRRYTRRKNRICYLQEIFSNEMAKVDDSFFHRLEESFLVEEDKKHERHPIFGNIVDEVAYHEKYPTIYHLRKKLVDSTDKADLRLIYLALAHMIKFRGHFLIEGDLNPDNSDVDKLFIQLVQTYNQLFEENPINASGVDAKAILSARLSKSRRLENLIAQLPGEKKNGLFGNLIALSLGLTPNFKSNFDLAEDAKLQLSKDTYDDDLDNLLAQIGDQYADLFLAAKNLSDAILLSDILRVNTEITKAPLSASMIKRYDEHHQDLTLLKALVRQQLPEKYKEIFFDQSKNGYAGYIDGGASQEEFYKFIKPILEKMDGTEELLVKLNREDLLRKQRTFDNGSIPHQIHLGELHAILRRQEDFYPFLKDNREKIEKILTFRIPYYVGPLARGNSRFAWMTRKSEETITPWNFEEVVDKGASAQSFIERMTNFDKNLPNEKVLPKHSLLYEYFTVYNELTKVKYVTEGMRKPAFLSGEQKKAIVDLLFKTNRKVTVKQLKEDYFKKIECFDSVEISGVEDRFNASLGTYHDLLKIIKDKDFLDNEENEDILEDIVLTLTLFEDREMIEERLKTYAHLFDDKVMKQLKRRRYTGWGRLSRKLINGIRDKQSGKTILDFLKSDGFANRNFMQLIHDDSLTFKEDIQKAQVSGQGDSLHEHIANLAGSPAIKKGILQTVKVVDELVKVMGRHKPENIVIEMARENQTTQKGQKNSRERMKRIEEGIKELGSQILKEHPVENTQLQNEKLYLYYLQNGRDMYVDQELDINRLSDYDVDHIVPQSFLKDDSIDNKVLTRSDKARGKSDNVPSEEVVKKMKNYWRQLLNAKLITQRKFDNLTKAERGGLSELDKAGFIKRQLVETRQITKHVAQILDSRMNTKYDENDKLIREVKVITLKSKLVSDFRKDFQFYKVREINNYHHAHDAYLNAVVGTALIKKYPKLESEFVYGDYKVYDVRKMIAKSEQEIGKATAKYFFYSNIMNFFKTEITLANGEIRKRPLIETNGETGEIVWDKGRDFATVRKVLSMPQVNIVKKTEVQTGGFSKESILPKRNSDKLIARKKDWDPKKYGGFDSPTVAYSVLVVAKVEKGKSKKLKSVKELLGITIMERSSFEKNPIDFLEAKGYKEVKKDLIIKLPKYSLFELENGRKRMLASAGELQKGNELALPSKYVNFLYLASHYEKLKGSPEDNEQKQLFVEQHKHYLDEIIEQISEFSKRVILADANLDKVLSAYNKHRDKPIREQAENIIHLFTLTNLGAPAAFKYFDTTIDRKRYTSTKEVLDATLIHQSITGLYETRIDLSQLGGDGGGGGGSSGGSGGTLQLDDEYRLYSPLVKPDQNIQFWLEQFPQAWAETAGMGLAKQVPPQVIQLKASATPVSVRQYPLSKEAQEGIRPHVQRLIQQGILVPVQSPWNTPLLPVRKPGTNDYRPVQDLREVNKRVQDIHPTVPNPYNLLCALPPQRSWYTVLDLKDAFFCLRLHPTSQPLFAFEWRDPGTGRTGQLTWTRLPQGFKNSPTIFNEALHRDLANFRIQHPQVTLLQYVDDLLLAGATKQDCLEGTKALLLELSDLGYRASAKKAQICRREVTYLGYSLRDGQRWLTEARKKTVVQIPAPTTAKQVREFLGTAGFCRLWIPGFATLAAPLYPLTKPKGEFSWAPEHQKAFDAIKKALLSAPALALPDVTKPFTLYVDERKGVARGVLTQTLGPWRRPVAYLSKKLDPVASGWPVCLKAIAAVAILVKDADKLTLGQNITVIAPHALENIVRQPPDRWMTNARMTHYQSLLLTERVTFAPPAALNPATLLPEETDEPVTHDCHQLLIEETGVRKDLTDIPLTGEVLTWFTDGSSYVVEGKRMAGAAVVDGTRTIWASSLPEGTSAQKAELMALTQALRLAEGKSINIYTDSRYAFATAHVHGAIYKQRGWLTSAGREIKNKEEILSLLEALHLPKRLAIIHCPGHQKAKDPISRGNQMADRVAKQAAQGVNLLAGKRTADGSEFEKRTADGSEFESPKKKAKVE

SEQ ID NO: 181 - protein, 2088 aa, synthetic construct
MPAAKRVKLDGGDKKYSIGLDIGTNSVGWAVITDEYKVPSKKFKVLGNTDRHSIKKNLIGALLFDSGETAEATRLKRTARRRYTRRKNRICYLQEIFSNEMAKVDDSFFHRLEESFLVEEDKKHERHPIFGNIVDEVAYHEKYPTIYHLRKKLVDSTDKADLRLIYLALAHMIKFRGHFLIEGDLNPDNSDVDKLFIQLVQTYNQLFEENPINASGVDAKAILSARLSKSRRLENLIAQLPGEKKNGLFGNLIALSLGLTPNFKSNFDLAEDAKLQLSKDTYDDDLDNLLAQIGDQYADLFLAAKNLSDAILLSDILRVNTEITKAPLSASMIKRYDEHHQDLTLLKALVRQQLPEKYKEIFFDQSKNGYAGYIDGGASQEEFYKFIKPILEKMDGTEELLVKLNREDLLRKQRTFDNGSIPHQIHLGELHAILRRQEDFYPFLKDNREKIEKILTFRIPYYVGPLARGNSRFAWMTRKSEETITPWNFEEVVDKGASAQSFIERMTNFDKNLPNEKVLPKHSLLYEYFTVYNELTKVKYVTEGMRKPAFLSGEQKKAIVDLLFKTNRKVTVKQLKEDYFKKIECFDSVEISGVEDRFNASLGTYHDLLKIIKDKDFLDNEENEDILEDIVLTLTLFEDREMIEERLKTYAHLFDDKVMKQLKRRRYTGWGRLSRKLINGIRDKQSGKTILDFLKSDGFANRNFMQLIHDDSLTFKEDIQKAQVSGQGDSLHEHIANLAGSPAIKKGILQTVKVVDELVKVMGRHKPENIVIEMARENQTTQKGQKNSRERMKRIEEGIKELGSQILKEHPVENTQLQNEKLYLYYLQNGRDMYVDQELDINRLSDYDVDHIVPQSFLKDDSIDNKVLTRSDKARGKSDNVPSEEVVKKMKNYWRQLLNAKLITQRKFDNLTKAERGGLSELDKAGFIKRQLVETRQITKHVAQILDSRMNTKYDENDKLIREVKVITLKSKLVSDFRKDFQFYKVREINNYHHAHDAYLNAVVGTALIKKYPKLESEFVYGDYKVYDVRKMIAKSEQEIGKATAKYFFYSNIMNFFKTEITLANGEIRKRPLIETNGETGEIVWDKGRDFATVRKVLSMPQVNIVKKTEVQTGGFSKESILPKRNSDKLIARKKDWDPKKYGGFDSPTVAYSVLVVAKVEKGKSKKLKSVKELLGITIMERSSFEKNPIDFLEAKGYKEVKKDLIIKLPKYSLFELENGRKRMLASAGELQKGNELALPSKYVNFLYLASHYEKLKGSPEDNEQKQLFVEQHKHYLDEIIEQISEFSKRVILADANLDKVLSAYNKHRDKPIREQAENIIHLFTLTNLGAPAAFKYFDTTIDRKRYTSTKEVLDATLIHQSITGLYETRIDLSQLGGDGGGSSGSSGSSGGTLQLDDEYRLYSPLVKPDQNIQFWLEQFPQAWAETAGMGLAKQVPPQVIQLKASATPVSVRQYPLSKEAQEGIRPHVQRLIQQGILVPVQSPWNTPLLPVRKPGTNDYRPVQDLREVNKRVQDIHPTVPNPYNLLCALPPQRSWYTVLDLKDAFFCLRLHPTSQPLFAFEWRDPGTGRTGQLTWTRLPQGFKNSPTIFNEALHRDLANFRIQHPQVTLLQYVDDLLLAGATKQDCLEGTKALLLELSDLGYRASAKKAQICRREVTYLGYSLRDGQRWLTEARKKTVVQIPAPTTAKQVREFLGTAGFCRLWIPGFATLAAPLYPLTKPKGEFSWAPEHQKAFDAIKKALLSAPALALPDVTKPFTLYVDERKGVARGVLTQTLGPWRRPVAYLSKKLDPVASGWPVCLKAIAAVAILVKDADKLTLGQNITVIAPHALENIVRQPPDRWMTNARMTHYQSLLLTERVTFAPPAALNPATLLPEETDEPVTHDCHQLLIEETGVRKDLTDIPLTGEVLTWFTDGSSYVVEGKRMAGAAVVDGTRTIWASSLPEGTSAQKAELMALTQALRLAEGKSINIYTDSRYAFATAHVHGAIYKQRGWLTSAGREIKNKEEILSLLEALHLPKRLAIIHCPGHQKAKDPISRGNQMADRVAKQAAQGVNLLAGKRTADGSEFEKRTADGSEFESPKKKAKVE

SEQ ID NO: 182 - protein, 2088 aa, synthetic construct
MPAAKRVKLDGGDKKYSIGLDIGTNSVGWAVITDEYKVPSKKFKVLGNTDRHSIKKNLIGALLFDSGETAEATRLKRTARRRYTRRKNRICYLQEIFSNEMAKVDDSFFHRLEESFLVEEDKKHERHPIFGNIVDEVAYHEKYPTIYHLRKKLVDSTDKADLRLIYLALAHMIKFRGHFLIEGDLNPDNSDVDKLFIQLVQTYNQLFEENPINASGVDAKAILSARLSKSRRLENLIAQLPGEKKNGLFGNLIALSLGLTPNFKSNFDLAEDAKLQLSKDTYDDDLDNLLAQIGDQYADLFLAAKNLSDAILLSDILRVNTEITKAPLSASMIKRYDEHHQDLTLLKALVRQQLPEKYKEIFFDQSKNGYAGYIDGGASQEEFYKFIKPILEKMDGTEELLVKLNREDLLRKQRTFDNGSIPHQIHLGELHAILRRQEDFYPFLKDNREKIEKILTFRIPYYVGPLARGNSRFAWMTRKSEETITPWNFEEVVDKGASAQSFIERMTNFDKNLPNEKVLPKHSLLYEYFTVYNELTKVKYVTEGMRKPAFLSGEQKKAIVDLLFKTNRKVTVKQLKEDYFKKIECFDSVEISGVEDRFNASLGTYHDLLKIIKDKDFLDNEENEDILEDIVLTLTLFEDREMIEERLKTYAHLFDDKVMKQLKRRRYTGWGRLSRKLINGIRDKQSGKTILDFLKSDGFANRNFMQLIHDDSLTFKEDIQKAQVSGQGDSLHEHIANLAGSPAIKKGILQTVKVVDELVKVMGRHKPENIVIEMARENQTTQKGQKNSRERMKRIEEGIKELGSQILKEHPVENTQLQNEKLYLYYLQNGRDMYVDQELDINRLSDYDVDHIVPQSFLKDDSIDNKVLTRSDKARGKSDNVPSEEVVKKMKNYWRQLLNAKLITQRKFDNLTKAERGGLSELDKAGFIKRQLVETRQITKHVAQILDSRMNTKYDENDKLIREVKVITLKSKLVSDFRKDFQFYKVREINNYHHAHDAYLNAVVGTALIKKYPKLESEFVYGDYKVYDVRKMIAKSEQEIGKATAKYFFYSNIMNFFKTEITLANGEIRKRPLIETNGETGEIVWDKGRDFATVRKVLSMPQVNIVKKTEVQTGGFSKESILPKRNSDKLIARKKDWDPKKYGGFDSPTVAYSVLVVAKVEKGKSKKLKSVKELLGITIMERSSFEKNPIDFLEAKGYKEVKKDLIIKLPKYSLFELENGRKRMLASAGELQKGNELALPSKYVNFLYLASHYEKLKGSPEDNEQKQLFVEQHKHYLDEIIEQISEFSKRVILADANLDKVLSAYNKHRDKPIREQAENIIHLFTLTNLGAPAAFKYFDTTIDRKRYTSTKEVLDATLIHQSITGLYETRIDLSQLGGDGGGSSGGSGGGGGTLQLDDEYRLYSPLVKPDQNIQFWLEQFPQAWAETAGMGLAKQVPPQVIQLKASATPVSVRQYPLSKEAQEGIRPHVQRLIQQGILVPVQSPWNTPLLPVRKPGTNDYRPVQDLREVNKRVQDIHPTVPNPYNLLCALPPQRSWYTVLDLKDAFFCLRLHPTSQPLFAFEWRDPGTGRTGQLTWTRLPQGFKNSPTIFNEALHRDLANFRIQHPQVTLLQYVDDLLLAGATKQDCLEGTKALLLELSDLGYRASAKKAQICRREVTYLGYSLRDGQRWLTEARKKTVVQIPAPTTAKQVREFLGTAGFCRLWIPGFATLAAPLYPLTKPKGEFSWAPEHQKAFDAIKKALLSAPALALPDVTKPFTLYVDERKGVARGVLTQTLGPWRRPVAYLSKKLDPVASGWPVCLKAIAAVAILVKDADKLTLGQNITVIAPHALENIVRQPPDRWMTNARMTHYQSLLLTERVTFAPPAALNPATLLPEETDEPVTHDCHQLLIEETGVRKDLTDIPLTGEVLTWFTDGSSYVVEGKRMAGAAVVDGTRTIWASSLPEGTSAQKAELMALTQALRLAEGKSINIYTDSRYAFATAHVHGAIYKQRGWLTSAGREIKNKEEILSLLEALHLPKRLAIIHCPGHQKAKDPISRGNQMADRVAKQAAQGVNLLAGKRTADGSEFEKRTADGSEFESPKKKAKVE

SEQ ID NO: 183 - protein, 2085 aa, synthetic construct
MPAAKRVKLDGGDKKYSIGLDIGTNSVGWAVITDEYKVPSKKFKVLGNTDRHSIKKNLIGALLFDSGETAEATRLKRTARRRYTRRKNRICYLQEIFSNEMAKVDDSFFHRLEESFLVEEDKKHERHPIFGNIVDEVAYHEKYPTIYHLRKKLVDSTDKADLRLIYLALAHMIKFRGHFLIEGDLNPDNSDVDKLFIQLVQTYNQLFEENPINASGVDAKAILSARLSKSRRLENLIAQLPGEKKNGLFGNLIALSLGLTPNFKSNFDLAEDAKLQLSKDTYDDDLDNLLAQIGDQYADLFLAAKNLSDAILLSDILRVNTEITKAPLSASMIKRYDEHHQDLTLLKALVRQQLPEKYKEIFFDQSKNGYAGYIDGGASQEEFYKFIKPILEKMDGTEELLVKLNREDLLRKQRTFDNGSIPHQIHLGELHAILRRQEDFYPFLKDNREKIEKILTFRIPYYVGPLARGNSRFAWMTRKSEETITPWNFEEVVDKGASAQSFIERMTNFDKNLPNEKVLPKHSLLYEYFTVYNELTKVKYVTEGMRKPAFLSGEQKKAIVDLLFKTNRKVTVKQLKEDYFKKIECFDSVEISGVEDRFNASLGTYHDLLKIIKDKDFLDNEENEDILEDIVLTLTLFEDREMIEERLKTYAHLFDDKVMKQLKRRRYTGWGRLSRKLINGIRDKQSGKTILDFLKSDGFANRNFMQLIHDDSLTFKEDIQKAQVSGQGDSLHEHIANLAGSPAIKKGILQTVKVVDELVKVMGRHKPENIVIEMARENQTTQKGQKNSRERMKRIEEGIKELGSQILKEHPVENTQLQNEKLYLYYLQNGRDMYVDQELDINRLSDYDVDHIVPQSFLKDDSIDNKVLTRSDKARGKSDNVPSEEVVKKMKNYWRQLLNAKLITQRKFDNLTKAERGGLSELDKAGFIKRQLVETRQITKHVAQILDSRMNTKYDENDKLIREVKVITLKSKLVSDFRKDFQFYKVREINNYHHAHDAYLNAVVGTALIKKYPKLESEFVYGDYKVYDVRKMIAKSEQEIGKATAKYFFYSNIMNFFKTEITLANGEIRKRPLIETNGETGEIVWDKGRDFATVRKVLSMPQVNIVKKTEVQTGGFSKESILPKRNSDKLIARKKDWDPKKYGGFDSPTVAYSVLVVAKVEKGKSKKLKSVKELLGITIMERSSFEKNPIDFLEAKGYKEVKKDLIIKLPKYSLFELENGRKRMLASAGELQKGNELALPSKYVNFLYLASHYEKLKGSPEDNEQKQLFVEQHKHYLDEIIEQISEFSKRVILADANLDKVLSAYNKHRDKPIREQAENIIHLFTLTNLGAPAAFKYFDTTIDRKRYTSTKEVLDATLIHQSITGLYETRIDLSQLGGDGGGGGGGGGGTLQLDDEYRLYSPLVKPDQNIQFWLEQFPQAWAETAGMGLAKQVPPQVIQLKASATPVSVRQYPLSKEAQEGIRPHVQRLIQQGILVPVQSPWNTPLLPVRKPGTNDYRPVQDLREVNKRVQDIHPTVPNPYNLLCALPPQRSWYTVLDLKDAFFCLRLHPTSQPLFAFEWRDPGTGRTGQLTWTRLPQGFKNSPTIFNEALHRDLANFRIQHPQVTLLQYVDDLLLAGATKQDCLEGTKALLLELSDLGYRASAKKAQICRREVTYLGYSLRDGQRWLTEARKKTVVQIPAPTTAKQVREFLGTAGFCRLWIPGFATLAAPLYPLTKPKGEFSWAPEHQKAFDAIKKALLSAPALALPDVTKPFTLYVDERKGVARGVLTQTLGPWRRPVAYLSKKLDPVASGWPVCLKAIAAVAILVKDADKLTLGQNITVIAPHALENIVRQPPDRWMTNARMTHYQSLLLTERVTFAPPAALNPATLLPEETDEPVTHDCHQLLIEETGVRKDLTDIPLTGEVLTWFTDGSSYVVEGKRMAGAAVVDGTRTIWASSLPEGTSAQKAELMALTQALRLAEGKSINIYTDSRYAFATAHVHGAIYKQRGWLTSAGREIKNKEEILSLLEALHLPKRLAIIHCPGHQKAKDPISRGNQMADRVAKQAAQGVNLLAGKRTADGSEFEKRTADGSEFESPKKKAKVE

SEQ ID NO: 184 - protein, 2085 aa, synthetic construct
MPAAKRVKLDGGDKKYSIGLDIGTNSVGWAVITDEYKVPSKKFKVLGNTDRHSIKKNLIGALLFDSGETAEATRLKRTARRRYTRRKNRICYLQEIFSNEMAKVDDSFFHRLEESFLVEEDKKHERHPIFGNIVDEVAYHEKYPTIYHLRKKLVDSTDKADLRLIYLALAHMIKFRGHFLIEGDLNPDNSDVDKLFIQLVQTYNQLFEENPINASGVDAKAILSARLSKSRRLENLIAQLPGEKKNGLFGNLIALSLGLTPNFKSNFDLAEDAKLQLSKDTYDDDLDNLLAQIGDQYADLFLAAKNLSDAILLSDILRVNTEITKAPLSASMIKRYDEHHQDLTLLKALVRQQLPEKYKEIFFDQSKNGYAGYIDGGASQEEFYKFIKPILEKMDGTEELLVKLNREDLLRKQRTFDNGSIPHQIHLGELHAILRRQEDFYPFLKDNREKIEKILTFRIPYYVGPLARGNSRFAWMTRKSEETITPWNFEEVVDKGASAQSFIERMTNFDKNLPNEKVLPKHSLLYEYFTVYNELTKVKYVTEGMRKPAFLSGEQKKAIVDLLFKTNRKVTVKQLKEDYFKKIECFDSVEISGVEDRFNASLGTYHDLLKIIKDKDFLDNEENEDILEDIVLTLTLFEDREMIEERLKTYAHLFDDKVMKQLKRRRYTGWGRLSRKLINGIRDKQSGKTILDFLKSDGFANRNFMQLIHDDSLTFKEDIQKAQVSGQGDSLHEHIANLAGSPAIKKGILQTVKVVDELVKVMGRHKPENIVIEMARENQTTQKGQKNSRERMKRIEEGIKELGSQILKEHPVENTQLQNEKLYLYYLQNGRDMYVDQELDINRLSDYDVDHIVPQSFLKDDSIDNKVLTRSDKARGKSDNVPSEEVVKKMKNYWRQLLNAKLITQRKFDNLTKAERGGLSELDKAGFIKRQLVETRQITKHVAQILDSRMNTKYDENDKLIREVKVITLKSKLVSDFRKDFQFYKVREINNYHHAHDAYLNAVVGTALIKKYPKLESEFVYGDYKVYDVRKMIAKSEQEIGKATAKYFFYSNIMNFFKTEITLANGEIRKRPLIETNGETGEIVWDKGRDFATVRKVLSMPQVNIVKKTEVQTGGFSKESILPKRNSDKLIARKKDWDPKKYGGFDSPTVAYSVLVVAKVEKGKSKKLKSVKELLGITIMERSSFEKNPIDFLEAKGYKEVKKDLIIKLPKYSLFELENGRKRMLASAGELQKGNELALPSKYVNFLYLASHYEKLKGSPEDNEQKQLFVEQHKHYLDEIIEQISEFSKRVILADANLDKVLSAYNKHRDKPIREQAENIIHLFTLTNLGAPAAFKYFDTTIDRKRYTSTKEVLDATLIHQSITGLYETRIDLSQLGGDGGGGSGGGGGTLQLDDEYRLYSPLVKPDQNIQFWLEQFPQAWAETAGMGLAKQVPPQVIQLKASATPVSVRQYPLSKEAQEGIRPHVQRLIQQGILVPVQSPWNTPLLPVRKPGTNDYRPVQDLREVNKRVQDIHPTVPNPYNLLCALPPQRSWYTVLDLKDAFFCLRLHPTSQPLFAFEWRDPGTGRTGQLTWTRLPQGFKNSPTIFNEALHRDLANFRIQHPQVTLLQYVDDLLLAGATKQDCLEGTKALLLELSDLGYRASAKKAQICRREVTYLGYSLRDGQRWLTEARKKTVVQIPAPTTAKQVREFLGTAGFCRLWIPGFATLAAPLYPLTKPKGEFSWAPEHQKAFDAIKKALLSAPALALPDVTKPFTLYVDERKGVARGVLTQTLGPWRRPVAYLSKKLDPVASGWPVCLKAIAAVAILVKDADKLTLGQNITVIAPHALENIVRQPPDRWMTNARMTHYQSLLLTERVTFAPPAALNPATLLPEETDEPVTHDCHQLLIEETGVRKDLTDIPLTGEVLTWFTDGSSYVVEGKRMAGAAVVDGTRTIWASSLPEGTSAQKAELMALTQALRLAEGKSINIYTDSRYAFATAHVHGAIYKQRGWLTSAGREIKNKEEILSLLEALHLPKRLAIIHCPGHQKAKDPISRGNQMADRVAKQAAQGVNLLAGKRTADGSEFEKRTADGSEFESPKKKAKVE

SEQ ID NO: 185 - protein, 2087 aa, synthetic construct
MPAAKRVKLDGGDKKYSIGLDIGTNSVGWAVITDEYKVPSKKFKVLGNTDRHSIKKNLIGALLFDSGETAEATRLKRTARRRYTRRKNRICYLQEIFSNEMAKVDDSFFHRLEESFLVEEDKKHERHPIFGNIVDEVAYHEKYPTIYHLRKKLVDSTDKADLRLIYLALAHMIKFRGHFLIEGDLNPDNSDVDKLFIQLVQTYNQLFEENPINASGVDAKAILSARLSKSRRLENLIAQLPGEKKNGLFGNLIALSLGLTPNFKSNFDLAEDAKLQLSKDTYDDDLDNLLAQIGDQYADLFLAAKNLSDAILLSDILRVNTEITKAPLSASMIKRYDEHHQDLTLLKALVRQQLPEKYKEIFFDQSKNGYAGYIDGGASQEEFYKFIKPILEKMDGTEELLVKLNREDLLRKQRTFDNGSIPHQIHLGELHAILRRQEDFYPFLKDNREKIEKILTFRIPYYVGPLARGNSRFAWMTRKSEETITPWNFEEVVDKGASAQSFIERMTNFDKNLPNEKVLPKHSLLYEYFTVYNELTKVKYVTEGMRKPAFLSGEQKKAIVDLLFKTNRKVTVKQLKEDYFKKIECFDSVEISGVEDRFNASLGTYHDLLKIIKDKDFLDNEENEDILEDIVLTLTLFEDREMIEERLKTYAHLFDDKVMKQLKRRRYTGWGRLSRKLINGIRDKQSGKTILDFLKSDGFANRNFMQLIHDDSLTFKEDIQKAQVSGQGDSLHEHIANLAGSPAIKKGILQTVKVVDELVKVMGRHKPENIVIEMARENQTTQKGQKNSRERMKRIEEGIKELGSQILKEHPVENTQLQNEKLYLYYLQNGRDMYVDQELDINRLSDYDVDHIVPQSFLKDDSIDNKVLTRSDKARGKSDNVPSEEVVKKMKNYWRQLLNAKLITQRKFDNLTKAERGGLSELDKAGFIKRQLVETRQITKHVAQILDSRMNTKYDENDKLIREVKVITLKSKLVSDFRKDFQFYKVREINNYHHAHDAYLNAVVGTALIKKYPKLESEFVYGDYKVYDVRKMIAKSEQEIGKATAKYFFYSNIMNFFKTEITLANGEIRKRPLIETNGETGEIVWDKGRDFATVRKVLSMPQVNIVKKTEVQTGGFSKESILPKRNSDKLIARKKDWDPKKYGGFDSPTVAYSVLVVAKVEKGKSKKLKSVKELLGITIMERSSFEKNPIDFLEAKGYKEVKKDLIIKLPKYSLFELENGRKRMLASAGELQKGNELALPSKYVNFLYLASHYEKLKGSPEDNEQKQLFVEQHKHYLDEIIEQISEFSKRVILADANLDKVLSAYNKHRDKPIREQAENIIHLFTLTNLGAPAAFKYFDTTIDRKRYTSTKEVLDATLIHQSITGLYETRIDLSQLGGDGGGGGEAAAKGGTLQLDDEYRLYSPLVKPDQNIQFWLEQFPQAWAETAGMGLAKQVPPQVIQLKASATPVSVRQYPLSKEAQEGIRPHVQRLIQQGILVPVQSPWNTPLLPVRKPGTNDYRPVQDLREVNKRVQDIHPTVPNPYNLLCALPPQRSWYTVLDLKDAFFCLRLHPTSQPLFAFEWRDPGTGRTGQLTWTRLPQGFKNSPTIFNEALHRDLANFRIQHPQVTLLQYVDDLLLAGATKQDCLEGTKALLLELSDLGYRASAKKAQICRREVTYLGYSLRDGQRWLTEARKKTVVQIPAPTTAKQVREFLGTAGFCRLWIPGFATLAAPLYPLTKPKGEFSWAPEHQKAFDAIKKALLSAPALALPDVTKPFTLYVDERKGVARGVLTQTLGPWRRPVAYLSKKLDPVASGWPVCLKAIAAVAILVKDADKLTLGQNITVIAPHALENIVRQPPDRWMTNARMTHYQSLLLTERVTFAPPAALNPATLLPEETDEPVTHDCHQLLIEETGVRKDLTDIPLTGEVLTWFTDGSSYVVEGKRMAGAAVVDGTRTIWASSLPEGTSAQKAELMALTQALRLAEGKSINIYTDSRYAFATAHVHGAIYKQRGWLTSAGREIKNKEEILSLLEALHLPKRLAIIHCPGHQKAKDPISRGNQMADRVAKQAAQGVNLLAGKRTADGSEFEKRTADGSEFESPKKKAKVE

SEQ ID NO: 186 - protein, 2085 aa, synthetic construct
MPAAKRVKLDGGDKKYSIGLDIGTNSVGWAVITDEYKVPSKKFKVLGNTDRHSIKKNLIGALLFDSGETAEATRLKRTARRRYTRRKNRICYLQEIFSNEMAKVDDSFFHRLEESFLVEEDKKHERHPIFGNIVDEVAYHEKYPTIYHLRKKLVDSTDKADLRLIYLALAHMIKFRGHFLIEGDLNPDNSDVDKLFIQLVQTYNQLFEENPINASGVDAKAILSARLSKSRRLENLIAQLPGEKKNGLFGNLIALSLGLTPNFKSNFDLAEDAKLQLSKDTYDDDLDNLLAQIGDQYADLFLAAKNLSDAILLSDILRVNTEITKAPLSASMIKRYDEHHQDLTLLKALVRQQLPEKYKEIFFDQSKNGYAGYIDGGASQEEFYKFIKPILEKMDGTEELLVKLNREDLLRKQRTFDNGSIPHQIHLGELHAILRRQEDFYPFLKDNREKIEKILTFRIPYYVGPLARGNSRFAWMTRKSEETITPWNFEEVVDKGASAQSFIERMTNFDKNLPNEKVLPKHSLLYEYFTVYNELTKVKYVTEGMRKPAFLSGEQKKAIVDLLFKTNRKVTVKQLKEDYFKKIECFDSVEISGVEDRFNASLGTYHDLLKIIKDKDFLDNEENEDILEDIVLTLTLFEDREMIEERLKTYAHLFDDKVMKQLKRRRYTGWGRLSRKLINGIRDKQSGKTILDFLKSDGFANRNFMQLIHDDSLTFKEDIQKAQVSGQGDSLHEHIANLAGSPAIKKGILQTVKVVDELVKVMGRHKPENIVIEMARENQTTQKGQKNSRERMKRIEEGIKELGSQILKEHPVENTQLQNEKLYLYYLQNGRDMYVDQELDINRLSDYDVDHIVPQSFLKDDSIDNKVLTRSDKARGKSDNVPSEEVVKKMKNYWRQLLNAKLITQRKFDNLTKAERGGLSELDKAGFIKRQLVETRQITKHVAQILDSRMNTKYDENDKLIREVKVITLKSKLVSDFRKDFQFYKVREINNYHHAHDAYLNAVVGTALIKKYPKLESEFVYGDYKVYDVRKMIAKSEQEIGKATAKYFFYSNIMNFFKTEITLANGEIRKRPLIETNGETGEIVWDKGRDFATVRKVLSMPQVNIVKKTEVQTGGFSKESILPKRNSDKLIARKKDWDPKKYGGFDSPTVAYSVLVVAKVEKGKSKKLKSVKELLGITIMERSSFEKNPIDFLEAKGYKEVKKDLIIKLPKYSLFELENGRKRMLASAGELQKGNELALPSKYVNFLYLASHYEKLKGSPEDNEQKQLFVEQHKHYLDEIIEQISEFSKRVILADANLDKVLSAYNKHRDKPIREQAENIIHLFTLTNLGAPAAFKYFDTTIDRKRYTSTKEVLDATLIHQSITGLYETRIDLSQLGGDGGGGSGGSGGTLQLDDEYRLYSPLVKPDQNIQFWLEQFPQAWAETAGMGLAKQVPPQVIQLKASATPVSVRQYPLSKEAQEGIRPHVQRLIQQGILVPVQSPWNTPLLPVRKPGTNDYRPVQDLREVNKRVQDIHPTVPNPYNLLCALPPQRSWYTVLDLKDAFFCLRLHPTSQPLFAFEWRDPGTGRTGQLTWTRLPQGFKNSPTIFNEALHRDLANFRIQHPQVTLLQYVDDLLLAGATKQDCLEGTKALLLELSDLGYRASAKKAQICRREVTYLGYSLRDGQRWLTEARKKTVVQIPAPTTAKQVREFLGTAGFCRLWIPGFATLAAPLYPLTKPKGEFSWAPEHQKAFDAIKKALLSAPALALPDVTKPFTLYVDERKGVARGVLTQTLGPWRRPVAYLSKKLDPVASGWPVCLKAIAAVAILVKDADKLTLGQNITVIAPHALENIVRQPPDRWMTNARMTHYQSLLLTERVTFAPPAALNPATLLPEETDEPVTHDCHQLLIEETGVRKDLTDIPLTGEVLTWFTDGSSYVVEGKRMAGAAVVDGTRTIWASSLPEGTSAQKAELMALTQALRLAEGKSINIYTDSRYAFATAHVHGAIYKQRGWLTSAGREIKNKEEILSLLEALHLPKRLAIIHCPGHQKAKDPISRGNQMADRVAKQAAQGVNLLAGKRTADGSEFEKRTADGSEFESPKKKAKVE

SEQ ID NO: 187 - protein, 1999 aa, synthetic construct
MPAAKRVKLDGGDKKYSIGLDIGTNSVGWAVITDEYKVPSKKFKVLGNTDRHSIKKNLIGALLFDSGETAEATRLKRTARRRYTRRKNRICYLQEIFSNEMAKVDDSFFHRLEESFLVEEDKKHERHPIFGNIVDEVAYHEKYPTIYHLRKKLVDSTDKADLRLIYLALAHMIKFRGHFLIEGDLNPDNSDVDKLFIQLVQTYNQLFEENPINASGVDAKAILSARLSKSRRLENLIAQLPGEKKNGLFGNLIALSLGLTPNFKSNFDLAEDAKLQLSKDTYDDDLDNLLAQIGDQYADLFLAAKNLSDAILLSDILRVNTEITKAPLSASMIKRYDEHHQDLTLLKALVRQQLPEKYKEIFFDQSKNGYAGYIDGGASQEEFYKFIKPILEKMDGTEELLVKLNREDLLRKQRTFDNGSIPHQIHLGELHAILRRQEDFYPFLKDNREKIEKILTFRIPYYVGPLARGNSRFAWMTRKSEETITPWNFEEVVDKGASAQSFIERMTNFDKNLPNEKVLPKHSLLYEYFTVYNELTKVKYVTEGMRKPAFLSGEQKKAIVDLLFKTNRKVTVKQLKEDYFKKIECFDSVEISGVEDRFNASLGTYHDLLKIIKDKDFLDNEENEDILEDIVLTLTLFEDREMIEERLKTYAHLFDDKVMKQLKRRRYTGWGRLSRKLINGIRDKQSGKTILDFLKSDGFANRNFMQLIHDDSLTFKEDIQKAQVSGQGDSLHEHIANLAGSPAIKKGILQTVKVVDELVKVMGRHKPENIVIEMARENQTTQKGQKNSRERMKRIEEGIKELGSQILKEHPVENTQLQNEKLYLYYLQNGRDMYVDQELDINRLSDYDVDHIVPQSFLKDDSIDNKVLTRSDKARGKSDNVPSEEVVKKMKNYWRQLLNAKLITQRKFDNLTKAERGGLSELDKAGFIKRQLVETRQITKHVAQILDSRMNTKYDENDKLIREVKVITLKSKLVSDFRKDFQFYKVREINNYHHAHDAYLNAVVGTALIKKYPKLESEFVYGDYKVYDVRKMIAKSEQEIGKATAKYFFYSNIMNFFKTEITLANGEIRKRPLIETNGETGEIVWDKGRDFATVRKVLSMPQVNIVKKTEVQTGGFSKESILPKRNSDKLIARKKDWDPKKYGGFDSPTVAYSVLVVAKVEKGKSKKLKSVKELLGITIMERSSFEKNPIDFLEAKGYKEVKKDLIIKLPKYSLFELENGRKRMLASAGELQKGNELALPSKYVNFLYLASHYEKLKGSPEDNEQKQLFVEQHKHYLDEIIEQISEFSKRVILADANLDKVLSAYNKHRDKPIREQAENIIHLFTLTNLGAPAAFKYFDTTIDRKRYTSTKEVLDATLIHQSITGLYETRIDLSQLGGDGGGGSGGGGSSGGGVLDTPPSHIGLEHLPPPPEVPQFPLNLERLQALQDLVHRSLEAGYISPWDGPGNNPVFPVRKPNGAWRFVHDLRATNALTKPIPALSPGPPDLTAIPTHPPHIICLDLKDAFFQIPVEDRFRFYLSFTLPSPGGLQPHRRFAWRVLPQGFINSPALFNRALQEPLRQVSAAFSQSLLVSYMDDILYASPTEEQRSQCYQALAARLRDLGFQVASEKTSQTPSPVPFLGQMVHEQIVTYQSLPTLQISSPISLHQLQAVLGDLQWVSRGTPTTRRPLQLLYSSLKRHHDPRAIIQLSPEQLQGIAELRQALSHNARSRYNEQEPLLAYVHLTRAGSTLVLFQKGAQFPLAYFQTPLTDNQASPWGLLLLLGCQYLQTQALSSYAKPILKYYHNLPKTSLDNWIQSSEDPRVQELLQLWPQISSQGIQPPGPWKTLITRAEVFLTPQFSPDPIPAALCLFSDGATGRGAYCLWKDHLLDFQAVPAPESAQKGELAGLLAGLAAAPPEPVNIWVDSKYLYSLLRTWVLGAWLQPDPVPSYALLYKSLLRHPAIVVGHVRSHSSASHPIASLNNYVDQLAGKRTADGSEFEKRTADGSEFESPKKKAKVE

SEQ ID NO: 188 - protein, 2015 aa, synthetic construct
MPAAKRVKLDGGDKKYSIGLDIGTNSVGWAVITDEYKVPSKKFKVLGNTDRHSIKKNLIGALLFDSGETAEATRLKRTARRRYTRRKNRICYLQEIFSNEMAKVDDSFFHRLEESFLVEEDKKHERHPIFGNIVDEVAYHEKYPTIYHLRKKLVDSTDKADLRLIYLALAHMIKFRGHFLIEGDLNPDNSDVDKLFIQLVQTYNQLFEENPINASGVDAKAILSARLSKSRRLENLIAQLPGEKKNGLFGNLIALSLGLTPNFKSNFDLAEDAKLQLSKDTYDDDLDNLLAQIGDQYADLFLAAKNLSDAILLSDILRVNTEITKAPLSASMIKRYDEHHQDLTLLKALVRQQLPEKYKEIFFDQSKNGYAGYIDGGASQEEFYKFIKPILEKMDGTEELLVKLNREDLLRKQRTFDNGSIPHQIHLGELHAILRRQEDFYPFLKDNREKIEKILTFRIPYYVGPLARGNSRFAWMTRKSEETITPWNFEEVVDKGASAQSFIERMTNFDKNLPNEKVLPKHSLLYEYFTVYNELTKVKYVTEGMRKPAFLSGEQKKAIVDLLFKTNRKVTVKQLKEDYFKKIECFDSVEISGVEDRFNASLGTYHDLLKIIKDKDFLDNEENEDILEDIVLTLTLFEDREMIEERLKTYAHLFDDKVMKQLKRRRYTGWGRLSRKLINGIRDKQSGKTILDFLKSDGFANRNFMQLIHDDSLTFKEDIQKAQVSGQGDSLHEHIANLAGSPAIKKGILQTVKVVDELVKVMGRHKPENIVIEMARENQTTQKGQKNSRERMKRIEEGIKELGSQILKEHPVENTQLQNEKLYLYYLQNGRDMYVDQELDINRLSDYDVDHIVPQSFLKDDSIDNKVLTRSDKARGKSDNVPSEEVVKKMKNYWRQLLNAKLITQRKFDNLTKAERGGLSELDKAGFIKRQLVETRQITKHVAQILDSRMNTKYDENDKLIREVKVITLKSKLVSDFRKDFQFYKVREINNYHHAHDAYLNAVVGTALIKKYPKLESEFVYGDYKVYDVRKMIAKSEQEIGKATAKYFFYSNIMNFFKTEITLANGEIRKRPLIETNGETGEIVWDKGRDFATVRKVLSMPQVNIVKKTEVQTGGFSKESILPKRNSDKLIARKKDWDPKKYGGFDSPTVAYSVLVVAKVEKGKSKKLKSVKELLGITIMERSSFEKNPIDFLEAKGYKEVKKDLIIKLPKYSLFELENGRKRMLASAGELQKGNELALPSKYVNFLYLASHYEKLKGSPEDNEQKQLFVEQHKHYLDEIIEQISEFSKRVILADANLDKVLSAYNKHRDKPIREQAENIIHLFTLTNLGAPAAFKYFDTTIDRKRYTSTKEVLDATLIHQSITGLYETRIDLSQLGGDGGGGGGSGGGGSGGGGSGGGGSGGGGSGGGVLDTPPSHIGLEHLPPPPEVPQFPLNLERLQALQDLVHRSLEAGYISPWDGPGNNPVFPVRKPNGAWRFVHDLRATNALTKPIPALSPGPPDLTAIPTHPPHIICLDLKDAFFQIPVEDRFRFYLSFTLPSPGGLQPHRRFAWRVLPQGFINSPALFNRALQEPLRQVSAAFSQSLLVSYMDDILYASPTEEQRSQCYQALAARLRDLGFQVASEKTSQTPSPVPFLGQMVHEQIVTYQSLPTLQISSPISLHQLQAVLGDLQWVSRGTPTTRRPLQLLYSSLKRHHDPRAIIQLSPEQLQGIAELRQALSHNARSRYNEQEPLLAYVHLTRAGSTLVLFQKGAQFPLAYFQTPLTDNQASPWGLLLLLGCQYLQTQALSSYAKPILKYYHNLPKTSLDNWIQSSEDPRVQELLQLWPQISSQGIQPPGPWKTLITRAEVFLTPQFSPDPIPAALCLFSDGATGRGAYCLWKDHLLDFQAVPAPESAQKGELAGLLAGLAAAPPEPVNIWVDSKYLYSLLRTWVLGAWLQPDPVPSYALLYKSLLRHPAIVVGHVRSHSSASHPIASLNNYVDQLAGKRTADGSEFEKRTADGSEFESPKKKAKVE

SEQ ID NO: 189 - protein, 1996 aa, synthetic construct
MPAAKRVKLDGGDKKYSIGLDIGTNSVGWAVITDEYKVPSKKFKVLGNTDRHSIKKNLIGALLFDSGETAEATRLKRTARRRYTRRKNRICYLQEIFSNEMAKVDDSFFHRLEESFLVEEDKKHERHPIFGNIVDEVAYHEKYPTIYHLRKKLVDSTDKADLRLIYLALAHMIKFRGHFLIEGDLNPDNSDVDKLFIQLVQTYNQLFEENPINASGVDAKAILSARLSKSRRLENLIAQLPGEKKNGLFGNLIALSLGLTPNFKSNFDLAEDAKLQLSKDTYDDDLDNLLAQIGDQYADLFLAAKNLSDAILLSDILRVNTEITKAPLSASMIKRYDEHHQDLTLLKALVRQQLPEKYKEIFFDQSKNGYAGYIDGGASQEEFYKFIKPILEKMDGTEELLVKLNREDLLRKQRTFDNGSIPHQIHLGELHAILRRQEDFYPFLKDNREKIEKILTFRIPYYVGPLARGNSRFAWMTRKSEETITPWNFEEVVDKGASAQSFIERMTNFDKNLPNEKVLPKHSLLYEYFTVYNELTKVKYVTEGMRKPAFLSGEQKKAIVDLLFKTNRKVTVKQLKEDYFKKIECFDSVEISGVEDRFNASLGTYHDLLKIIKDKDFLDNEENEDILEDIVLTLTLFEDREMIEERLKTYAHLFDDKVMKQLKRRRYTGWGRLSRKLINGIRDKQSGKTILDFLKSDGFANRNFMQLIHDDSLTFKEDIQKAQVSGQGDSLHEHIANLAGSPAIKKGILQTVKVVDELVKVMGRHKPENIVIEMARENQTTQKGQKNSRERMKRIEEGIKELGSQILKEHPVENTQLQNEKLYLYYLQNGRDMYVDQELDINRLSDYDVDHIVPQSFLKDDSIDNKVLTRSDKARGKSDNVPSEEVVKKMKNYWRQLLNAKLITQRKFDNLTKAERGGLSELDKAGFIKRQLVETRQITKHVAQILDSRMNTKYDENDKLIREVKVITLKSKLVSDFRKDFQFYKVREINNYHHAHDAYLNAVVGTALIKKYPKLESEFVYGDYKVYDVRKMIAKSEQEIGKATAKYFFYSNIMNFFKTEITLANGEIRKRPLIETNGETGEIVWDKGRDFATVRKVLSMPQVNIVKKTEVQTGGFSKESILPKRNSDKLIARKKDWDPKKYGGFDSPTVAYSVLVVAKVEKGKSKKLKSVKELLGITIMERSSFEKNPIDFLEAKGYKEVKKDLIIKLPKYSLFELENGRKRMLASAGELQKGNELALPSKYVNFLYLASHYEKLKGSPEDNEQKQLFVEQHKHYLDEIIEQISEFSKRVILADANLDKVLSAYNKHRDKPIREQAENIIHLFTLTNLGAPAAFKYFDTTIDRKRYTSTKEVLDATLIHQSITGLYETRIDLSQLGGDGGGGGGSSGGGVLDTPPSHIGLEHLPPPPEVPQFPLNLERLQALQDLVHRSLEAGYISPWDGPGNNPVFPVRKPNGAWRFVHDLRATNALTKPIPALSPGPPDLTAIPTHPPHIICLDLKDAFFQIPVEDRFRFYLSFTLPSPGGLQPHRRFAWRVLPQGFINSPALFNRALQEPLRQVSAAFSQSLLVSYMDDILYASPTEEQRSQCYQALAARLRDLGFQVASEKTSQTPSPVPFLGQMVHEQIVTYQSLPTLQISSPISLHQLQAVLGDLQWVSRGTPTTRRPLQLLYSSLKRHHDPRAIIQLSPEQLQGIAELRQALSHNARSRYNEQEPLLAYVHLTRAGSTLVLFQKGAQFPLAYFQTPLTDNQASPWGLLLLLGCQYLQTQALSSYAKPILKYYHNLPKTSLDNWIQSSEDPRVQELLQLWPQISSQGIQPPGPWKTLITRAEVFLTPQFSPDPIPAALCLFSDGATGRGAYCLWKDHLLDFQAVPAPESAQKGELAGLLAGLAAAPPEPVNIWVDSKYLYSLLRTWVLGAWLQPDPVPSYALLYKSLLRHPAIVVGHVRSHSSASHPIASLNNYVDQLAGKRTADGSEFEKRTADGSEFESPKKKAKVE

SEQ ID NO: 190 - protein, 2123 aa, synthetic construct; identical to SEQ ID NO: 36

SEQ ID NO: 191 - protein, 2095 aa, synthetic construct
MPAAKRVKLDGGDKKYSIGLDIGTNSVGWAVITDEYKVPSKKFKVLGNTDRHSIKKNLIGALLFDSGETAEATRLKRTARRRYTRRKNRICYLQEIFSNEMAKVDDSFFHRLEESFLVEEDKKHERHPIFGNIVDEVAYHEKYPTIYHLRKKLVDSTDKADLRLIYLALAHMIKFRGHFLIEGDLNPDNSDVDKLFIQLVQTYNQLFEENPINASGVDAKAILSARLSKSRRLENLIAQLPGEKKNGLFGNLIALSLGLTPNFKSNFDLAEDAKLQLSKDTYDDDLDNLLAQIGDQYADLFLAAKNLSDAILLSDILRVNTEITKAPLSASMIKRYDEHHQDLTLLKALVRQQLPEKYKEIFFDQSKNGYAGYIDGGASQEEFYKFIKPILEKMDGTEELLVKLNREDLLRKQRTFDNGSIPHQIHLGELHAILRRQEDFYPFLKDNREKIEKILTFRIPYYVGPLARGNSRFAWMTRKSEETITPWNFEEVVDKGASAQSFIERMTNFDKNLPNEKVLPKHSLLYEYFTVYNELTKVKYVTEGMRKPAFLSGEQKKAIVDLLFKTNRKVTVKQLKEDYFKKIECFDSVEISGVEDRFNASLGTYHDLLKIIKDKDFLDNEENEDILEDIVLTLTLFEDREMIEERLKTYAHLFDDKVMKQLKRRRYTGWGRLSRKLINGIRDKQSGKTILDFLKSDGFANRNFMQLIHDDSLTFKEDIQKAQVSGQGDSLHEHIANLAGSPAIKKGILQTVKVVDELVKVMGRHKPENIVIEMARENQTTQKGQKNSRERMKRIEEGIKELGSQILKEHPVENTQLQNEKLYLYYLQNGRDMYVDQELDINRLSDYDVDHIVPQSFLKDDSIDNKVLTRSDKARGKSDNVPSEEVVKKMKNYWRQLLNAKLITQRKFDNLTKAERGGLSELDKAGFIKRQLVETRQITKHVAQILDSRMNTKYDENDKLIREVKVITLKSKLVSDFRKDFQFYKVREINNYHHAHDAYLNAVVGTALIKKYPKLESEFVYGDYKVYDVRKMIAKSEQEIGKATAKYFFYSNIMNFFKTEITLANGEIRKRPLIETNGETGEIVWDKGRDFATVRKVLSMPQVNIVKKTEVQTGGFSKESILPKRNSDKLIARKKDWDPKKYGGFDSPTVAYSVLVVAKVEKGKSKKLKSVKELLGITIMERSSFEKNPIDFLEAKGYKEVKKDLIIKLPKYSLFELENGRKRMLASAGELQKGNELALPSKYVNFLYLASHYEKLKGSPEDNEQKQLFVEQHKHYLDEIIEQISEFSKRVILADANLDKVLSAYNKHRDKPIREQAENIIHLFTLTNLGAPAAFKYFDTTIDRKRYTSTKEVLDATLIHQSITGLYETRIDLSQLGGDGGGGSGGSGGSGGSGGSGGSGGLDDEYRLYSPLVKPDQNIQFWLEQFPQAWAETAGMGLAKQVPPQVIQLKASATPVSVRQYPLSKEAQEGIRPHVQRLIQQGILVPVQSPWNTPLLPVRKPGTNDYRPVQDLREVNKRVQDIHPTVPNPYNLLCALPPQRSWYTVLDLKDAFFCLRLHPTSQPLFAFEWRDPGTGRTGQLTWTRLPQGFKNSPTIFNEALHRDLANFRIQHPQVTLLQYVDDLLLAGATKQDCLEGTKALLLELSDLGYRASAKKAQICRREVTYLGYSLRDGQRWLTEARKKTVVQIPAPTTAKQVREFLGKAGFCRLFIPGFATLAAPLYPLTKPKGEFSWAPEHQKAFDAIKKALLSAPALALPDVTKPFTLYVDERKGVARGVLTQTLGPWRRPVAYLSKKLDPVASGWPVCLKAIAAVAILVKDADKLTLGQNITVIAPHALENIVRQPPDRWMTNARMTHYQSLLLTERVTFAPPAALNPATLLPEETDEPVTHDCHQLLIEETGVRKDLTDIPLTGEVLTWFTDGSSYVVEGKRMAGAAVVDGTRTIWASSLPEGTSAQKAELMALTQALRLAEGKSINIYTDSRYAFATAHVHGAIYKQRGWLTSAGREIKNKEEILSLLEALHLPKRLAIIHCPGHQKAKDPISRGNQMADRVAKQAAQGVNLLPAGKRTADGSEFEKRTADGSEFESPKKKAKVE

SEQ ID NO: 192 - protein, 2088 aa, synthetic construct
MPAAKRVKLDGGDKKYSIGLDIGTNSVGWAVITDEYKVPSKKFKVLGNTDRHSIKKNLIGALLFDSGETAEATRLKRTARRRYTRRKNRICYLQEIFSNEMAKVDDSFFHRLEESFLVEEDKKHERHPIFGNIVDEVAYHEKYPTIYHLRKKLVDSTDKADLRLIYLALAHMIKFRGHFLIEGDLNPDNSDVDKLFIQLVQTYNQLFEENPINASGVDAKAILSARLSKSRRLENLIAQLPGEKKNGLFGNLIALSLGLTPNFKSNFDLAEDAKLQLSKDTYDDDLDNLLAQIGDQYADLFLAAKNLSDAILLSDILRVNTEITKAPLSASMIKRYDEHHQDLTLLKALVRQQLPEKYKEIFFDQSKNGYAGYIDGGASQEEFYKFIKPILEKMDGTEELLVKLNREDLLRKQRTFDNGSIPHQIHLGELHAILRRQEDFYPFLKDNREKIEKILTFRIPYYVGPLARGNSRFAWMTRKSEETITPWNFEEVVDKGASAQSFIERMTNFDKNLPNEKVLPKHSLLYEYFTVYNELTKVKYVTEGMRKPAFLSGEQKKAIVDLLFKTNRKVTVKQLKEDYFKKIECFDSVEISGVEDRFNASLGTYHDLLKIIKDKDFLDNEENEDILEDIVLTLTLFEDREMIEERLKTYAHLFDDKVMKQLKRRRYTGWGRLSRKLINGIRDKQSGKTILDFLKSDGFANRNFMQLIHDDSLTFKEDIQKAQVSGQGDSLHEHIANLAGSPAIKKGILQTVKVVDELVKVMGRHKPENIVIEMARENQTTQKGQKNSRERMKRIEEGIKELGSQILKEHPVENTQLQNEKLYLYYLQNGRDMYVDQELDINRLSDYDVDHIVPQSFLKDDSIDNKVLTRSDKARGKSDNVPSEEVVKKMKNYWRQLLNAKLITQRKFDNLTKAERGGLSELDKAGFIKRQLVETRQITKHVAQILDSRMNTKYDENDKLIREVKVITLKSKLVSDFRKDFQFYKVREINNYHHAHDAYLNAVVGTALIKKYPKLESEFVYGDYKVYDVRKMIAKSEQEIGKATAKYFFYSNIMNFFKTEITLANGEIRKRPLIETNGETGEIVWDKGRDFATVRKVLSMPQVNIVKKTEVQTGGFSKESILPKRNSDKLIARKKDWDPKKYGGFDSPTVAYSVLVVAKVEKGKSKKLKSVKELLGITIMERSSFEKNPIDFLEAKGYKEVKKDLIIKLPKYSLFELENGRKRMLASAGELQKGNELALPSKYVNFLYLASHYEKLKGSPEDNEQKQLFVEQHKHYLDEIIEQISEFSKRVILADANLDKVLSAYNKHRDKPIREQAENIIHLFTLTNLGAPAAFKYFDTTIDRKRYTSTKEVLDATLIHQSITGLYETRIDLSQLGGDGGPAPEAAAKGGGGGLDDEYRLYSPLVKPDQNIQFWLEQFPQAWAETAGMGLAKQVPPQVIQLKASATPVSVRQYPLSKEAQEGIRPHVQRLIQQGILVPVQSPWNTPLLPVRKPGTNDYRPVQDLREVNKRVQDIHPTVPNPYNLLCALPPQRSWYTVLDLKDAFFCLRLHPTSQPLFAFEWRDPGTGRTGQLTWTRLPQGFKNSPTIFNEALHRDLANFRIQHPQVTLLQYVDDLLLAGATKQDCLEGTKALLLELSDLGYRASAKKAQICRREVTYLGYSLRDGQRWLTEARKKTVVQIPAPTTAKQVREFLGKAGFCRLFIPGFATLAAPLYPLTKPKGEFSWAPEHQKAFDAIKKALLSAPALALPDVTKPFTLYVDERKGVARGVLTQTLGPWRRPVAYLSKKLDPVASGWPVCLKAIAAVAILVKDADKLTLGQNITVIAPHALENIVRQPPDRWMTNARMTHYQSLLLTERVTFAPPAALNPATLLPEETDEPVTHDCHQLLIEETGVRKDLTDIPLTGEVLTWFTDGSSYVVEGKRMAGAAVVDGTRTIWASSLPEGTSAQKAELMALTQALRLAEGKSINIYTDSRYAFATAHVHGAIYKQRGWLTSAGREIKNKEEILSLLEALHLPKRLAIIHCPGHQKAKDPISRGNQMADRVAKQAAQGVNLLPAGKRTADGSEFEKRTADGSEFESPKKKAKVE

SEQ ID NO: 193 - protein, 2107 aa, synthetic construct
MPAAKRVKLDGGDKKYSIGLDIGTNSVGWAVITDEYKVPSKKFKVLGNTDRHSIKKNLIGALLFDSGETAEATRLKRTARRRYTRRKNRICYLQEIFSNEMAKVDDSFFHRLEESFLVEEDKKHERHPIFGNIVDEVAYHEKYPTIYHLRKKLVDSTDKADLRLIYLALAHMIKFRGHFLIEGDLNPDNSDVDKLFIQLVQTYNQLFEENPINASGVDAKAILSARLSKSRRLENLIAQLPGEKKNGLFGNLIALSLGLTPNFKSNFDLAEDAKLQLSKDTYDDDLDNLLAQIGDQYADLFLAAKNLSDAILLSDILRVNTEITKAPLSASMIKRYDEHHQDLTLLKALVRQQLPEKYKEIFFDQSKNGYAGYIDGGASQEEFYKFIKPILEKMDGTEELLVKLNREDLLRKQRTFDNGSIPHQIHLGELHAILRRQEDFYPFLKDNREKIEKILTFRIPYYVGPLARGNSRFAWMTRKSEETITPWNFEEVVDKGASAQSFIERMTNFDKNLPNEKVLPKHSLLYEYFTVYNELTKVKYVTEGMRKPAFLSGEQKKAIVDLLFKTNRKVTVKQLKEDYFKKIECFDSVEISGVEDRFNASLGTYHDLLKIIKDKDFLDNEENEDILEDIVLTLTLFEDREMIEERLKTYAHLFDDKVMKQLKRRRYTGWGRLSRKLINGIRDKQSGKTILDFLKSDGFANRNFMQLIHDDSLTFKEDIQKAQVSGQGDSLHEHIANLAGSPAIKKGILQTVKVVDELVKVMGRHKPENIVIEMARENQTTQKGQKNSRERMKRIEEGIKELGSQILKEHPVENTQLQNEKLYLYYLQNGRDMYVDQELDINRLSDYDVDHIVPQSFLKDDSIDNKVLTRSDKARGKSDNVPSEEVVKKMKNYWRQLLNAKLITQRKFDNLTKAERGGLSELDKAGFIKRQLVETRQITKHVAQILDSRMNTKYDENDKLIREVKVITLKSKLVSDFRKDFQFYKVREINNYHHAHDAYLNAVVGTALIKKYPKLESEFVYGDYKVYDVRKMIAKSEQEIGKATAKYFFYSNIMNFFKTEITLANGEIRKRPLIETNGETGEIVWDKGRDFATVRKVLSMPQVNIVKKTEVQTGGFSKESILPKRNSDKLIARKKDWDPKKYGGFDSPTVAYSVLVVAKVEKGKSKKLKSVKELLGITIMERSSFEKNPIDFLEAKGYKEVKKDLIIKLPKYSLFELENGRKRMLASAGELQKGNELALPSKYVNFLYLASHYEKLKGSPEDNEQKQLFVEQHKHYLDEIIEQISEFSKRVILADANLDKVLSAYNKHRDKPIREQAENIIHLFTLTNLGAPAAFKYFDTTIDRKRYTSTKEVLDATLIHQSITGLYETRIDLSQLGGDGGEAAAKEAAAKEAAAKEAAAKEAAAKEAAAKGGLDDEYRLYSPLVKPDQNIQFWLEQFPQAWAETAGMGLAKQVPPQVIQLKASATPVSVRQYPLSKEAQEGIRPHVQRLIQQGILVPVQSPWNTPLLPVRKPGTNDYRPVQDLREVNKRVQDIHPTVPNPYNLLCALPPQRSWYTVLDLKDAFFCLRLHPTSQPLFAFEWRDPGTGRTGQLTWTRLPQGFKNSPTIFNEALHRDLANFRIQHPQVTLLQYVDDLLLAGATKQDCLEGTKALLLELSDLGYRASAKKAQICRREVTYLGYSLRDGQRWLTEARKKTVVQIPAPTTAKQVREFLGKAGFCRLFIPGFATLAAPLYPLTKPKGEFSWAPEHQKAFDAIKKALLSAPALALPDVTKPFTLYVDERKGVARGVLTQTLGPWRRPVAYLSKKLDPVASGWPVCLKAIAAVAILVKDADKLTLGQNITVIAPHALENIVRQPPDRWMTNARMTHYQSLLLTERVTFAPPAALNPATLLPEETDEPVTHDCHQLLIEETGVRKDLTDIPLTGEVLTWFTDGSSYVVEGKRMAGAAVVDGTRTIWASSLPEGTSAQKAELMALTQALRLAEGKSINIYTDSRYAFATAHVHGAIYKQRGWLTSAGREIKNKEEILSLLEALHLPKRLAIIHCPGHQKAKDPISRGNQMADRVAKQAAQGVNLLPAGKRTADGSEFEKRTADGSEFESPKKKAKVE

SEQ ID NO: 194 - protein, 2090 aa, synthetic construct; identical to SEQ ID NO: 54

SEQ ID NO: 195 - protein, 2088 aa, synthetic construct; identical to SEQ ID NO: 35

SEQ ID NO: 196 - protein, 2093 aa, synthetic construct; identical to SEQ ID NO: 90

SEQ ID NO: 197 - protein, 2086 aa, synthetic construct
MPAAKRVKLDGGDKKYSIGLDIGTNSVGWAVITDEYKVPSKKFKVLGNTDRHSIKKNLIGALLFDSGETAEATRLKRTARRRYTRRKNRICYLQEIFSNEMAKVDDSFFHRLEESFLVEEDKKHERHPIFGNIVDEVAYHEKYPTIYHLRKKLVDSTDKADLRLIYLALAHMIKFRGHFLIEGDLNPDNSDVDKLFIQLVQTYNQLFEENPINASGVDAKAILSARLSKSRRLENLIAQLPGEKKNGLFGNLIALSLGLTPNFKSNFDLAEDAKLQLSKDTYDDDLDNLLAQIGDQYADLFLAAKNLSDAILLSDILRVNTEITKAPLSASMIKRYDEHHQDLTLLKALVRQQLPEKYKEIFFDQSKNGYAGYIDGGASQEEFYKFIKPILEKMDGTEELLVKLNREDLLRKQRTFDNGSIPHQIHLGELHAILRRQEDFYPFLKDNREKIEKILTFRIPYYVGPLARGNSRFAWMTRKSEETITPWNFEEVVDKGASAQSFIERMTNFDKNLPNEKVLPKHSLLYEYFTVYNELTKVKYVTEGMRKPAFLSGEQKKAIVDLLFKTNRKVTVKQLKEDYFKKIECFDSVEISGVEDRFNASLGTYHDLLKIIKDKDFLDNEENEDILEDIVLTLTLFEDREMIEERLKTYAHLFDDKVMKQLKRRRYTGWGRLSRKLINGIRDKQSGKTILDFLKSDGFANRNFMQLIHDDSLTFKEDIQKAQVSGQGDSLHEHIANLAGSPAIKKGILQTVKVVDELVKVMGRHKPENIVIEMARENQTTQKGQKNSRERMKRIEEGIKELGSQILKEHPVENTQLQNEKLYLYYLQNGRDMYVDQELDINRLSDYDVDHIVPQSFLKDDSIDNKVLTRSDKARGKSDNVPSEEVVKKMKNYWRQLLNAKLITQRKFDNLTKAERGGLSELDKAGFIKRQLVETRQITKHVAQILDSRMNTKYDENDKLIREVKVITLKSKLVSDFRKDFQFYKVREINNYHHAHDAYLNAVVGTALIKKYPKLESEFVYGDYKVYDVRKMIAKSEQEIGKATAKYFFYSNIMNFFKTEITLANGEIRKRPLIETNGETGEIVWDKGRDFATVRKVLSMPQVNIVKKTEVQTGGFSKESILPKRNSDKLIARKKDWDPKKYGGFDSPTVAYSVLVVAKVEKGKSKKLKSVKELLGITIMERSSFEKNPIDFLEAKGYKEVKKDLIIKLPKYSLFELENGRKRMLASAGELQKGNELALPSKYVNFLYLASHYEKLKGSPEDNEQKQLFVEQHKHYLDEIIEQISEFSKRVILADANLDKVLSAYNKHRDKPIREQAENIIHLFTLTNLGAPAAFKYFDTTIDRKRYTSTKEVLDATLIHQSITGLYETRIDLSQLGGDGGGGGGGSPAPGGLDDEYRLYSPLVKPDQNIQFWLEQFPQAWAETAGMGLAKQVPPQVIQLKASATPVSVRQYPLSKEAQEGIRPHVQRLIQQGILVPVQSPWNTPLLPVRKPGTNDYRPVQDLREVNKRVQDIHPTVPNPYNLLCALPPQRSWYTVLDLKDAFFCLRLHPTSQPLFAFEWRDPGTGRTGQLTWTRLPQGFKNSPTIFNEALHRDLANFRIQHPQVTLLQYVDDLLLAGATKQDCLEGTKALLLELSDLGYRASAKKAQICRREVTYLGYSLRDGQRWLTEARKKTVVQIPAPTTAKQVREFLGKAGFCRLFIPGFATLAAPLYPLTKPKGEFSWAPEHQKAFDAIKKALLSAPALALPDVTKPFTLYVDERKGVARGVLTQTLGPWRRPVAYLSKKLDPVASGWPVCLKAIAAVAILVKDADKLTLGQNITVIAPHALENIVRQPPDRWMTNARMTHYQSLLLTERVTFAPPAALNPATLLPEETDEPVTHDCHQLLIEETGVRKDLTDIPLTGEVLTWFTDGSSYVVEGKRMAGAAVVDGTRTIWASSLPEGTSAQKAELMALTQALRLAEGKSINIYTDSRYAFATAHVHGAIYKQRGWLTSAGREIKNKEEILSLLEALHLPKRLAIIHCPGHQKAKDPISRGNQMADRVAKQAAQGVNLLPAGKRTADGSEFEKRTADGSEFESPKKKAKVE

SEQ ID NO: 198 - protein, 2086 aa, synthetic construct; identical to SEQ ID NO: 58

SEQ ID NO: 199 - protein, 2088 aa, synthetic construct; identical to SEQ ID NO: 40

SEQ ID NO: 200 - protein, 2088 aa, synthetic construct; identical to SEQ ID NO: 63

SEQ ID NO: 201 - protein, 2089 aa, synthetic construct; identical to SEQ ID NO: 74

SEQ ID NO: 202 - protein, 2092 aa, synthetic construct
MPAAKRVKLDGGDKKYSIGLDIGTNSVGWAVITDEYKVPSKKFKVLGNTDRHSIKKNLIGALLFDSGETAEATRLKRTARRRYTRRKNRICYLQEIFSNEMAKVDDSFFHRLEESFLVEEDKKHERHPIFGNIVDEVAYHEKYPTIYHLRKKLVDSTDKADLRLIYLALAHMIKFRGHFLIEGDLNPDNSDVDKLFIQLVQTYNQLFEENPINASGVDAKAILSARLSKSRRLENLIAQLPGEKKNGLFGNLIALSLGLTPNFKSNFDLAEDAKLQLSKDTYDDDLDNLLAQIGDQYADLFLAAKNLSDAILLSDILRVNTEITKAPLSASMIKRYDEHHQDLTLLKALVRQQLPEKYKEIFFDQSKNGYAGYIDGGASQEEFYKFIKPILEKMDGTEELLVKLNREDLLRKQRTFDNGSIPHQIHLGELHAILRRQEDFYPFLKDNREKIEKILTFRIPYYVGPLARGNSRFAWMTRKSEETITPWNFEEVVDKGASAQSFIERMTNFDKNLPNEKVLPKHSLLYEYFTVYNELTKVKYVTEGMRKPAFLSGEQKKAIVDLLFKTNRKVTVKQLKEDYFKKIECFDSVEISGVEDRFNASLGTYHDLLKIIKDKDFLDNEENEDILEDIVLTLTLFEDREMIEERLKTYAHLFDDKVMKQLKRRRYTGWGRLSRKLINGIRDKQSGKTILDFLKSDGFANRNFMQLIHDDSLTFKEDIQKAQVSGQGDSLHEHIANLAGSPAIKKGILQTVKVVDELVKVMGRHKPENIVIEMARENQTTQKGQKNSRERMKRIEEGIKELGSQILKEHPVENTQLQNEKLYLYYLQNGRDMYVDQELDINRLSDYDVDHIVPQSFLKDDSIDNKVLTRSDKARGKSDNVPSEEVVKKMKNYWRQLLNAKLITQRKFDNLTKAERGGLSELDKAGFIKRQLVETRQITKHVAQILDSRMNTKYDENDKLIREVKVITLKSKLVSDFRKDFQFYKVREINNYHHAHDAYLNAVVGTALIKKYPKLESEFVYGDYKVYDVRKMIAKSEQEIGKATAKYFFYSNIMNFFKTEITLANGEIRKRPLIETNGETGEIVWDKGRDFATVRKVLSMPQVNIVKKTEVQTGGFSKESILPKRNSDKLIARKKDWDPKKYGGFDSPTVAYSVLVVAKVEKGKSKKLKSVKELLGITIMERSSFEKNPIDFLEAKGYKEVKKDLIIKLPKYSLFELENGRKRMLASAGELQKGNELALPSKYVNFLYLASHYEKLKGSPEDNEQKQLFVEQHKHYLDEIIEQISEFSKRVILADANLDKVLSAYNKHRDKPIREQAENIIHLFTLTNLGAPAAFKYFDTTIDRKRYTSTKEVLDATLIHQSITGLYETRIDLSQLGGDGGGSSGSSGSSGSSGSSGGLDDEYRLYSPLVKPDQNIQFWLEQFPQAWAETAGMGLAKQVPPQVIQLKASATPVSVRQYPLSKEAQEGIRPHVQRLIQQGILVPVQSPWNTPLLPVRKPGTNDYRPVQDLREVNKRVQDIHPTVPNPYNLLCALPPQRSWYTVLDLKDAFFCLRLHPTSQPLFAFEWRDPGTGRTGQLTWTRLPQGFKNSPTIFNEALHRDLANFRIQHPQVTLLQYVDDLLLAGATKQDCLEGTKALLLELSDLGYRASAKKAQICRREVTYLGYSLRDGQRWLTEARKKTVVQIPAPTTAKQVREFLGKAGFCRLFIPGFATLAAPLYPLTKPKGEFSWAPEHQKAFDAIKKALLSAPALALPDVTKPFTLYVDERKGVARGVLTQTLGPWRRPVAYLSKKLDPVASGWPVCLKAIAAVAILVKDADKLTLGQNITVIAPHALENIVRQPPDRWMTNARMTHYQSLLLTERVTFAPPAALNPATLLPEETDEPVTHDCHQLLIEETGVRKDLTDIPLTGEVLTWFTDGSSYVVEGKRMAGAAVVDGTRTIWASSLPEGTSAQKAELMALTQALRLAEGKSINIYTDSRYAFATAHVHGAIYKQRGWLTSAGREIKNKEEILSLLEALHLPKRLAIIHCPGHQKAKDPISRGNQMADRVAKQAAQGVNLLPAGKRTADGSEFEKRTADGSEFESPKKKAKVE

SEQ ID NO: 203 - protein, 2083 aa, synthetic construct; identical to SEQ ID NO: 76

SEQ ID NO: 204 - protein, 2088 aa, synthetic construct; identical to SEQ ID NO: 71

SEQ ID NO: 205 - protein, 2086 aa, synthetic construct; identical to SEQ ID NO: 73

SEQ ID NO: 206 - protein, 2085 aa, synthetic construct; identical to SEQ ID NO: 57

SEQ ID NO: 207 - protein, 2086 aa, synthetic construct; identical to SEQ ID NO: 43

SEQ ID NO: 208 - protein, 2086 aa, synthetic construct
MPAAKRVKLDGGDKKYSIGLDIGTNSVGWAVITDEYKVPSKKFKVLGNTDRHSIKKNLIGALLFDSGETAEATRLKRTARRRYTRRKNRICYLQEIFSNEMAKVDDSFFHRLEESFLVEEDKKHERHPIFGNIVDEVAYHEKYPTIYHLRKKLVDSTDKADLRLIYLALAHMIKFRGHFLIEGDLNPDNSDVDKLFIQLVQTYNQLFEENPINASGVDAKAILSARLSKSRRLENLIAQLPGEKKNGLFGNLIALSLGLTPNFKSNFDLAEDAKLQLSKDTYDDDLDNLLAQIGDQYADLFLAAKNLSDAILLSDILRVNTEITKAPLSASMIKRYDEHHQDLTLLKALVRQQLPEKYKEIFFDQSKNGYAGYIDGGASQEEFYKFIKPILEKMDGTEELLVKLNREDLLRKQRTFDNGSIPHQIHLGELHAILRRQEDFYPFLKDNREKIEKILTFRIPYYVGPLARGNSRFAWMTRKSEETITPWNFEEVVDKGASAQSFIERMTNFDKNLPNEKVLPKHSLLYEYFTVYNELTKVKYVTEGMRKPAFLSGEQKKAIVDLLFKTNRKVTVKQLKEDYFKKIECFDSVEISGVEDRFNASLGTYHDLLKIIKDKDFLDNEENEDILEDIVLTLTLFEDREMIEERLKTYAHLFDDKVMKQLKRRRYTGWGRLSRKLINGIRDKQSGKTILDFLKSDGFANRNFMQLIHDDSLTFKEDIQKAQVSGQGDSLHEHIANLAGSPAIKKGILQTVKVVDELVKVMGRHKPENIVIEMARENQTTQKGQKNSRERMKRIEEGIKELGSQILKEHPVENTQLQNEKLYLYYLQNGRDMYVDQELDINRLSDYDVDHIVPQSFLKDDSIDNKVLTRSDKARGKSDNVPSEEVVKKMKNYWRQLLNAKLITQRKFDNLTKAERGGLSELDKAGFIKRQLVETRQITKHVAQILDSRMNTKYDENDKLIREVKVITLKSKLVSDFRKDFQFYKVREINNYHHAHDAYLNAVVGTALIKKYPKLESEFVYGDYKVYDVRKMIAKSEQEIGKATAKYFFYSNIMNFFKTEITLANGEIRKRPLIETNGETGEIVWDKGRDFATVRKVLSMPQVNIVKKTEVQTGGFSKESILPKRNSDKLIARKKDWDPKKYGGFDSPTVAYSVLVVAKVEKGKSKKLKSVKELLGITIMERSSFEKNPIDFLEAKGYKEVKKDLIIKLPKYSLFELENGRKRMLASAGELQKGNELALPSKYVNFLYLASHYEKLKGSPEDNEQKQLFVEQHKHYLDEIIEQISEFSKRVILADANLDKVLSAYNKHRDKPIREQAENIIHLFTLTNLGAPAAFKYFDTTIDRKRYTSTKEVLDATLIHQSITGLYETRIDLSQLGGDGGGSSGSSGSSGGLDDEYRLYSPLVKPDQNIQFWLEQFPQAWAETAGMGLAKQVPPQVIQLKASATPVSVRQYPLSKEAQEGIRPHVQRLIQQGILVPVQSPWNTPLLPVRKPGTNDYRPVQDLREVNKRVQDIHPTVPNPYNLLCALPPQRSWYTVLDLKDAFFCLRLHPTSQPLFAFEWRDPGTGRTGQLTWTRLPQGFKNSPTIFNEALHRDLANFRIQHPQVTLLQYVDDLLLAGATKQDCLEGTKALLLELSDLGYRASAKKAQICRREVTYLGYSLRDGQRWLTEARKKTVVQIPAPTTAKQVREFLGKAGFCRLFIPGFATLAAPLYPLTKPKGEFSWAPEHQKAFDAIKKALLSAPALALPDVTKPFTLYVDERKGVARGVLTQTLGPWRRPVAYLSKKLDPVASGWPVCLKAIAAVAILVKDADKLTLGQNITVIAPHALENIVRQPPDRWMTNARMTHYQSLLLTERVTFAPPAALNPATLLPEETDEPVTHDCHQLLIEETGVRKDLTDIPLTGEVLTWFTDGSSYVVEGKRMAGAAVVDGTRTIWASSLPEGTSAQKAELMALTQALRLAEGKSINIYTDSRYAFATAHVHGAIYKQRGWLTSAGREIKNKEEILSLLEALHLPKRLAIIHCPGHQKAKDPISRGNQMADRVAKQAAQGVNLLPAGKRTADGSEFEKRTADGSEFESPKKKAKVE

SEQ ID NO: 209 - protein, 2088 aa, synthetic construct
MPAAKRVKLDGGDKKYSIGLDIGTNSVGWAVITDEYKVPSKKFKVLGNTDRHSIKKNLIGALLFDSGETAEATRLKRTARRRYTRRKNRICYLQEIFSNEMAKVDDSFFHRLEESFLVEEDKKHERHPIFGNIVDEVAYHEKYPTIYHLRKKLVDSTDKADLRLIYLALAHMIKFRGHFLIEGDLNPDNSDVDKLFIQLVQTYNQLFEENPINASGVDAKAILSARLSKSRRLENLIAQLPGEKKNGLFGNLIALSLGLTPNFKSNFDLAEDAKLQLSKDTYDDDLDNLLAQIGDQYADLFLAAKNLSDAILLSDILRVNTEITKAPLSASMIKRYDEHHQDLTLLKALVRQQLPEKYKEIFFDQSKNGYAGYIDGGASQEEFYKFIKPILEKMDGTEELLVKLNREDLLRKQRTFDNGSIPHQIHLGELHAILRRQEDFYPFLKDNREKIEKILTFRIPYYVGPLARGNSRFAWMTRKSEETITPWNFEEVVDKGASAQSFIERMTNFDKNLPNEKVLPKHSLLYEYFTVYNELTKVKYVTEGMRKPAFLSGEQKKAIVDLLFKTNRKVTVKQLKEDYFKKIECFDSVEISGVEDRFNASLGTYHDLLKIIKDKDFLDNEENEDILEDIVLTLTLFEDREMIEERLKTYAHLFDDKVMKQLKRRRYTGWGRLSRKLINGIRDKQSGKTILDFLKSDGFANRNFMQLIHDDSLTFKEDIQKAQVSGQGDSLHEHIANLAGSPAIKKGILQTVKVVDELVKVMGRHKPENIVIEMARENQTTQKGQKNSRERMKRIEEGIKELGSQILKEHPVENTQLQNEKLYLYYLQNGRDMYVDQELDINRLSDYDVDHIVPQSFLKDDSIDNKVLTRSDKARGKSDNVPSEEVVKKMKNYWRQLLNAKLITQRKFDNLTKAERGGLSELDKAGFIKRQLVETRQITKHVAQILDSRMNTKYDENDKLIREVKVITLKSKLVSDFRKDFQFYKVREINNYHHAHDAYLNAVVGTALIKKYPKLESEFVYGDYKVYDVRKMIAKSEQEIGKATAKYFFYSNIMNFFKTEITLANGEIRKRPLIETNGETGEIVWDKGRDFATVRKVLSMPQVNIVKKTEVQTGGFSKESILPKRNSDKLIARKKDWDPKKYGGFDSPTVAYSVLVVAKVEKGKSKKLKSVKELLGITIMERSSFEKNPIDFLEAKGYKEVKKDLIIKLPKYSLFELENGRKRMLASAGELQKGNELALPSKYVNFLYLASHYEKLKGSPEDNEQKQLFVEQHKHYLDEIIEQISEFSKRVILADANLDKVLSAYNKHRDKPIREQAENIIHLFTLTNLGAPAAFKYFDTTIDRKRYTSTKEVLDATLIHQSITGLYETRIDLSQLGGDGGGSSEAAAKPAPGGLDDEYRLYSPLVKPDQNIQFWLEQFPQAWAETAGMGLAKQVPPQVIQLKASATPVSVRQYPLSKEAQEGIRPHVQRLIQQGILVPVQSPWNTPLLPVRKPGTNDYRPVQDLREVNKRVQDIHPTVPNPYNLLCALPPQRSWYTVLDLKDAFFCLRLHPTSQPLFAFEWRDPGTGRTGQLTWTRLPQGFKNSPTIFNEALHRDLANFRIQHPQVTLLQYVDDLLLAGATKQDCLEGTKALLLELSDLGYRASAKKAQICRREVTYLGYSLRDGQRWLTEARKKTVVQIPAPTTAKQVREFLGKAGFCRLFIPGFATLAAPLYPLTKPKGEFSWAPEHQKAFDAIKKALLSAPALALPDVTKPFTLYVDERKGVARGVLTQTLGPWRRPVAYLSKKLDPVASGWPVCLKAIAAVAILVKDADKLTLGQNITVIAPHALENIVRQPPDRWMTNARMTHYQSLLLTERVTFAPPAALNPATLLPEETDEPVTHDCHQLLIEETGVRKDLTDIPLTGEVLTWFTDGSSYVVEGKRMAGAAVVDGTRTIWASSLPEGTSAQKAELMALTQALRLAEGKSINIYTDSRYAFATAHVHGAIYKQRGWLTSAGREIKNKEEILSLLEALHLPKRLAIIHCPGHQKAKDPISRGNQMADRVAKQAAQGVNLLPAGKRTADGSEFEKRTADGSEFESPKKKAKVE

SEQ ID NO: 210 - protein, 2086 aa, synthetic construct; identical to SEQ ID NO: 89

SEQ ID NO: 211 - protein, 2088 aa, synthetic construct; identical to SEQ ID NO: 42

SEQ ID NO: 212 - protein, 2083 aa, synthetic construct
MPAAKRVKLDGGDKKYSIGLDIGTNSVGWAVITDEYKVPSKKFKVLGNTDRHSIKKNLIGALLFDSGETAEATRLKRTARRRYTRRKNRICYLQEIFSNEMAKVDDSFFHRLEESFLVEEDKKHERHPIFGNIVDEVAYHEKYPTIYHLRKKLVDSTDKADLRLIYLALAHMIKFRGHFLIEGDLNPDNSDVDKLFIQLVQTYNQLFEENPINASGVDAKAILSARLSKSRRLENLIAQLPGEKKNGLFGNLIALSLGLTPNFKSNFDLAEDAKLQLSKDTYDDDLDNLLAQIGDQYADLFLAAKNLSDAILLSDILRVNTEITKAPLSASMIKRYDEHHQDLTLLKALVRQQLPEKYKEIFFDQSKNGYAGYIDGGASQEEFYKFIKPILEKMDGTEELLVKLNREDLLRKQRTFDNGSIPHQIHLGELHAILRRQEDFYPFLKDNREKIEKILTFRIPYYVGPLARGNSRFAWMTRKSEETITPWNFEEVVDKGASAQSFIERMTNFDKNLPNEKVLPKHSLLYEYFTVYNELTKVKYVTEGMRKPAFLSGEQKKAIVDLLFKTNRKVTVKQLKEDYFKKIECFDSVEISGVEDRFNASLGTYHDLLKIIKDKDFLDNEENEDILEDIVLTLTLFEDREMIEERLKTYAHLFDDKVMKQLKRRRYTGWGRLSRKLINGIRDKQSGKTILDFLKSDGFANRNFMQLIHDDSLTFKEDIQKAQVSGQGDSLHEHIANLAGSPAIKKGILQTVKVVDELVKVMGRHKPENIVIEMARENQTTQKGQKNSRERMKRIEEGIKELGSQILKEHPVENTQLQNEKLYLYYLQNGRDMYVDQELDINRLSDYDVDHIVPQSFLKDDSIDNKVLTRSDKARGKSDNVPSEEVVKKMKNYWRQLLNAKLITQRKFDNLTKAERGGLSELDKAGFIKRQLVETRQITKHVAQILDSRMNTKYDENDKLIREVKVITLKSKLVSDFRKDFQFYKVREINNYHHAHDAYLNAVVGTALIKKYPKLESEFVYGDYKVYDVRKMIAKSEQEIGKATAKYFFYSNIMNFFKTEITLANGEIRKRPLIETNGETGEIVWDKGRDFATVRKVLSMPQVNIVKKTEVQTGGFSKESILPKRNSDKLIARKKDWDPKKYGGFDSPTVAYSVLVVAKVEKGKSKKLKSVKELLGITIMERSSFEKNPIDFLEAKGYKEVKKDLIIKLPKYSLFELENGRKRMLASAGELQKGNELALPSKYVNFLYLASHYEKLKGSPEDNEQKQLFVEQHKHYLDEIIEQISEFSKRVILADANLDKVLSAYNKHRDKPIREQAENIIHLFTLTNLGAPAAFKYFDTTIDRKRYTSTKEVLDATLIHQSITGLYETRIDLSQLGGDGGGGSGSSGGLDDEYRLYSPLVKPDQNIQFWLEQFPQAWAETAGMGLAKQVPPQVIQLKASATPVSVRQYPLSKEAQEGIRPHVQRLIQQGILVPVQSPWNTPLLPVRKPGTNDYRPVQDLREVNKRVQDIHPTVPNPYNLLCALPPQRSWYTVLDLKDAFFCLRLHPTSQPLFAFEWRDPGTGRTGQLTWTRLPQGFKNSPTIFNEALHRDLANFRIQHPQVTLLQYVDDLLLAGATKQDCLEGTKALLLELSDLGYRASAKKAQICRREVTYLGYSLRDGQRWLTEARKKTVVQIPAPTTAKQVREFLGKAGFCRLFIPGFATLAAPLYPLTKPKGEFSWAPEHQKAFDAIKKALLSAPALALPDVTKPFTLYVDERKGVARGVLTQTLGPWRRPVAYLSKKLDPVASGWPVCLKAIAAVAILVKDADKLTLGQNITVIAPHALENIVRQPPDRWMTNARMTHYQSLLLTERVTFAPPAALNPATLLPEETDEPVTHDCHQLLIEETGVRKDLTDIPLTGEVLTWFTDGSSYVVEGKRMAGAAVVDGTRTIWASSLPEGTSAQKAELMALTQALRLAEGKSINIYTDSRYAFATAHVHGAIYKQRGWLTSAGREIKNKEEILSLLEALHLPKRLAIIHCPGHQKAKDPISRGNQMADRVAKQAAQGVNLLPAGKRTADGSEFEKRTADGSEFESPKKKAKVE

SEQ ID NO: 213 - protein, 2086 aa, synthetic construct
MPAAKRVKLDGGDKKYSIGLDIGTNSVGWAVITDEYKVPSKKFKVLGNTDRHSIKKNLIGALLFDSGETAEATRLKRTARRRYTRRKNRICYLQEIFSNEMAKVDDSFFHRLEESFLVEEDKKHERHPIFGNIVDEVAYHEKYPTIYHLRKKLVDSTDKADLRLIYLALAHMIKFRGHFLIEGDLNPDNSDVDKLFIQLVQTYNQLFEENPINASGVDAKAILSARLSKSRRLENLIAQLPGEKKNGLFGNLIALSLGLTPNFKSNFDLAEDAKLQLSKDTYDDDLDNLLAQIGDQYADLFLAAKNLSDAILLSDILRVNTEITKAPLSASMIKRYDEHHQDLTLLKALVRQQLPEKYKEIFFDQSKNGYAGYIDGGASQEEFYKFIKPILEKMDGTEELLVKLNREDLLRKQRTFDNGSIPHQIHLGELHAILRRQEDFYPFLKDNREKIEKILTFRIPYYVGPLARGNSRFAWMTRKSEETITPWNFEEVVDKGASAQSFIERMTNFDKNLPNEKVLPKHSLLYEYFTVYNELTKVKYVTEGMRKPAFLSGEQKKAIVDLLFKTNRKVTVKQLKEDYFKKIECFDSVEISGVEDRFNASLGTYHDLLKIIKDKDFLDNEENEDILEDIVLTLTLFEDREMIEERLKTYAHLFDDKVMKQLKRRRYTGWGRLSRKLINGIRDKQSGKTILDFLKSDGFANRNFMQLIHDDSLTFKEDIQKAQVSGQGDSLHEHIANLAGSPAIKKGILQTVKVVDELVKVMGRHKPENIVIEMARENQTTQKGQKNSRERMKRIEEGIKELGSQILKEHPVENTQLQNEKLYLYYLQNGRDMYVDQELDINRLSDYDVDHIVPQSFLKDDSIDNKVLTRSDKARGKSDNVPSEEVVKKMKNYWRQLLNAKLITQRKFDNLTKAERGGLSELDKAGFIKRQLVETRQITKHVAQILDSRMNTKYDENDKLIREVKVITLKSKLVSDFRKDFQFYKVREINNYHHAHDAYLNAVVGTALIKKYPKLESEFVYGDYKVYDVRKMIAKSEQEIGKATAKYFFYSNIMNFFKTEITLANGEIRKRPLIETNGETGEIVWDKGRDFATVRKVLSMPQVNIVKKTEVQTGGFSKESILPKRNSDKLIARKKDWDPKKYGGFDSPTVAYSVLVVAKVEKGKSKKLKSVKELLGITIMERSSFEKNPIDFLEAKGYKEVKKDLIIKLPKYSLFELENGRKRMLASAGELQKGNELALPSKYVNFLYLASHYEKLKGSPEDNEQKQLFVEQHKHYLDEIIEQISEFSKRVILADANLDKVLSAYNKHRDKPIREQAENIIHLFTLTNLGAPAAFKYFDTTIDRKRYTSTKEVLDATLIHQSITGLYETRIDLSQLGGDGGGGSGGGPAPGGLDDEYRLYSPLVKPDQNIQFWLEQFPQAWAETAGMGLAKQVPPQVIQLKASATPVSVRQYPLSKEAQEGIRPHVQRLIQQGILVPVQSPWNTPLLPVRKPGTNDYRPVQDLREVNKRVQDIHPTVPNPYNLLCALPPQRSWYTVLDLKDAFFCLRLHPTSQPLFAFEWRDPGTGRTGQLTWTRLPQGFKNSPTIFNEALHRDLANFRIQHPQVTLLQYVDDLLLAGATKQDCLEGTKALLLELSDLGYRASAKKAQICRREVTYLGYSLRDGQRWLTEARKKTVVQIPAPTTAKQVREFLGKAGFCRLFIPGFATLAAPLYPLTKPKGEFSWAPEHQKAFDAIKKALLSAPALALPDVTKPFTLYVDERKGVARGVLTQTLGPWRRPVAYLSKKLDPVASGWPVCLKAIAAVAILVKDADKLTLGQNITVIAPHALENIVRQPPDRWMTNARMTHYQSLLLTERVTFAPPAALNPATLLPEETDEPVTHDCHQLLIEETGVRKDLTDIPLTGEVLTWFTDGSSYVVEGKRMAGAAVVDGTRTIWASSLPEGTSAQKAELMALTQALRLAEGKSINIYTDSRYAFATAHVHGAIYKQRGWLTSAGREIKNKEEILSLLEALHLPKRLAIIHCPGHQKAKDPISRGNQMADRVAKQAAQGVNLLPAGKRTADGSEFEKRTADGSEFESPKKKAKVE

SEQ ID NO: 214 - protein, 2095 aa, synthetic construct
MPAAKRVKLDGGDKKYSIGLDIGTNSVGWAVITDEYKVPSKKFKVLGNTDRHSIKKNLIGALLFDSGETAEATRLKRTARRRYTRRKNRICYLQEIFSNEMAKVDDSFFHRLEESFLVEEDKKHERHPIFGNIVDEVAYHEKYPTIYHLRKKLVDSTDKADLRLIYLALAHMIKFRGHFLIEGDLNPDNSDVDKLFIQLVQTYNQLFEENPINASGVDAKAILSARLSKSRRLENLIAQLPGEKKNGLFGNLIALSLGLTPNFKSNFDLAEDAKLQLSKDTYDDDLDNLLAQIGDQYADLFLAAKNLSDAILLSDILRVNTEITKAPLSASMIKRYDEHHQDLTLLKALVRQQLPEKYKEIFFDQSKNGYAGYIDGGASQEEFYKFIKPILEKMDGTEELLVKLNREDLLRKQRTFDNGSIPHQIHLGELHAILRRQEDFYPFLKDNREKIEKILTFRIPYYVGPLARGNSRFAWMTRKSEETITPWNFEEVVDKGASAQSFIERMTNFDKNLPNEKVLPKHSLLYEYFTVYNELTKVKYVTEGMRKPAFLSGEQKKAIVDLLFKTNRKVTVKQLKEDYFKKIECFDSVEISGVEDRFNASLGTYHDLLKIIKDKDFLDNEENEDILEDIVLTLTLFEDREMIEERLKTYAHLFDDKVMKQLKRRRYTGWGRLSRKLINGIRDKQSGKTILDFLKSDGFANRNFMQLIHDDSLTFKEDIQKAQVSGQGDSLHEHIANLAGSPAIKKGILQTVKVVDELVKVMGRHKPENIVIEMARENQTTQKGQKNSRERMKRIEEGIKELGSQILKEHPVENTQLQNEKLYLYYLQNGRDMYVDQELDINRLSDYDVDHIVPQSFLKDDSIDNKVLTRSDKARGKSDNVPSEEVVKKMKNYWRQLLNAKLITQRKFDNLTKAERGGLSELDKAGFIKRQLVETRQITKHVAQILDSRMNTKYDENDKLIREVKVITLKSKLVSDFRKDFQFYKVREINNYHHAHDAYLNAVVGTALIKKYPKLESEFVYGDYKVYDVRKMIAKSEQEIGKATAKYFFYSNIMNFFKTEITLANGEIRKRPLIETNGETGEIVWDKGRDFATVRKVLSMPQVNIVKKTEVQTGGFSKESILPKRNSDKLIARKKDWDPKKYGGFDSPTVAYSVLVVAKVEKGKSKKLKSVKELLGITIMERSSFEKNPIDFLEAKGYKEVKKDLIIKLPKYSLFELENGRKRMLASAGELQKGNELALPSKYVNFLYLASHYEKLKGSPEDNEQKQLFVEQHKHYLDEIIEQISEFSKRVILADANLDKVLSAYNKHRDKPIREQAENIIHLFTLTNLGAPAAFKYFDTTIDRKRYTSTKEVLDATLIHQSITGLYETRIDLSQLGGDGGGSSGSSGSSGSSGSSGSSGGLDDEYRLYSPLVKPDQNIQFWLEQFPQAWAETAGMGLAKQVPPQVIQLKASATPVSVRQYPLSKEAQEGIRPHVQRLIQQGILVPVQSPWNTPLLPVRKPGTNDYRPVQDLREVNKRVQDIHPTVPNPYNLLCALPPQRSWYTVLDLKDAFFCLRLHPTSQPLFAFEWRDPGTGRTGQLTWTRLPQGFKNSPTIFNEALHRDLANFRIQHPQVTLLQYVDDLLLAGATKQDCLEGTKALLLELSDLGYRASAKKAQICRREVTYLGYSLRDGQRWLTEARKKTVVQIPAPTTAKQVREFLGKAGFCRLFIPGFATLAAPLYPLTKPKGEFSWAPEHQKAFDAIKKALLSAPALALPDVTKPFTLYVDERKGVARGVLTQTLGPWRRPVAYLSKKLDPVASGWPVCLKAIAAVAILVKDADKLTLGQNITVIAPHALENIVRQPPDRWMTNARMTHYQSLLLTERVTFAPPAALNPATLLPEETDEPVTHDCHQLLIEETGVRKDLTDIPLTGEVLTWFTDGSSYVVEGKRMAGAAVVDGTRTIWASSLPEGTSAQKAELMALTQALRLAEGKSINIYTDSRYAFATAHVHGAIYKQRGWLTSAGREIKNKEEILSLLEALHLPKRLAIIHCPGHQKAKDPISRGNQMADRVAKQAAQGVNLLPAGKRTADGSEFEKRTADGSEFESPKKKAKVE

SEQ ID NO: 215 - protein, 2097 aa, synthetic construct; identical to SEQ ID NO: 46

SEQ ID NO: 216 - protein, 2092 aa, synthetic construct; identical to SEQ ID NO: 51

SEQ ID NO: 217 - protein, 2088 aa, synthetic construct
MPAAKRVKLDGGDKKYSIGLDIGTNSVGWAVITDEYKVPSKKFKVLGNTDRHSIKKNLIGALLFDSGETAEATRLKRTARRRYTRRKNRICYLQEIFSNEMAKVDDSFFHRLEESFLVEEDKKHERHPIFGNIVDEVAYHEKYPTIYHLRKKLVDSTDKADLRLIYLALAHMIKFRGHFLIEGDLNPDNSDVDKLFIQLVQTYNQLFEENPINASGVDAKAILSARLSKSRRLENLIAQLPGEKKNGLFGNLIALSLGLTPNFKSNFDLAEDAKLQLSKDTYDDDLDNLLAQIGDQYADLFLAAKNLSDAILLSDILRVNTEITKAPLSASMIKRYDEHHQDLTLLKALVRQQLPEKYKEIFFDQSKNGYAGYIDGGASQEEFYKFIKPILEKMDGTEELLVKLNREDLLRKQRTFDNGSIPHQIHLGELHAILRRQEDFYPFLKDNREKIEKILTFRIPYYVGPLARGNSRFAWMTRKSEETITPWNFEEVVDKGASAQSFIERMTNFDKNLPNEKVLPKHSLLYEYFTVYNELTKVKYVTEGMRKPAFLSGEQKKAIVDLLFKTNRKVTVKQLKEDYFKKIECFDSVEISGVEDRFNASLGTYHDLLKIIKDKDFLDNEENEDILEDIVLTLTLFEDREMIEERLKTYAHLFDDKVMKQLKRRRYTGWGRLSRKLINGIRDKQSGKTILDFLKSDGFANRNFMQLIHDDSLTFKEDIQKAQVSGQGDSLHEHIANLAGSPAIKKGILQTVKVVDELVKVMGRHKPENIVIEMARENQTTQKGQKNSRERMKRIEEGIKELGSQILKEHPVENTQLQNEKLYLYYLQNGRDMYVDQELDINRLSDYDVDHIVPQSFLKDDSIDNKVLTRSDKARGKSDNVPSEEVVKKMKNYWRQLLNAKLITQRKFDNLTKAERGGLSELDKAGFIKRQLVETRQITKHVAQILDSRMNTKYDENDKLIREVKVITLKSKLVSDFRKDFQFYKVREINNYHHAHDAYLNAVVGTALIKKYPKLESEFVYGDYKVYDVRKMIAKSEQEIGKATAKYFFYSNIMNFFKTEITLANGEIRKRPLIETNGETGEIVWDKGRDFATVRKVLSMPQVNIVKKTEVQTGGFSKESILPKRNSDKLIARKKDWDPKKYGGFDSPTVAYSVLVVAKVEKGKSKKLKSVKELLGITIMERSSFEKNPIDFLEAKGYKEVKKDLIIKLPKYSLFELENGRKRMLASAGELQKGNELALPSKYVNFLYLASHYEKLKGSPEDNEQKQLFVEQHKHYLDEIIEQISEFSKRVILADANLDKVLSAYNKHRDKPIREQAENIIHLFTLTNLGAPAAFKYFDTTIDRKRYTSTKEVLDATLIHQSITGLYETRIDLSQLGGDGGPAPGGSEAAAKGGLDDEYRLYSPLVKPDQNIQFWLEQFPQAWAETAGMGLAKQVPPQVIQLKASATPVSVRQYPLSKEAQEGIRPHVQRLIQQGILVPVQSPWNTPLLPVRKPGTNDYRPVQDLREVNKRVQDIHPTVPNPYNLLCALPPQRSWYTVLDLKDAFFCLRLHPTSQPLFAFEWRDPGTGRTGQLTWTRLPQGFKNSPTIFNEALHRDLANFRIQHPQVTLLQYVDDLLLAGATKQDCLEGTKALLLELSDLGYRASAKKAQICRREVTYLGYSLRDGQRWLTEARKKTVVQIPAPTTAKQVREFLGKAGFCRLFIPGFATLAAPLYPLTKPKGEFSWAPEHQKAFDAIKKALLSAPALALPDVTKPFTLYVDERKGVARGVLTQTLGPWRRPVAYLSKKLDPVASGWPVCLKAIAAVAILVKDADKLTLGQNITVIAPHALENIVRQPPDRWMTNARMTHYQSLLLTERVTFAPPAALNPATLLPEETDEPVTHDCHQLLIEETGVRKDLTDIPLTGEVLTWFTDGSSYVVEGKRMAGAAVVDGTRTIWASSLPEGTSAQKAELMALTQALRLAEGKSINIYTDSRYAFATAHVHGAIYKQRGWLTSAGREIKNKEEILSLLEALHLPKRLAIIHCPGHQKAKDPISRGNQMADRVAKQAAQGVNLLPAGKRTADGSEFEKRTADGSEFESPKKKAKVE

SEQ ID NO: 218 - protein, 2082 aa, synthetic construct; identical to SEQ ID NO: 70

SEQ ID NO: 219 - protein, 2085 aa, synthetic construct; identical to SEQ ID NO: 48

SEQ ID NO: 220 - protein, 2086 aa, synthetic construct
MPAAKRVKLDGGDKKYSIGLDIGTNSVGWAVITDEYKVPSKKFKVLGNTDRHSIKKNLIGALLFDSGETAEATRLKRTARRRYTRRKNRICYLQEIFSNEMAKVDDSFFHRLEESFLVEEDKKHERHPIFGNIVDEVAYHEKYPTIYHLRKKLVDSTDKADLRLIYLALAHMIKFRGHFLIEGDLNPDNSDVDKLFIQLVQTYNQLFEENPINASGVDAKAILSARLSKSRRLENLIAQLPGEKKNGLFGNLIALSLGLTPNFKSNFDLAEDAKLQLSKDTYDDDLDNLLAQIGDQYADLFLAAKNLSDAILLSDILRVNTEITKAPLSASMIKRYDEHHQDLTLLKALVRQQLPEKYKEIFFDQSKNGYAGYIDGGASQEEFYKFIKPILEKMDGTEELLVKLNREDLLRKQRTFDNGSIPHQIHLGELHAILRRQEDFYPFLKDNREKIEKILTFRIPYYVGPLARGNSRFAWMTRKSEETITPWNFEEVVDKGASAQSFIERMTNFDKNLPNEKVLPKHSLLYEYFTVYNELTKVKYVTEGMRKPAFLSGEQKKAIVDLLFKTNRKVTVKQLKEDYFKKIECFDSVEISGVEDRFNASLGTYHDLLKIIKDKDFLDNEENEDILEDIVLTLTLFEDREMIEERLKTYAHLFDDKVMKQLKRRRYTGWGRLSRKLINGIRDKQSGKTILDFLKSDGFANRNFMQLIHDDSLTFKEDIQKAQVSGQGDSLHEHIANLAGSPAIKKGILQTVKVVDELVKVMGRHKPENIVIEMARENQTTQKGQKNSRERMKRIEEGIKELGSQILKEHPVENTQLQNEKLYLYYLQNGRDMYVDQELDINRLSDYDVDHIVPQSFLKDDSIDNKVLTRSDKARGKSDNVPSEEVVKKMKNYWRQLLNAKLITQRKFDNLTKAERGGLSELDKAGFIKRQLVETRQITKHVAQILDSRMNTKYDENDKLIREVKVITLKSKLVSDFRKDFQFYKVREINNYHHAHDAYLNAVVGTALIKKYPKLESEFVYGDYKVYDVRKMIAKSEQEIGKATAKYFFYSNIMNFFKTEITLANGEIRKRPLIETNGETGEIVWDKGRDFATVRKVLSMPQVNIVKKTEVQTGGFSKESILPKRNSDKLIARKKDWDPKKYGGFDSPTVAYSVLVVAKVEKGKSKKLKSVKELLGITIMERSSFEKNPIDFLEAKGYKEVKKDLIIKLPKYSLFELENGRKRMLASAGELQKGNELALPSKYVNFLYLASHYEKLKGSPEDNEQKQLFVEQHKHYLDEIIEQISEFSKRVILADANLDKVLSAYNKHRDKPIREQAENIIHLFTLTNLGAPAAFKYFDTTIDRKRYTSTKEVLDATLIHQSITGLYETRIDLSQLGGDGGGGGPAPGSSGGLDDEYRLYSPLVKPDQNIQFWLEQFPQAWAETAGMGLAKQVPPQVIQLKASATPVSVRQYPLSKEAQEGIRPHVQRLIQQGILVPVQSPWNTPLLPVRKPGTNDYRPVQDLREVNKRVQDIHPTVPNPYNLLCALPPQRSWYTVLDLKDAFFCLRLHPTSQPLFAFEWRDPGTGRTGQLTWTRLPQGFKNSPTIFNEALHRDLANFRIQHPQVTLLQYVDDLLLAGATKQDCLEGTKALLLELSDLGYRASAKKAQICRREVTYLGYSLRDGQRWLTEARKKTVVQIPAPTTAKQVREFLGKAGFCRLFIPGFATLAAPLYPLTKPKGEFSWAPEHQKAFDAIKKALLSAPALALPDVTKPFTLYVDERKGVARGVLTQTLGPWRRPVAYLSKKLDPVASGWPVCLKAIAAVAILVKDADKLTLGQNITVIAPHALENIVRQPPDRWMTNARMTHYQSLLLTERVTFAPPAALNPATLLPEETDEPVTHDCHQLLIEETGVRKDLTDIPLTGEVLTWFTDGSSYVVEGKRMAGAAVVDGTRTIWASSLPEGTSAQKAELMALTQALRLAEGKSINIYTDSRYAFATAHVHGAIYKQRGWLTSAGREIKNKEEILSLLEALHLPKRLAIIHCPGHQKAKDPISRGNQMADRVAKQAAQGVNLLPAGKRTADGSEFEKRTADGSEFESPKKKAKVE

SEQ ID NO: 221 - protein, 2085 aa, synthetic construct
MPAAKRVKLDGGDKKYSIGLDIGTNSVGWAVITDEYKVPSKKFKVLGNTDRHSIKKNLIGALLFDSGETAEATRLKRTARRRYTRRKNRICYLQEIFSNEMAKVDDSFFHRLEESFLVEEDKKHERHPIFGNIVDEVAYHEKYPTIYHLRKKLVDSTDKADLRLIYLALAHMIKFRGHFLIEGDLNPDNSDVDKLFIQLVQTYNQLFEENPINASGVDAKAILSARLSKSRRLENLIAQLPGEKKNGLFGNLIALSLGLTPNFKSNFDLAEDAKLQLSKDTYDDDLDNLLAQIGDQYADLFLAAKNLSDAILLSDILRVNTEITKAPLSASMIKRYDEHHQDLTLLKALVRQQLPEKYKEIFFDQSKNGYAGYIDGGASQEEFYKFIKPILEKMDGTEELLVKLNREDLLRKQRTFDNGSIPHQIHLGELHAILRRQEDFYPFLKDNREKIEKILTFRIPYYVGPLARGNSRFAWMTRKSEETITPWNFEEVVDKGASAQSFIERMTNFDKNLPNEKVLPKHSLLYEYFTVYNELTKVKYVTEGMRKPAFLSGEQKKAIVDLLFKTNRKVTVKQLKEDYFKKIECFDSVEISGVEDRFNASLGTYHDLLKIIKDKDFLDNEENEDILEDIVLTLTLFEDREMIEERLKTYAHLFDDKVMKQLKRRRYTGWGRLSRKLINGIRDKQSGKTILDFLKSDGFANRNFMQLIHDDSLTFKEDIQKAQVSGQGDSLHEHIANLAGSPAIKKGILQTVKVVDELVKVMGRHKPENIVIEMARENQTTQKGQKNSRERMKRIEEGIKELGSQILKEHPVENTQLQNEKLYLYYLQNGRDMYVDQELDINRLSDYDVDHIVPQSFLKDDSIDNKVLTRSDKARGKSDNVPSEEVVKKMKNYWRQLLNAKLITQRKFDNLTKAERGGLSELDKAGFIKRQLVETRQITKHVAQILDSRMNTKYDENDKLIREVKVITLKSKLVSDFRKDFQFYKVREINNYHHAHDAYLNAVVGTALIKKYPKLESEFVYGDYKVYDVRKMIAKSEQEIGKATAKYFFYSNIMNFFKTEITLANGEIRKRPLIETNGETGEIVWDKGRDFATVRKVLSMPQVNIVKKTEVQTGGFSKESILPKRNSDKLIARKKDWDPKKYGGFDSPTVAYSVLVVAKVEKGKSKKLKSVKELLGITIMERSSFEKNPIDFLEAKGYKEVKKDLIIKLPKYSLFELENGRKRMLASAGELQKGNELALPSKYVNFLYLASHYEKLKGSPEDNEQKQLFVEQHKHYLDEIIEQISEFSKRVILADANLDKVLSAYNKHRDKPIREQAENIIHLFTLTNLGAPAAFKYFDTTIDRKRYTSTKEVLDATLIHQSITGLYETRIDLSQLGGDGGEAAAKGGSGGLDDEYRLYSPLVKPDQNIQFWLEQFPQAWAETAGMGLAKQVPPQVIQLKASATPVSVRQYPLSKEAQEGIRPHVQRLIQQGILVPVQSPWNTPLLPVRKPGTNDYRPVQDLREVNKRVQDIHPTVPNPYNLLCALPPQRSWYTVLDLKDAFFCLRLHPTSQPLFAFEWRDPGTGRTGQLTWTRLPQGFKNSPTIFNEALHRDLANFRIQHPQVTLLQYVDDLLLAGATKQDCLEGTKALLLELSDLGYRASAKKAQICRREVTYLGYSLRDGQRWLTEARKKTVVQIPAPTTAKQVREFLGKAGFCRLFIPGFATLAAPLYPLTKPKGEFSWAPEHQKAFDAIKKALLSAPALALPDVTKPFTLYVDERKGVARGVLTQTLGPWRRPVAYLSKKLDPVASGWPVCLKAIAAVAILVKDADKLTLGQNITVIAPHALENIVRQPPDRWMTNARMTHYQSLLLTERVTFAPPAALNPATLLPEETDEPVTHDCHQLLIEETGVRKDLTDIPLTGEVLTWFTDGSSYVVEGKRMAGAAVVDGTRTIWASSLPEGTSAQKAELMALTQALRLAEGKSINIYTDSRYAFATAHVHGAIYKQRGWLTSAGREIKNKEEILSLLEALHLPKRLAIIHCPGHQKAKDPISRGNQMADRVAKQAAQGVNLLPAGKRTADGSEFEKRTADGSEFESPKKKAKVE

SEQ ID NO: 222 - protein, 2083 aa, synthetic construct
MPAAKRVKLDGGDKKYSIGLDIGTNSVGWAVITDEYKVPSKKFKVLGNTDRHSIKKNLIGALLFDSGETAEATRLKRTARRRYTRRKNRICYLQEIFSNEMAKVDDSFFHRLEESFLVEEDKKHERHPIFGNIVDEVAYHEKYPTIYHLRKKLVDSTDKADLRLIYLALAHMIKFRGHFLIEGDLNPDNSDVDKLFIQLVQTYNQLFEENPINASGVDAKAILSARLSKSRRLENLIAQLPGEKKNGLFGNLIALSLGLTPNFKSNFDLAEDAKLQLSKDTYDDDLDNLLAQIGDQYADLFLAAKNLSDAILLSDILRVNTEITKAPLSASMIKRYDEHHQDLTLLKALVRQQLPEKYKEIFFDQSKNGYAGYIDGGASQEEFYKFIKPILEKMDGTEELLVKLNREDLLRKQRTFDNGSIPHQIHLGELHAILRRQEDFYPFLKDNREKIEKILTFRIPYYVGPLARGNSRFAWMTRKSEETITPWNFEEVVDKGASAQSFIERMTNFDKNLPNEKVLPKHSLLYEYFTVYNELTKVKYVTEGMRKPAFLSGEQKKAIVDLLFKTNRKVTVKQLKEDYFKKIECFDSVEISGVEDRFNASLGTYHDLLKIIKDKDFLDNEENEDILEDIVLTLTLFEDREMIEERLKTYAHLFDDKVMKQLKRRRYTGWGRLSRKLINGIRDKQSGKTILDFLKSDGFANRNFMQLIHDDSLTFKEDIQKAQVSGQGDSLHEHIANLAGSPAIKKGILQTVKVVDELVKVMGRHKPENIVIEMARENQTTQKGQKNSRERMKRIEEGIKELGSQILKEHPVENTQLQNEKLYLYYLQNGRDMYVDQELDINRLSDYDVDHIVPQSFLKDDSIDNKVLTRSDKARGKSDNVPSEEVVKKMKNYWRQLLNAKLITQRKFDNLTKAERGGLSELDKAGFIKRQLVETRQITKHVAQILDSRMNTKYDENDKLIREVKVITLKSKLVSDFRKDFQFYKVREINNYHHAHDAYLNAVVGTALIKKYPKLESEFVYGDYKVYDVRKMIAKSEQEIGKATAKYFFYSNIMNFFKTEITLANGEIRKRPLIETNGETGEIVWDKGRDFATVRKVLSMPQVNIVKKTEVQTGGFSKESILPKRNSDKLIARKKDWDPKKYGGFDSPTVAYSVLVVAKVEKGKSKKLKSVKELLGITIMERSSFEKNPIDFLEAKGYKEVKKDLIIKLPKYSLFELENGRKRMLASAGELQKGNELALPSKYVNFLYLASHYEKLKGSPEDNEQKQLFVEQHKHYLDEIIEQISEFSKRVILADANLDKVLSAYNKHRDKPIREQAENIIHLFTLTNLGAPAAFKYFDTTIDRKRYTSTKEVLDATLIHQSITGLYETRIDLSQLGGDGGGGSGGGGGLDDEYRLYSPLVKPDQNIQFWLEQFPQAWAETAGMGLAKQVPPQVIQLKASATPVSVRQYPLSKEAQEGIRPHVQRLIQQGILVPVQSPWNTPLLPVRKPGTNDYRPVQDLREVNKRVQDIHPTVPNPYNLLCALPPQRSWYTVLDLKDAFFCLRLHPTSQPLFAFEWRDPGTGRTGQLTWTRLPQGFKNSPTIFNEALHRDLANFRIQHPQVTLLQYVDDLLLAGATKQDCLEGTKALLLELSDLGYRASAKKAQICRREVTYLGYSLRDGQRWLTEARKKTVVQIPAPTTAKQVREFLGKAGFCRLFIPGFATLAAPLYPLTKPKGEFSWAPEHQKAFDAIKKALLSAPALALPDVTKPFTLYVDERKGVARGVLTQTLGPWRRPVAYLSKKLDPVASGWPVCLKAIAAVAILVKDADKLTLGQNITVIAPHALENIVRQPPDRWMTNARMTHYQSLLLTERVTFAPPAALNPATLLPEETDEPVTHDCHQLLIEETGVRKDLTDIPLTGEVLTWFTDGSSYVVEGKRMAGAAVVDGTRTIWASSLPEGTSAQKAELMALTQALRLAEGKSINIYTDSRYAFATAHVHGAIYKQRGWLTSAGREIKNKEEILSLLEALHLPKRLAIIHCPGHQKAKDPISRGNQMADRVAKQAAQGVNLLPAGKRTADGSEFEKRTADGSEFESPKKKAKVE

SEQ ID NO: 223 - protein, 2083 aa, synthetic construct; identical to SEQ ID NO: 47

SEQ ID NO: 224 - protein, 2088 aa, synthetic construct
MPAAKRVKLDGGDKKYSIGLDIGTNSVGWAVITDEYKVPSKKFKVLGNTDRHSIKKNLIGALLFDSGETAEATRLKRTARRRYTRRKNRICYLQEIFSNEMAKVDDSFFHRLEESFLVEEDKKHERHPIFGNIVDEVAYHEKYPTIYHLRKKLVDSTDKADLRLIYLALAHMIKFRGHFLIEGDLNPDNSDVDKLFIQLVQTYNQLFEENPINASGVDAKAILSARLSKSRRLENLIAQLPGEKKNGLFGNLIALSLGLTPNFKSNFDLAEDAKLQLSKDTYDDDLDNLLAQIGDQYADLFLAAKNLSDAILLSDILRVNTEITKAPLSASMIKRYDEHHQDLTLLKALVRQQLPEKYKEIFFDQSKNGYAGYIDGGASQEEFYKFIKPILEKMDGTEELLVKLNREDLLRKQRTFDNGSIPHQIHLGELHAILRRQEDFYPFLKDNREKIEKILTFRIPYYVGPLARGNSRFAWMTRKSEETITPWNFEEVVDKGASAQSFIERMTNFDKNLPNEKVLPKHSLLYEYFTVYNELTKVKYVTEGMRKPAFLSGEQKKAIVDLLFKTNRKVTVKQLKEDYFKKIECFDSVEISGVEDRFNASLGTYHDLLKIIKDKDFLDNEENEDILEDIVLTLTLFEDREMIEERLKTYAHLFDDKVMKQLKRRRYTGWGRLSRKLINGIRDKQSGKTILDFLKSDGFANRNFMQLIHDDSLTFKEDIQKAQVSGQGDSLHEHIANLAGSPAIKKGILQTVKVVDELVKVMGRHKPENIVIEMARENQTTQKGQKNSRERMKRIEEGIKELGSQILKEHPVENTQLQNEKLYLYYLQNGRDMYVDQELDINRLSDYDVDHIVPQSFLKDDSIDNKVLTRSDKARGKSDNVPSEEVVKKMKNYWRQLLNAKLITQRKFDNLTKAERGGLSELDKAGFIKRQLVETRQITKHVAQILDSRMNTKYDENDKLIREVKVITLKSKLVSDFRKDFQFYKVREINNYHHAHDAYLNAVVGTALIKKYPKLESEFVYGDYKVYDVRKMIAKSEQEIGKATAKYFFYSNIMNFFKTEITLANGEIRKRPLIETNGETGEIVWDKGRDFATVRKVLSMPQVNIVKKTEVQTGGFSKESILPKRNSDKLIARKKDWDPKKYGGFDSPTVAYSVLVVAKVEKGKSKKLKSVKELLGITIMERSSFEKNPIDFLEAKGYKEVKKDLIIKLPKYSLFELENGRKRMLASAGELQKGNELALPSKYVNFLYLASHYEKLKGSPEDNEQKQLFVEQHKHYLDEIIEQISEFSKRVILADANLDKVLSAYNKHRDKPIREQAENIIHLFTLTNLGAPAAFKYFDTTIDRKRYTSTKEVLDATLIHQSITGLYETRIDLSQLGGDGGEAAAKPAPGSSGGLDDEYRLYSPLVKPDQNIQFWLEQFPQAWAETAGMGLAKQVPPQVIQLKASATPVSVRQYPLSKEAQEGIRPHVQRLIQQGILVPVQSPWNTPLLPVRKPGTNDYRPVQDLREVNKRVQDIHPTVPNPYNLLCALPPQRSWYTVLDLKDAFFCLRLHPTSQPLFAFEWRDPGTGRTGQLTWTRLPQGFKNSPTIFNEALHRDLANFRIQHPQVTLLQYVDDLLLAGATKQDCLEGTKALLLELSDLGYRASAKKAQICRREVTYLGYSLRDGQRWLTEARKKTVVQIPAPTTAKQVREFLGKAGFCRLFIPGFATLAAPLYPLTKPKGEFSWAPEHQKAFDAIKKALLSAPALALPDVTKPFTLYVDERKGVARGVLTQTLGPWRRPVAYLSKKLDPVASGWPVCLKAIAAVAILVKDADKLTLGQNITVIAPHALENIVRQPPDRWMTNARMTHYQSLLLTERVTFAPPAALNPATLLPEETDEPVTHDCHQLLIEETGVRKDLTDIPLTGEVLTWFTDGSSYVVEGKRMAGAAVVDGTRTIWASSLPEGTSAQKAELMALTQALRLAEGKSINIYTDSRYAFATAHVHGAIYKQRGWLTSAGREIKNKEEILSLLEALHLPKRLAIIHCPGHQKAKDPISRGNQMADRVAKQAAQGVNLLPAGKRTADGSEFEKRTADGSEFESPKKKAKVE

SEQ ID NO: 225 - protein, 2088 aa, synthetic construct
MPAAKRVKLDGGDKKYSIGLDIGTNSVGWAVITDEYKVPSKKFKVLGNTDRHSIKKNLIGALLFDSGETAEATRLKRTARRRYTRRKNRICYLQEIFSNEMAKVDDSFFHRLEESFLVEEDKKHERHPIFGNIVDEVAYHEKYPTIYHLRKKLVDSTDKADLRLIYLALAHMIKFRGHFLIEGDLNPDNSDVDKLFIQLVQTYNQLFEENPINASGVDAKAILSARLSKSRRLENLIAQLPGEKKNGLFGNLIALSLGLTPNFKSNFDLAEDAKLQLSKDTYDDDLDNLLAQIGDQYADLFLAAKNLSDAILLSDILRVNTEITKAPLSASMIKRYDEHHQDLTLLKALVRQQLPEKYKEIFFDQSKNGYAGYIDGGASQEEFYKFIKPILEKMDGTEELLVKLNREDLLRKQRTFDNGSIPHQIHLGELHAILRRQEDFYPFLKDNREKIEKILTFRIPYYVGPLARGNSRFAWMTRKSEETITPWNFEEVVDKGASAQSFIERMTNFDKNLPNEKVLPKHSLLYEYFTVYNELTKVKYVTEGMRKPAFLSGEQKKAIVDLLFKTNRKVTVKQLKEDYFKKIECFDSVEISGVEDRFNASLGTYHDLLKIIKDKDFLDNEENEDILEDIVLTLTLFEDREMIEERLKTYAHLFDDKVMKQLKRRRYTGWGRLSRKLINGIRDKQSGKTILDFLKSDGFANRNFMQLIHDDSLTFKEDIQKAQVSGQGDSLHEHIANLAGSPAIKKGILQTVKVVDELVKVMGRHKPENIVIEMARENQTTQKGQKNSRERMKRIEEGIKELGSQILKEHPVENTQLQNEKLYLYYLQNGRDMYVDQELDINRLSDYDVDHIVPQSFLKDDSIDNKVLTRSDKARGKSDNVPSEEVVKKMKNYWRQLLNAKLITQRKFDNLTKAERGGLSELDKAGFIKRQLVETRQITKHVAQILDSRMNTKYDENDKLIREVKVITLKSKLVSDFRKDFQFYKVREINNYHHAHDAYLNAVVGTALIKKYPKLESEFVYGDYKVYDVRKMIAKSEQEIGKATAKYFFYSNIMNFFKTEITLANGEIRKRPLIETNGETGEIVWDKGRDFATVRKVLSMPQVNIVKKTEVQTGGFSKESILPKRNSDKLIARKKDWDPKKYGGFDSPTVAYSVLVVAKVEKGKSKKLKSVKELLGITIMERSSFEKNPIDFLEAKGYKEVKKDLIIKLPKYSLFELENGRKRMLASAGELQKGNELALPSKYVNFLYLASHYEKLKGSPEDNEQKQLFVEQHKHYLDEIIEQISEFSKRVILADANLDKVLSAYNKHRDKPIREQAENIIHLFTLTNLGAPAAFKYFDTTIDRKRYTSTKEVLDATLIHQSITGLYETRIDLSQLGGDGGPAPGSSEAAAKGGLDDEYRLYSPLVKPDQNIQFWLEQFPQAWAETAGMGLAKQVPPQVIQLKASATPVSVRQYPLSKEAQEGIRPHVQRLIQQGILVPVQSPWNTPLLPVRKPGTNDYRPVQDLREVNKRVQDIHPTVPNPYNLLCALPPQRSWYTVLDLKDAFFCLRLHPTSQPLFAFEWRDPGTGRTGQLTWTRLPQGFKNSPTIFNEALHRDLANFRIQHPQVTLLQYVDDLLLAGATKQDCLEGTKALLLELSDLGYRASAKKAQICRREVTYLGYSLRDGQRWLTEARKKTVVQIPAPTTAKQVREFLGKAGFCRLFIPGFATLAAPLYPLTKPKGEFSWAPEHQKAFDAIKKALLSAPALALPDVTKPFTLYVDERKGVARGVLTQTLGPWRRPVAYLSKKLDPVASGWPVCLKAIAAVAILVKDADKLTLGQNITVIAPHALENIVRQPPDRWMTNARMTHYQSLLLTERVTFAPPAALNPATLLPEETDEPVTHDCHQLLIEETGVRKDLTDIPLTGEVLTWFTDGSSYVVEGKRMAGAAVVDGTRTIWASSLPEGTSAQKAELMALTQALRLAEGKSINIYTDSRYAFATAHVHGAIYKQRGWLTSAGREIKNKEEILSLLEALHLPKRLAIIHCPGHQKAKDPISRGNQMADRVAKQAAQGVNLLPAGKRTADGSEFEKRTADGSEFESPKKKAKVE

SEQ ID NO: 226 - protein, 2086 aa, synthetic construct
MPAAKRVKLDGGDKKYSIGLDIGTNSVGWAVITDEYKVPSKKFKVLGNTDRHSIKKNLIGALLFDSGETAEATRLKRTARRRYTRRKNRICYLQEIFSNEMAKVDDSFFHRLEESFLVEEDKKHERHPIFGNIVDEVAYHEKYPTIYHLRKKLVDSTDKADLRLIYLALAHMIKFRGHFLIEGDLNPDNSDVDKLFIQLVQTYNQLFEENPINASGVDAKAILSARLSKSRRLENLIAQLPGEKKNGLFGNLIALSLGLTPNFKSNFDLAEDAKLQLSKDTYDDDLDNLLAQIGDQYADLFLAAKNLSDAILLSDILRVNTEITKAPLSASMIKRYDEHHQDLTLLKALVRQQLPEKYKEIFFDQSKNGYAGYIDGGASQEEFYKFIKPILEKMDGTEELLVKLNREDLLRKQRTFDNGSIPHQIHLGELHAILRRQEDFYPFLKDNREKIEKILTFRIPYYVGPLARGNSRFAWMTRKSEETITPWNFEEVVDKGASAQSFIERMTNFDKNLPNEKVLPKHSLLYEYFTVYNELTKVKYVTEGMRKPAFLSGEQKKAIVDLLFKTNRKVTVKQLKEDYFKKIECFDSVEISGVEDRFNASLGTYHDLLKIIKDKDFLDNEENEDILEDIVLTLTLFEDREMIEERLKTYAHLFDDKVMKQLKRRRYTGWGRLSRKLINGIRDKQSGKTILDFLKSDGFANRNFMQLIHDDSLTFKEDIQKAQVSGQGDSLHEHIANLAGSPAIKKGILQTVKVVDELVKVMGRHKPENIVIEMARENQTTQKGQKNSRERMKRIEEGIKELGSQILKEHPVENTQLQNEKLYLYYLQNGRDMYVDQELDINRLSDYDVDHIVPQSFLKDDSIDNKVLTRSDKARGKSDNVPSEEVVKKMKNYWRQLLNAKLITQRKFDNLTKAERGGLSELDKAGFIKRQLVETRQITKHVAQILDSRMNTKYDENDKLIREVKVITLKSKLVSDFRKDFQFYKVREINNYHHAHDAYLNAVVGTALIKKYPKLESEFVYGDYKVYDVRKMIAKSEQEIGKATAKYFFYSNIMNFFKTEITLANGEIRKRPLIETNGETGEIVWDKGRDFATVRKVLSMPQVNIVKKTEVQTGGFSKESILPKRNSDKLIARKKDWDPKKYGGFDSPTVAYSVLVVAKVEKGKSKKLKSVKELLGITIMERSSFEKNPIDFLEAKGYKEVKKDLIIKLPKYSLFELENGRKRMLASAGELQKGNELALPSKYVNFLYLASHYEKLKGSPEDNEQKQLFVEQHKHYLDEIIEQISEFSKRVILADANLDKVLSAYNKHRDKPIREQAENIIHLFTLTNLGAPAAFKYFDTTIDRKRYTSTKEVLDATLIHQSITGLYETRIDLSQLGGDGGGGSGGSGGSGGLDDEYRLYSPLVKPDQNIQFWLEQFPQAWAETAGMGLAKQVPPQVIQLKASATPVSVRQYPLSKEAQEGIRPHVQRLIQQGILVPVQSPWNTPLLPVRKPGTNDYRPVQDLREVNKRVQDIHPTVPNPYNLLCALPPQRSWYTVLDLKDAFFCLRLHPTSQPLFAFEWRDPGTGRTGQLTWTRLPQGFKNSPTIFNEALHRDLANFRIQHPQVTLLQYVDDLLLAGATKQDCLEGTKALLLELSDLGYRASAKKAQICRREVTYLGYSLRDGQRWLTEARKKTVVQIPAPTTAKQVREFLGKAGFCRLFIPGFATLAAPLYPLTKPKGEFSWAPEHQKAFDAIKKALLSAPALALPDVTKPFTLYVDERKGVARGVLTQTLGPWRRPVAYLSKKLDPVASGWPVCLKAIAAVAILVKDADKLTLGQNITVIAPHALENIVRQPPDRWMTNARMTHYQSLLLTERVTFAPPAALNPATLLPEETDEPVTHDCHQLLIEETGVRKDLTDIPLTGEVLTWFTDGSSYVVEGKRMAGAAVVDGTRTIWASSLPEGTSAQKAELMALTQALRLAEGKSINIYTDSRYAFATAHVHGAIYKQRGWLTSAGREIKNKEEILSLLEALHLPKRLAIIHCPGHQKAKDPISRGNQMADRVAKQAAQGVNLLPAGKRTADGSEFEKRTADGSEFESPKKKAKVE

SEQ ID NO: 227 - protein, 2083 aa, synthetic construct; identical to SEQ ID NO: 78

SEQ ID NO: 228 - protein, 2089 aa, synthetic construct; identical to SEQ ID NO: 41

SEQ ID NO: 229 - protein, 2088 aa, synthetic construct; identical to SEQ ID NO: 65

SEQ ID NO: 230 - protein, 2088 aa, synthetic construct; identical to SEQ ID NO: 80

SEQ ID NO: 231 - protein, 2088 aa, synthetic construct
MPAAKRVKLDGGDKKYSIGLDIGTNSVGWAVITDEYKVPSKKFKVLGNTDRHSIKKNLIGALLFDSGETAEATRLKRTARRRYTRRKNRICYLQEIFSNEMAKVDDSFFHRLEESFLVEEDKKHERHPIFGNIVDEVAYHEKYPTIYHLRKKLVDSTDKADLRLIYLALAHMIKFRGHFLIEGDLNPDNSDVDKLFIQLVQTYNQLFEENPINASGVDAKAILSARLSKSRRLENLIAQLPGEKKNGLFGNLIALSLGLTPNFKSNFDLAEDAKLQLSKDTYDDDLDNLLAQIGDQYADLFLAAKNLSDAILLSDILRVNTEITKAPLSASMIKRYDEHHQDLTLLKALVRQQLPEKYKEIFFDQSKNGYAGYIDGGASQEEFYKFIKPILEKMDGTEELLVKLNREDLLRKQRTFDNGSIPHQIHLGELHAILRRQEDFYPFLKDNREKIEKILTFRIPYYVGPLARGNSRFAWMTRKSEETITPWNFEEVVDKGASAQSFIERMTNFDKNLPNEKVLPKHSLLYEYFTVYNELTKVKYVTEGMRKPAFLSGEQKKAIVDLLFKTNRKVTVKQLKEDYFKKIECFDSVEISGVEDRFNASLGTYHDLLKIIKDKDFLDNEENEDILEDIVLTLTLFEDREMIEERLKTYAHLFDDKVMKQLKRRRYTGWGRLSRKLINGIRDKQSGKTILDFLKSDGFANRNFMQLIHDDSLTFKEDIQKAQVSGQGDSLHEHIANLAGSPAIKKGILQTVKVVDELVKVMGRHKPENIVIEMARENQTTQKGQKNSRERMKRIEEGIKELGSQILKEHPVENTQLQNEKLYLYYLQNGRDMYVDQELDINRLSDYDVDHIVPQSFLKDDSIDNKVLTRSDKARGKSDNVPSEEVVKKMKNYWRQLLNAKLITQRKFDNLTKAERGGLSELDKAGFIKRQLVETRQITKHVAQILDSRMNTKYDENDKLIREVKVITLKSKLVSDFRKDFQFYKVREINNYHHAHDAYLNAVVGTALIKKYPKLESEFVYGDYKVYDVRKMIAKSEQEIGKATAKYFFYSNIMNFFKTEITLANGEIRKRPLIETNGETGEIVWDKGRDFATVRKVLSMPQVNIVKKTEVQTGGFSKESILPKRNSDKLIARKKDWDPKKYGGFDSPTVAYSVLVVAKVEKGKSKKLKSVKELLGITIMERSSFEKNPIDFLEAKGYKEVKKDLIIKLPKYSLFELENGRKRMLASAGELQKGNELALPSKYVNFLYLASHYEKLKGSPEDNEQKQLFVEQHKHYLDEIIEQISEFSKRVILADANLDKVLSAYNKHRDKPIREQAENIIHLFTLTNLGAPAAFKYFDTTIDRKRYTSTKEVLDATLIHQSITGLYETRIDLSQLGGDGGEAAAKGGGGGSGGLDDEYRLYSPLVKPDQNIQFWLEQFPQAWAETAGMGLAKQVPPQVIQLKASATPVSVRQYPLSKEAQEGIRPHVQRLIQQGILVPVQSPWNTPLLPVRKPGTNDYRPVQDLREVNKRVQDIHPTVPNPYNLLCALPPQRSWYTVLDLKDAFFCLRLHPTSQPLFAFEWRDPGTGRTGQLTWTRLPQGFKNSPTIFNEALHRDLANFRIQHPQVTLLQYVDDLLLAGATKQDCLEGTKALLLELSDLGYRASAKKAQICRREVTYLGYSLRDGQRWLTEARKKTVVQIPAPTTAKQVREFLGKAGFCRLFIPGFATLAAPLYPLTKPKGEFSWAPEHQKAFDAIKKALLSAPALALPDVTKPFTLYVDERKGVARGVLTQTLGPWRRPVAYLSKKLDPVASGWPVCLKAIAAVAILVKDADKLTLGQNITVIAPHALENIVRQPPDRWMTNARMTHYQSLLLTERVTFAPPAALNPATLLPEETDEPVTHDCHQLLIEETGVRKDLTDIPLTGEVLTWFTDGSSYVVEGKRMAGAAVVDGTRTIWASSLPEGTSAQKAELMALTQALRLAEGKSINIYTDSRYAFATAHVHGAIYKQRGWLTSAGREIKNKEEILSLLEALHLPKRLAIIHCPGHQKAKDPISRGNQMADRVAKQAAQGVNLLPAGKRTADGSEFEKRTADGSEFESPKKKAKVE

SEQ ID NO: 232 - protein, 2102 aa, synthetic construct; identical to SEQ ID NO: 39

SEQ ID NO: 233 - protein, 2085 aa, synthetic construct
MPAAKRVKLDGGDKKYSIGLDIGTNSVGWAVITDEYKVPSKKFKVLGNTDRHSIKKNLIGALLFDSGETAEATRLKRTARRRYTRRKNRICYLQEIFSNEMAKVDDSFFHRLEESFLVEEDKKHERHPIFGNIVDEVAYHEKYPTIYHLRKKLVDSTDKADLRLIYLALAHMIKFRGHFLIEGDLNPDNSDVDKLFIQLVQTYNQLFEENPINASGVDAKAILSARLSKSRRLENLIAQLPGEKKNGLFGNLIALSLGLTPNFKSNFDLAEDAKLQLSKDTYDDDLDNLLAQIGDQYADLFLAAKNLSDAILLSDILRVNTEITKAPLSASMIKRYDEHHQDLTLLKALVRQQLPEKYKEIFFDQSKNGYAGYIDGGASQEEFYKFIKPILEKMDGTEELLVKLNREDLLRKQRTFDNGSIPHQIHLGELHAILRRQEDFYPFLKDNREKIEKILTFRIPYYVGPLARGNSRFAWMTRKSEETITPWNFEEVVDKGASAQSFIERMTNFDKNLPNEKVLPKHSLLYEYFTVYNELTKVKYVTEGMRKPAFLSGEQKKAIVDLLFKTNRKVTVKQLKEDYFKKIECFDSVEISGVEDRFNASLGTYHDLLKIIKDKDFLDNEENEDILEDIVLTLTLFEDREMIEERLKTYAHLFDDKVMKQLKRRRYTGWGRLSRKLINGIRDKQSGKTILDFLKSDGFANRNFMQLIHDDSLTFKEDIQKAQVSGQGDSLHEHIANLAGSPAIKKGILQTVKVVDELVKVMGRHKPENIVIEMARENQTTQKGQKNSRERMKRIEEGIKELGSQILKEHPVENTQLQNEKLYLYYLQNGRDMYVDQELDINRLSDYDVDHIVPQSFLKDDSIDNKVLTRSDKARGKSDNVPSEEVVKKMKNYWRQLLNAKLITQRKFDNLTKAERGGLSELDKAGFIKRQLVETRQITKHVAQILDSRMNTKYDENDKLIREVKVITLKSKLVSDFRKDFQFYKVREINNYHHAHDAYLNAVVGTALIKKYPKLESEFVYGDYKVYDVRKMIAKSEQEIGKATAKYFFYSNIMNFFKTEITLANGEIRKRPLIETNGETGEIVWDKGRDFATVRKVLSMPQVNIVKKTEVQTGGFSKESILPKRNSDKLIARKKDWDPKKYGGFDSPTVAYSVLVVAKVEKGKSKKLKSVKELLGITIMERSSFEKNPIDFLEAKGYKEVKKDLIIKLPKYSLFELENGRKRMLASAGELQKGNELALPSKYVNFLYLASHYEKLKGSPEDNEQKQLFVEQHKHYLDEIIEQISEFSKRVILADANLDKVLSAYNKHRDKPIREQAENIIHLFTLTNLGAPAAFKYFDTTIDRKRYTSTKEVLDATLIHQSITGLYETRIDLSQLGGDGGEAAAKPAPGGLDDEYRLYSPLVKPDQNIQFWLEQFPQAWAETAGMGLAKQVPPQVIQLKASATPVSVRQYPLSKEAQEGIRPHVQRLIQQGILVPVQSPWNTPLLPVRKPGTNDYRPVQDLREVNKRVQDIHPTVPNPYNLLCALPPQRSWYTVLDLKDAFFCLRLHPTSQPLFAFEWRDPGTGRTGQLTWTRLPQGFKNSPTIFNEALHRDLANFRIQHPQVTLLQYVDDLLLAGATKQDCLEGTKALLLELSDLGYRASAKKAQICRREVTYLGYSLRDGQRWLTEARKKTVVQIPAPTTAKQVREFLGKAGFCRLFIPGFATLAAPLYPLTKPKGEFSWAPEHQKAFDAIKKALLSAPALALPDVTKPFTLYVDERKGVARGVLTQTLGPWRRPVAYLSKKLDPVASGWPVCLKAIAAVAILVKDADKLTLGQNITVIAPHALENIVRQPPDRWMTNARMTHYQSLLLTERVTFAPPAALNPATLLPEETDEPVTHDCHQLLIEETGVRKDLTDIPLTGEVLTWFTDGSSYVVEGKRMAGAAVVDGTRTIWASSLPEGTSAQKAELMALTQALRLAEGKSINIYTDSRYAFATAHVHGAIYKQRGWLTSAGREIKNKEEILSLLEALHLPKRLAIIHCPGHQKAKDPISRGNQMADRVAKQAAQGVNLLPAGKRTADGSEFEKRTADGSEFESPKKKAKVE

SEQ ID NO: 234 - protein, 2092 aa, synthetic construct; identical to SEQ ID NO: 56

SEQ ID NO: 235 - protein, 2083 aa, synthetic construct
MPAAKRVKLDGGDKKYSIGLDIGTNSVGWAVITDEYKVPSKKFKVLGNTDRHSIKKNLIGALLFDSGETAEATRLKRTARRRYTRRKNRICYLQEIFSNEMAKVDDSFFHRLEESFLVEEDKKHERHPIFGNIVDEVAYHEKYPTIYHLRKKLVDSTDKADLRLIYLALAHMIKFRGHFLIEGDLNPDNSDVDKLFIQLVQTYNQLFEENPINASGVDAKAILSARLSKSRRLENLIAQLPGEKKNGLFGNLIALSLGLTPNFKSNFDLAEDAKLQLSKDTYDDDLDNLLAQIGDQYADLFLAAKNLSDAILLSDILRVNTEITKAPLSASMIKRYDEHHQDLTLLKALVRQQLPEKYKEIFFDQSKNGYAGYIDGGASQEEFYKFIKPILEKMDGTEELLVKLNREDLLRKQRTFDNGSIPHQIHLGELHAILRRQEDFYPFLKDNREKIEKILTFRIPYYVGPLARGNSRFAWMTRKSEETITPWNFEEVVDKGASAQSFIERMTNFDKNLPNEKVLPKHSLLYEYFTVYNELTKVKYVTEGMRKPAFLSGEQKKAIVDLLFKTNRKVTVKQLKEDYFKKIECFDSVEISGVEDRFNASLGTYHDLLKIIKDKDFLDNEENEDILEDIVLTLTLFEDREMIEERLKTYAHLFDDKVMKQLKRRRYTGWGRLSRKLINGIRDKQSGKTILDFLKSDGFANRNFMQLIHDDSLTFKEDIQKAQVSGQGDSLHEHIANLAGSPAIKKGILQTVKVVDELVKVMGRHKPENIVIEMARENQTTQKGQKNSRERMKRIEEGIKELGSQILKEHPVENTQLQNEKLYLYYLQNGRDMYVDQELDINRLSDYDVDHIVPQSFLKDDSIDNKVLTRSDKARGKSDNVPSEEVVKKMKNYWRQLLNAKLITQRKFDNLTKAERGGLSELDKAGFIKRQLVETRQITKHVAQILDSRMNTKYDENDKLIREVKVITLKSKLVSDFRKDFQFYKVREINNYHHAHDAYLNAVVGTALIKKYPKLESEFVYGDYKVYDVRKMIAKSEQEIGKATAKYFFYSNIMNFFKTEITLANGEIRKRPLIETNGETGEIVWDKGRDFATVRKVLSMPQVNIVKKTEVQTGGFSKESILPKRNSDKLIARKKDWDPKKYGGFDSPTVAYSVLVVAKVEKGKSKKLKSVKELLGITIMERSSFEKNPIDFLEAKGYKEVKKDLIIKLPKYSLFELENGRKRMLASAGELQKGNELALPSKYVNFLYLASHYEKLKGSPEDNEQKQLFVEQHKHYLDEIIEQISEFSKRVILADANLDKVLSAYNKHRDKPIREQAENIIHLFTLTNLGAPAAFKYFDTTIDRKRYTSTKEVLDATLIHQSITGLYETRIDLSQLGGDGGGSSGSSGGLDDEYRLYSPLVKPDQNIQFWLEQFPQAWAETAGMGLAKQVPPQVIQLKASATPVSVRQYPLSKEAQEGIRPHVQRLIQQGILVPVQSPWNTPLLPVRKPGTNDYRPVQDLREVNKRVQDIHPTVPNPYNLLCALPPQRSWYTVLDLKDAFFCLRLHPTSQPLFAFEWRDPGTGRTGQLTWTRLPQGFKNSPTIFNEALHRDLANFRIQHPQVTLLQYVDDLLLAGATKQDCLEGTKALLLELSDLGYRASAKKAQICRREVTYLGYSLRDGQRWLTEARKKTVVQIPAPTTAKQVREFLGKAGFCRLFIPGFATLAAPLYPLTKPKGEFSWAPEHQKAFDAIKKALLSAPALALPDVTKPFTLYVDERKGVARGVLTQTLGPWRRPVAYLSKKLDPVASGWPVCLKAIAAVAILVKDADKLTLGQNITVIAPHALENIVRQPPDRWMTNARMTHYQSLLLTERVTFAPPAALNPATLLPEETDEPVTHDCHQLLIEETGVRKDLTDIPLTGEVLTWFTDGSSYVVEGKRMAGAAVVDGTRTIWASSLPEGTSAQKAELMALTQALRLAEGKSINIYTDSRYAFATAHVHGAIYKQRGWLTSAGREIKNKEEILSLLEALHLPKRLAIIHCPGHQKAKDPISRGNQMADRVAKQAAQGVNLLPAGKRTADGSEFEKRTADGSEFESPKKKAKVE

SEQ ID NO: 236 - protein, 2089 aa, synthetic construct; identical to SEQ ID NO: 67

SEQ ID NO: 237 - protein, 2085 aa, synthetic construct
MPAAKRVKLDGGDKKYSIGLDIGTNSVGWAVITDEYKVPSKKFKVLGNTDRHSIKKNLIGALLFDSGETAEATRLKRTARRRYTRRKNRICYLQEIFSNEMAKVDDSFFHRLEESFLVEEDKKHERHPIFGNIVDEVAYHEKYPTIYHLRKKLVDSTDKADLRLIYLALAHMIKFRGHFLIEGDLNPDNSDVDKLFIQLVQTYNQLFEENPINASGVDAKAILSARLSKSRRLENLIAQLPGEKKNGLFGNLIALSLGLTPNFKSNFDLAEDAKLQLSKDTYDDDLDNLLAQIGDQYADLFLAAKNLSDAILLSDILRVNTEITKAPLSASMIKRYDEHHQDLTLLKALVRQQLPEKYKEIFFDQSKNGYAGYIDGGASQEEFYKFIKPILEKMDGTEELLVKLNREDLLRKQRTFDNGSIPHQIHLGELHAILRRQEDFYPFLKDNREKIEKILTFRIPYYVGPLARGNSRFAWMTRKSEETITPWNFEEVVDKGASAQSFIERMTNFDKNLPNEKVLPKHSLLYEYFTVYNELTKVKYVTEGMRKPAFLSGEQKKAIVDLLFKTNRKVTVKQLKEDYFKKIECFDSVEISGVEDRFNASLGTYHDLLKIIKDKDFLDNEENEDILEDIVLTLTLFEDREMIEERLKTYAHLFDDKVMKQLKRRRYTGWGRLSRKLINGIRDKQSGKTILDFLKSDGFANRNFMQLIHDDSLTFKEDIQKAQVSGQGDSLHEHIANLAGSPAIKKGILQTVKVVDELVKVMGRHKPENIVIEMARENQTTQKGQKNSRERMKRIEEGIKELGSQILKEHPVENTQLQNEKLYLYYLQNGRDMYVDQELDINRLSDYDVDHIVPQSFLKDDSIDNKVLTRSDKARGKSDNVPSEEVVKKMKNYWRQLLNAKLITQRKFDNLTKAERGGLSELDKAGFIKRQLVETRQITKHVAQILDSRMNTKYDENDKLIREVKVITLKSKLVSDFRKDFQFYKVREINNYHHAHDAYLNAVVGTALIKKYPKLESEFVYGDYKVYDVRKMIAKSEQEIGKATAKYFFYSNIMNFFKTEITLANGEIRKRPLIETNGETGEIVWDKGRDFATVRKVLSMPQVNIVKKTEVQTGGFSKESILPKRNSDKLIARKKDWDPKKYGGFDSPTVAYSVLVVAKVEKGKSKKLKSVKELLGITIMERSSFEKNPIDFLEAKGYKEVKKDLIIKLPKYSLFELENGRKRMLASAGELQKGNELALPSKYVNFLYLASHYEKLKGSPEDNEQKQLFVEQHKHYLDEIIEQISEFSKRVILADANLDKVLSAYNKHRDKPIREQAENIIHLFTLTNLGAPAAFKYFDTTIDRKRYTSTKEVLDATLIHQSITGLYETRIDLSQLGGDGGGSSEAAAKGGLDDEYRLYSPLVKPDQNIQFWLEQFPQAWAETAGMGLAKQVPPQVIQLKASATPVSVRQYPLSKEAQEGIRPHVQRLIQQGILVPVQSPWNTPLLPVRKPGTNDYRPVQDLREVNKRVQDIHPTVPNPYNLLCALPPQRSWYTVLDLKDAFFCLRLHPTSQPLFAFEWRDPGTGRTGQLTWTRLPQGFKNSPTIFNEALHRDLANFRIQHPQVTLLQYVDDLLLAGATKQDCLEGTKALLLELSDLGYRASAKKAQICRREVTYLGYSLRDGQRWLTEARKKTVVQIPAPTTAKQVREFLGKAGFCRLFIPGFATLAAPLYPLTKPKGEFSWAPEHQKAFDAIKKALLSAPALALPDVTKPFTLYVDERKGVARGVLTQTLGPWRRPVAYLSKKLDPVASGWPVCLKAIAAVAILVKDADKLTLGQNITVIAPHALENIVRQPPDRWMTNARMTHYQSLLLTERVTFAPPAALNPATLLPEETDEPVTHDCHQLLIEETGVRKDLTDIPLTGEVLTWFTDGSSYVVEGKRMAGAAVVDGTRTIWASSLPEGTSAQKAELMALTQALRLAEGKSINIYTDSRYAFATAHVHGAIYKQRGWLTSAGREIKNKEEILSLLEALHLPKRLAIIHCPGHQKAKDPISRGNQMADRVAKQAAQGVNLLPAGKRTADGSEFEKRTADGSEFESPKKKAKVE

SEQ ID NO: 238 - protein, 2092 aa, synthetic construct; identical to SEQ ID NO: 52

SEQ ID NO: 239 - protein, 2088 aa, synthetic construct; identical to SEQ ID NO: 49

SEQ ID NO: 240 - protein, 2088 aa, synthetic construct
MPAAKRVKLDGGDKKYSIGLDIGTNSVGWAVITDEYKVPSKKFKVLGNTDRHSIKKNLIGALLFDSGETAEATRLKRTARRRYTRRKNRICYLQEIFSNEMAKVDDSFFHRLEESFLVEEDKKHERHPIFGNIVDEVAYHEKYPTIYHLRKKLVDSTDKADLRLIYLALAHMIKFRGHFLIEGDLNPDNSDVDKLFIQLVQTYNQLFEENPINASGVDAKAILSARLSKSRRLENLIAQLPGEKKNGLFGNLIALSLGLTPNFKSNFDLAEDAKLQLSKDTYDDDLDNLLAQIGDQYADLFLAAKNLSDAILLSDILRVNTEITKAPLSASMIKRYDEHHQDLTLLKALVRQQLPEKYKEIFFDQSKNGYAGYIDGGASQEEFYKFIKPILEKMDGTEELLVKLNREDLLRKQRTFDNGSIPHQIHLGELHAILRRQEDFYPFLKDNREKIEKILTFRIPYYVGPLARGNSRFAWMTRKSEETITPWNFEEVVDKGASAQSFIERMTNFDKNLPNEKVLPKHSLLYEYFTVYNELTKVKYVTEGMRKPAFLSGEQKKAIVDLLFKTNRKVTVKQLKEDYFKKIECFDSVEISGVEDRFNASLGTYHDLLKIIKDKDFLDNEENEDILEDIVLTLTLFEDREMIEERLKTYAHLFDDKVMKQLKRRRYTGWGRLSRKLINGIRDKQSGKTILDFLKSDGFANRNFMQLIHDDSLTFKEDIQKAQVSGQGDSLHEHIANLAGSPAIKKGILQTVKVVDELVKVMGRHKPENIVIEMARENQTTQKGQKNSRERMKRIEEGIKELGSQILKEHPVENTQLQNEKLYLYYLQNGRDMYVDQELDINRLSDYDVDHIVPQSFLKDDSIDNKVLTRSDKARGKSDNVPSEEVVKKMKNYWRQLLNAKLITQRKFDNLTKAERGGLSELDKAGFIKRQLVETRQITKHVAQILDSRMNTKYDENDKLIREVKVITLKSKLVSDFRKDFQFYKVREINNYHHAHDAYLNAVVGTALIKKYPKLESEFVYGDYKVYDVRKMIAKSEQEIGKATAKYFFYSNIMNFFKTEITLANGEIRKRPLIETNGETGEIVWDKGRDFATVRKVLSMPQVNIVKKTEVQTGGFSKESILPKRNSDKLIARKKDWDPKKYGGFDSPTVAYSVLVVAKVEKGKSKKLKSVKELLGITIMERSSFEKNPIDFLEAKGYKEVKKDLIIKLPKYSLFELENGRKRMLASAGELQKGNELALPSKYVNFLYLASHYEKLKGSPEDNEQKQLFVEQHKHYLDEIIEQISEFSKRVILADANLDKVLSAYNKHRDKPIREQAENIIHLFTLTNLGAPAAFKYFDTTIDRKRYTSTKEVLDATLIHQSITGLYETRIDLSQLGGDGGGGGEAAAKGSSGGLDDEYRLYSPLVKPDQNIQFWLEQFPQAWAETAGMGLAKQVPPQVIQLKASATPVSVRQYPLSKEAQEGIRPHVQRLIQQGILVPVQSPWNTPLLPVRKPGTNDYRPVQDLREVNKRVQDIHPTVPNPYNLLCALPPQRSWYTVLDLKDAFFCLRLHPTSQPLFAFEWRDPGTGRTGQLTWTRLPQGFKNSPTIFNEALHRDLANFRIQHPQVTLLQYVDDLLLAGATKQDCLEGTKALLLELSDLGYRASAKKAQICRREVTYLGYSLRDGQRWLTEARKKTVVQIPAPTTAKQVREFLGKAGFCRLFIPGFATLAAPLYPLTKPKGEFSWAPEHQKAFDAIKKALLSAPALALPDVTKPFTLYVDERKGVARGVLTQTLGPWRRPVAYLSKKLDPVASGWPVCLKAIAAVAILVKDADKLTLGQNITVIAPHALENIVRQPPDRWMTNARMTHYQSLLLTERVTFAPPAALNPATLLPEETDEPVTHDCHQLLIEETGVRKDLTDIPLTGEVLTWFTDGSSYVVEGKRMAGAAVVDGTRTIWASSLPEGTSAQKAELMALTQALRLAEGKSINIYTDSRYAFATAHVHGAIYKQRGWLTSAGREIKNKEEILSLLEALHLPKRLAIIHCPGHQKAKDPISRGNQMADRVAKQAAQGVNLLPAGKRTADGSEFEKRTADGSEFESPKKKAKVE

SEQ ID NO: 241 - protein, 2086 aa, synthetic construct
MPAAKRVKLDGGDKKYSIGLDIGTNSVGWAVITDEYKVPSKKFKVLGNTDRHSIKKNLIGALLFDSGETAEATRLKRTARRRYTRRKNRICYLQEIFSNEMAKVDDSFFHRLEESFLVEEDKKHERHPIFGNIVDEVAYHEKYPTIYHLRKKLVDSTDKADLRLIYLALAHMIKFRGHFLIEGDLNPDNSDVDKLFIQLVQTYNQLFEENPINASGVDAKAILSARLSKSRRLENLIAQLPGEKKNGLFGNLIALSLGLTPNFKSNFDLAEDAKLQLSKDTYDDDLDNLLAQIGDQYADLFLAAKNLSDAILLSDILRVNTEITKAPLSASMIKRYDEHHQDLTLLKALVRQQLPEKYKEIFFDQSKNGYAGYIDGGASQEEFYKFIKPILEKMDGTEELLVKLNREDLLRKQRTFDNGSIPHQIHLGELHAILRRQEDFYPFLKDNREKIEKILTFRIPYYVGPLARGNSRFAWMTRKSEETITPWNFEEVVDKGASAQSFIERMTNFDKNLPNEKVLPKHSLLYEYFTVYNELTKVKYVTEGMRKPAFLSGEQKKAIVDLLFKTNRKVTVKQLKEDYFKKIECFDSVEISGVEDRFNASLGTYHDLLKIIKDKDFLDNEENEDILEDIVLTLTLFEDREMIEERLKTYAHLFDDKVMKQLKRRRYTGWGRLSRKLINGIRDKQSGKTILDFLKSDGFANRNFMQLIHDDSLTFKEDIQKAQVSGQGDSLHEHIANLAGSPAIKKGILQTVKVVDELVKVMGRHKPENIVIEMARENQTTQKGQKNSRERMKRIEEGIKELGSQILKEHPVENTQLQNEKLYLYYLQNGRDMYVDQELDINRLSDYDVDHIVPQSFLKDDSIDNKVLTRSDKARGKSDNVPSEEVVKKMKNYWRQLLNAKLITQRKFDNLTKAERGGLSELDKAGFIKRQLVETRQITKHVAQILDSRMNTKYDENDKLIREVKVITLKSKLVSDFRKDFQFYKVREINNYHHAHDAYLNAVVGTALIKKYPKLESEFVYGDYKVYDVRKMIAKSEQEIGKATAKYFFYSNIMNFFKTEITLANGEIRKRPLIETNGETGEIVWDKGRDFATVRKVLSMPQVNIVKKTEVQTGGFSKESILPKRNSDKLIARKKDWDPKKYGGFDSPTVAYSVLVVAKVEKGKSKKLKSVKELLGITIMERSSFEKNPIDFLEAKGYKEVKKDLIIKLPKYSLFELENGRKRMLASAGELQKGNELALPSKYVNFLYLASHYEKLKGSPEDNEQKQLFVEQHKHYLDEIIEQISEFSKRVILADANLDKVLSAYNKHRDKPIREQAENIIHLFTLTNLGAPAAFKYFDTTIDRKRYTSTKEVLDATLIHQSITGLYETRIDLSQLGGDGGGGSGSSGGGGGLDDEYRLYSPLVKPDQNIQFWLEQFPQAWAETAGMGLAKQVPPQVIQLKASATPVSVRQYPLSKEAQEGIRPHVQRLIQQGILVPVQSPWNTPLLPVRKPGTNDYRPVQDLREVNKRVQDIHPTVPNPYNLLCALPPQRSWYTVLDLKDAFFCLRLHPTSQPLFAFEWRDPGTGRTGQLTWTRLPQGFKNSPTIFNEALHRDLANFRIQHPQVTLLQYVDDLLLAGATKQDCLEGTKALLLELSDLGYRASAKKAQICRREVTYLGYSLRDGQRWLTEARKKTVVQIPAPTTAKQVREFLGKAGFCRLFIPGFATLAAPLYPLTKPKGEFSWAPEHQKAFDAIKKALLSAPALALPDVTKPFTLYVDERKGVARGVLTQTLGPWRRPVAYLSKKLDPVASGWPVCLKAIAAVAILVKDADKLTLGQNITVIAPHALENIVRQPPDRWMTNARMTHYQSLLLTERVTFAPPAALNPATLLPEETDEPVTHDCHQLLIEETGVRKDLTDIPLTGEVLTWFTDGSSYVVEGKRMAGAAVVDGTRTIWASSLPEGTSAQKAELMALTQALRLAEGKSINIYTDSRYAFATAHVHGAIYKQRGWLTSAGREIKNKEEILSLLEALHLPKRLAIIHCPGHQKAKDPISRGNQMADRVAKQAAQGVNLLPAGKRTADGSEFEKRTADGSEFESPKKKAKVE

SEQ ID NO: 242 - protein, 2088 aa, synthetic construct
MPAAKRVKLDGGDKKYSIGLDIGTNSVGWAVITDEYKVPSKKFKVLGNTDRHSIKKNLIGALLFDSGETAEATRLKRTARRRYTRRKNRICYLQEIFSNEMAKVDDSFFHRLEESFLVEEDKKHERHPIFGNIVDEVAYHEKYPTIYHLRKKLVDSTDKADLRLIYLALAHMIKFRGHFLIEGDLNPDNSDVDKLFIQLVQTYNQLFEENPINASGVDAKAILSARLSKSRRLENLIAQLPGEKKNGLFGNLIALSLGLTPNFKSNFDLAEDAKLQLSKDTYDDDLDNLLAQIGDQYADLFLAAKNLSDAILLSDILRVNTEITKAPLSASMIKRYDEHHQDLTLLKALVRQQLPEKYKEIFFDQSKNGYAGYIDGGASQEEFYKFIKPILEKMDGTEELLVKLNREDLLRKQRTFDNGSIPHQIHLGELHAILRRQEDFYPFLKDNREKIEKILTFRIPYYVGPLARGNSRFAWMTRKSEETITPWNFEEVVDKGASAQSFIERMTNFDKNLPNEKVLPKHSLLYEYFTVYNELTKVKYVTEGMRKPAFLSGEQKKAIVDLLFKTNRKVTVKQLKEDYFKKIECFDSVEISGVEDRFNASLGTYHDLLKIIKDKDFLDNEENEDILEDIVLTLTLFEDREMIEERLKTYAHLFDDKVMKQLKRRRYTGWGRLSRKLINGIRDKQSGKTILDFLKSDGFANRNFMQLIHDDSLTFKEDIQKAQVSGQGDSLHEHIANLAGSPAIKKGILQTVKVVDELVKVMGRHKPENIVIEMARENQTTQKGQKNSRERMKRIEEGIKELGSQILKEHPVENTQLQNEKLYLYYLQNGRDMYVDQELDINRLSDYDVDHIVPQSFLKDDSIDNKVLTRSDKARGKSDNVPSEEVVKKMKNYWRQLLNAKLITQRKFDNLTKAERGGLSELDKAGFIKRQLVETRQITKHVAQILDSRMNTKYDENDKLIREVKVITLKSKLVSDFRKDFQFYKVREINNYHHAHDAYLNAVVGTALIKKYPKLESEFVYGDYKVYDVRKMIAKSEQEIGKATAKYFFYSNIMNFFKTEITLANGEIRKRPLIETNGETGEIVWDKGRDFATVRKVLSMPQVNIVKKTEVQTGGFSKESILPKRNSDKLIARKKDWDPKKYGGFDSPTVAYSVLVVAKVEKGKSKKLKSVKELLGITIMERSSFEKNPIDFLEAKGYKEVKKDLIIKLPKYSLFELENGRKRMLASAGELQKGNELALPSKYVNFLYLASHYEKLKGSPEDNEQKQLFVEQHKHYLDEIIEQISEFSKRVILADANLDKVLSAYNKHRDKPIREQAENIIHLFTLTNLGAPAAFKYFDTTIDRKRYTSTKEVLDATLIHQSITGLYETRIDLSQLGGDGGEAAAKGSSPAPGGLDDEYRLYSPLVKPDQNIQFWLEQFPQAWAETAGMGLAKQVPPQVIQLKASATPVSVRQYPLSKEAQEGIRPHVQRLIQQGILVPVQSPWNTPLLPVRKPGTNDYRPVQDLREVNKRVQDIHPTVPNPYNLLCALPPQRSWYTVLDLKDAFFCLRLHPTSQPLFAFEWRDPGTGRTGQLTWTRLPQGFKNSPTIFNEALHRDLANFRIQHPQVTLLQYVDDLLLAGATKQDCLEGTKALLLELSDLGYRASAKKAQICRREVTYLGYSLRDGQRWLTEARKKTVVQIPAPTTAKQVREFLGKAGFCRLFIPGFATLAAPLYPLTKPKGEFSWAPEHQKAFDAIKKALLSAPALALPDVTKPFTLYVDERKGVARGVLTQTLGPWRRPVAYLSKKLDPVASGWPVCLKAIAAVAILVKDADKLTLGQNITVIAPHALENIVRQPPDRWMTNARMTHYQSLLLTERVTFAPPAALNPATLLPEETDEPVTHDCHQLLIEETGVRKDLTDIPLTGEVLTWFTDGSSYVVEGKRMAGAAVVDGTRTIWASSLPEGTSAQKAELMALTQALRLAEGKSINIYTDSRYAFATAHVHGAIYKQRGWLTSAGREIKNKEEILSLLEALHLPKRLAIIHCPGHQKAKDPISRGNQMADRVAKQAAQGVNLLPAGKRTADGSEFEKRTADGSEFESPKKKAKVE

SEQ ID NO: 243 - protein, 2088 aa, synthetic construct
MPAAKRVKLDGGDKKYSIGLDIGTNSVGWAVITDEYKVPSKKFKVLGNTDRHSIKKNLIGALLFDSGETAEATRLKRTARRRYTRRKNRICYLQEIFSNEMAKVDDSFFHRLEESFLVEEDKKHERHPIFGNIVDEVAYHEKYPTIYHLRKKLVDSTDKADLRLIYLALAHMIKFRGHFLIEGDLNPDNSDVDKLFIQLVQTYNQLFEENPINASGVDAKAILSARLSKSRRLENLIAQLPGEKKNGLFGNLIALSLGLTPNFKSNFDLAEDAKLQLSKDTYDDDLDNLLAQIGDQYADLFLAAKNLSDAILLSDILRVNTEITKAPLSASMIKRYDEHHQDLTLLKALVRQQLPEKYKEIFFDQSKNGYAGYIDGGASQEEFYKFIKPILEKMDGTEELLVKLNREDLLRKQRTFDNGSIPHQIHLGELHAILRRQEDFYPFLKDNREKIEKILTFRIPYYVGPLARGNSRFAWMTRKSEETITPWNFEEVVDKGASAQSFIERMTNFDKNLPNEKVLPKHSLLYEYFTVYNELTKVKYVTEGMRKPAFLSGEQKKAIVDLLFKTNRKVTVKQLKEDYFKKIECFDSVEISGVEDRFNASLGTYHDLLKIIKDKDFLDNEENEDILEDIVLTLTLFEDREMIEERLKTYAHLFDDKVMKQLKRRRYTGWGRLSRKLINGIRDKQSGKTILDFLKSDGFANRNFMQLIHDDSLTFKEDIQKAQVSGQGDSLHEHIANLAGSPAIKKGILQTVKVVDELVKVMGRHKPENIVIEMARENQTTQKGQKNSRERMKRIEEGIKELGSQILKEHPVENTQLQNEKLYLYYLQNGRDMYVDQELDINRLSDYDVDHIVPQSFLKDDSIDNKVLTRSDKARGKSDNVPSEEVVKKMKNYWRQLLNAKLITQRKFDNLTKAERGGLSELDKAGFIKRQLVETRQITKHVAQILDSRMNTKYDENDKLIREVKVITLKSKLVSDFRKDFQFYKVREINNYHHAHDAYLNAVVGTALIKKYPKLESEFVYGDYKVYDVRKMIAKSEQEIGKATAKYFFYSNIMNFFKTEITLANGEIRKRPLIETNGETGEIVWDKGRDFATVRKVLSMPQVNIVKKTEVQTGGFSKESILPKRNSDKLIARKKDWDPKKYGGFDSPTVAYSVLVVAKVEKGKSKKLKSVKELLGITIMERSSFEKNPIDFLEAKGYKEVKKDLIIKLPKYSLFELENGRKRMLASAGELQKGNELALPSKYVNFLYLASHYEKLKGSPEDNEQKQLFVEQHKHYLDEIIEQISEFSKRVILADANLDKVLSAYNKHRDKPIREQAENIIHLFTLTNLGAPAAFKYFDTTIDRKRYTSTKEVLDATLIHQSITGLYETRIDLSQLGGDGGGGSPAPEAAAKGGLDDEYRLYSPLVKPDQNIQFWLEQFPQAWAETAGMGLAKQVPPQVIQLKASATPVSVRQYPLSKEAQEGIRPHVQRLIQQGILVPVQSPWNTPLLPVRKPGTNDYRPVQDLREVNKRVQDIHPTVPNPYNLLCALPPQRSWYTVLDLKDAFFCLRLHPTSQPLFAFEWRDPGTGRTGQLTWTRLPQGFKNSPTIFNEALHRDLANFRIQHPQVTLLQYVDDLLLAGATKQDCLEGTKALLLELSDLGYRASAKKAQICRREVTYLGYSLRDGQRWLTEARKKTVVQIPAPTTAKQVREFLGKAGFCRLFIPGFATLAAPLYPLTKPKGEFSWAPEHQKAFDAIKKALLSAPALALPDVTKPFTLYVDERKGVARGVLTQTLGPWRRPVAYLSKKLDPVASGWPVCLKAIAAVAILVKDADKLTLGQNITVIAPHALENIVRQPPDRWMTNARMTHYQSLLLTERVTFAPPAALNPATLLPEETDEPVTHDCHQLLIEETGVRKDLTDIPLTGEVLTWFTDGSSYVVEGKRMAGAAVVDGTRTIWASSLPEGTSAQKAELMALTQALRLAEGKSINIYTDSRYAFATAHVHGAIYKQRGWLTSAGREIKNKEEILSLLEALHLPKRLAIIHCPGHQKAKDPISRGNQMADRVAKQAAQGVNLLPAGKRTADGSEFEKRTADGSEFESPKKKAKVE

SEQ ID NO: 244 - protein, 2084 aa, synthetic construct; identical to SEQ ID NO: 77

SEQ ID NO: 245 - protein, 2081 aa, synthetic construct; identical to SEQ ID NO: 66

SEQ ID NO: 246 - protein, 2080 aa, synthetic construct
MPAAKRVKLDGGDKKYSIGLDIGTNSVGWAVITDEYKVPSKKFKVLGNTDRHSIKKNLIGALLFDSGETAEATRLKRTARRRYTRRKNRICYLQEIFSNEMAKVDDSFFHRLEESFLVEEDKKHERHPIFGNIVDEVAYHEKYPTIYHLRKKLVDSTDKADLRLIYLALAHMIKFRGHFLIEGDLNPDNSDVDKLFIQLVQTYNQLFEENPINASGVDAKAILSARLSKSRRLENLIAQLPGEKKNGLFGNLIALSLGLTPNFKSNFDLAEDAKLQLSKDTYDDDLDNLLAQIGDQYADLFLAAKNLSDAILLSDILRVNTEITKAPLSASMIKRYDEHHQDLTLLKALVRQQLPEKYKEIFFDQSKNGYAGYIDGGASQEEFYKFIKPILEKMDGTEELLVKLNREDLLRKQRTFDNGSIPHQIHLGELHAILRRQEDFYPFLKDNREKIEKILTFRIPYYVGPLARGNSRFAWMTRKSEETITPWNFEEVVDKGASAQSFIERMTNFDKNLPNEKVLPKHSLLYEYFTVYNELTKVKYVTEGMRKPAFLSGEQKKAIVDLLFKTNRKVTVKQLKEDYFKKIECFDSVEISGVEDRFNASLGTYHDLLKIIKDKDFLDNEENEDILEDIVLTLTLFEDREMIEERLKTYAHLFDDKVMKQLKRRRYTGWGRLSRKLINGIRDKQSGKTILDFLKSDGFANRNFMQLIHDDSLTFKEDIQKAQVSGQGDSLHEHIANLAGSPAIKKGILQTVKVVDELVKVMGRHKPENIVIEMARENQTTQKGQKNSRERMKRIEEGIKELGSQILKEHPVENTQLQNEKLYLYYLQNGRDMYVDQELDINRLSDYDVDHIVPQSFLKDDSIDNKVLTRSDKARGKSDNVPSEEVVKKMKNYWRQLLNAKLITQRKFDNLTKAERGGLSELDKAGFIKRQLVETRQITKHVAQILDSRMNTKYDENDKLIREVKVITLKSKLVSDFRKDFQFYKVREINNYHHAHDAYLNAVVGTALIKKYPKLESEFVYGDYKVYDVRKMIAKSEQEIGKATAKYFFYSNIMNFFKTEITLANGEIRKRPLIETNGETGEIVWDKGRDFATVRKVLSMPQVNIVKKTEVQTGGFSKESILPKRNSDKLIARKKDWDPKKYGGFDSPTVAYSVLVVAKVEKGKSKKLKSVKELLGITIMERSSFEKNPIDFLEAKGYKEVKKDLIIKLPKYSLFELENGRKRMLASAGELQKGNELALPSKYVNFLYLASHYEKLKGSPEDNEQKQLFVEQHKHYLDEIIEQISEFSKRVILADANLDKVLSAYNKHRDKPIREQAENIIHLFTLTNLGAPAAFKYFDTTIDRKRYTSTKEVLDATLIHQSITGLYETRIDLSQLGGDGGGGGGGLDDEYRLYSPLVKPDQNIQFWLEQFPQAWAETAGMGLAKQVPPQVIQLKASATPVSVRQYPLSKEAQEGIRPHVQRLIQQGILVPVQSPWNTPLLPVRKPGTNDYRPVQDLREVNKRVQDIHPTVPNPYNLLCALPPQRSWYTVLDLKDAFFCLRLHPTSQPLFAFEWRDPGTGRTGQLTWTRLPQGFKNSPTIFNEALHRDLANFRIQHPQVTLLQYVDDLLLAGATKQDCLEGTKALLLELSDLGYRASAKKAQICRREVTYLGYSLRDGQRWLTEARKKTVVQIPAPTTAKQVREFLGKAGFCRLFIPGFATLAAPLYPLTKPKGEFSWAPEHQKAFDAIKKALLSAPALALPDVTKPFTLYVDERKGVARGVLTQTLGPWRRPVAYLSKKLDPVASGWPVCLKAIAAVAILVKDADKLTLGQNITVIAPHALENIVRQPPDRWMTNARMTHYQSLLLTERVTFAPPAALNPATLLPEETDEPVTHDCHQLLIEETGVRKDLTDIPLTGEVLTWFTDGSSYVVEGKRMAGAAVVDGTRTIWASSLPEGTSAQKAELMALTQALRLAEGKSINIYTDSRYAFATAHVHGAIYKQRGWLTSAGREIKNKEEILSLLEALHLPKRLAIIHCPGHQKAKDPISRGNQMADRVAKQAAQGVNLLPAGKRTADGSEFEKRTADGSEFESPKKKAKVE

SEQ ID NO: 247 - protein, 2088 aa, synthetic construct
MPAAKRVKLDGGDKKYSIGLDIGTNSVGWAVITDEYKVPSKKFKVLGNTDRHSIKKNLIGALLFDSGETAEATRLKRTARRRYTRRKNRICYLQEIFSNEMAKVDDSFFHRLEESFLVEEDKKHERHPIFGNIVDEVAYHEKYPTIYHLRKKLVDSTDKADLRLIYLALAHMIKFRGHFLIEGDLNPDNSDVDKLFIQLVQTYNQLFEENPINASGVDAKAILSARLSKSRRLENLIAQLPGEKKNGLFGNLIALSLGLTPNFKSNFDLAEDAKLQLSKDTYDDDLDNLLAQIGDQYADLFLAAKNLSDAILLSDILRVNTEITKAPLSASMIKRYDEHHQDLTLLKALVRQQLPEKYKEIFFDQSKNGYAGYIDGGASQEEFYKFIKPILEKMDGTEELLVKLNREDLLRKQRTFDNGSIPHQIHLGELHAILRRQEDFYPFLKDNREKIEKILTFRIPYYVGPLARGNSRFAWMTRKSEETITPWNFEEVVDKGASAQSFIERMTNFDKNLPNEKVLPKHSLLYEYFTVYNELTKVKYVTEGMRKPAFLSGEQKKAIVDLLFKTNRKVTVKQLKEDYFKKIECFDSVEISGVEDRFNASLGTYHDLLKIIKDKDFLDNEENEDILEDIVLTLTLFEDREMIEERLKTYAHLFDDKVMKQLKRRRYTGWGRLSRKLINGIRDKQSGKTILDFLKSDGFANRNFMQLIHDDSLTFKEDIQKAQVSGQGDSLHEHIANLAGSPAIKKGILQTVKVVDELVKVMGRHKPENIVIEMARENQTTQKGQKNSRERMKRIEEGIKELGSQILKEHPVENTQLQNEKLYLYYLQNGRDMYVDQELDINRLSDYDVDHIVPQSFLKDDSIDNKVLTRSDKARGKSDNVPSEEVVKKMKNYWRQLLNAKLITQRKFDNLTKAERGGLSELDKAGFIKRQLVETRQITKHVAQILDSRMNTKYDENDKLIREVKVITLKSKLVSDFRKDFQFYKVREINNYHHAHDAYLNAVVGTALIKKYPKLESEFVYGDYKVYDVRKMIAKSEQEIGKATAKYFFYSNIMNFFKTEITLANGEIRKRPLIETNGETGEIVWDKGRDFATVRKVLSMPQVNIVKKTEVQTGGFSKESILPKRNSDKLIARKKDWDPKKYGGFDSPTVAYSVLVVAKVEKGKSKKLKSVKELLGITIMERSSFEKNPIDFLEAKGYKEVKKDLIIKLPKYSLFELENGRKRMLASAGELQKGNELALPSKYVNFLYLASHYEKLKGSPEDNEQKQLFVEQHKHYLDEIIEQISEFSKRVILADANLDKVLSAYNKHRDKPIREQAENIIHLFTLTNLGAPAAFKYFDTTIDRKRYTSTKEVLDATLIHQSITGLYETRIDLSQLGGDGGEAAAKPAPGGSGGLDDEYRLYSPLVKPDQNIQFWLEQFPQAWAETAGMGLAKQVPPQVIQLKASATPVSVRQYPLSKEAQEGIRPHVQRLIQQGILVPVQSPWNTPLLPVRKPGTNDYRPVQDLREVNKRVQDIHPTVPNPYNLLCALPPQRSWYTVLDLKDAFFCLRLHPTSQPLFAFEWRDPGTGRTGQLTWTRLPQGFKNSPTIFNEALHRDLANFRIQHPQVTLLQYVDDLLLAGATKQDCLEGTKALLLELSDLGYRASAKKAQICRREVTYLGYSLRDGQRWLTEARKKTVVQIPAPTTAKQVREFLGKAGFCRLFIPGFATLAAPLYPLTKPKGEFSWAPEHQKAFDAIKKALLSAPALALPDVTKPFTLYVDERKGVARGVLTQTLGPWRRPVAYLSKKLDPVASGWPVCLKAIAAVAILVKDADKLTLGQNITVIAPHALENIVRQPPDRWMTNARMTHYQSLLLTERVTFAPPAALNPATLLPEETDEPVTHDCHQLLIEETGVRKDLTDIPLTGEVLTWFTDGSSYVVEGKRMAGAAVVDGTRTIWASSLPEGTSAQKAELMALTQALRLAEGKSINIYTDSRYAFATAHVHGAIYKQRGWLTSAGREIKNKEEILSLLEALHLPKRLAIIHCPGHQKAKDPISRGNQMADRVAKQAAQGVNLLPAGKRTADGSEFEKRTADGSEFESPKKKAKVE

SEQ ID NO: 248 - protein, 2088 aa, synthetic construct; identical to SEQ ID NO: 94

SEQ ID NO: 249 - protein, 2086 aa, synthetic construct; identical to SEQ ID NO: 60

SEQ ID NO: 250 - protein, 2088 aa, synthetic construct
MPAAKRVKLDGGDKKYSIGLDIGTNSVGWAVITDEYKVPSKKFKVLGNTDRHSIKKNLIGALLFDSGETAEATRLKRTARRRYTRRKNRICYLQEIFSNEMAKVDDSFFHRLEESFLVEEDKKHERHPIFGNIVDEVAYHEKYPTIYHLRKKLVDSTDKADLRLIYLALAHMIKFRGHFLIEGDLNPDNSDVDKLFIQLVQTYNQLFEENPINASGVDAKAILSARLSKSRRLENLIAQLPGEKKNGLFGNLIALSLGLTPNFKSNFDLAEDAKLQLSKDTYDDDLDNLLAQIGDQYADLFLAAKNLSDAILLSDILRVNTEITKAPLSASMIKRYDEHHQDLTLLKALVRQQLPEKYKEIFFDQSKNGYAGYIDGGASQEEFYKFIKPILEKMDGTEELLVKLNREDLLRKQRTFDNGSIPHQIHLGELHAILRRQEDFYPFLKDNREKIEKILTFRIPYYVGPLARGNSRFAWMTRKSEETITPWNFEEVVDKGASAQSFIERMTNFDKNLPNEKVLPKHSLLYEYFTVYNELTKVKYVTEGMRKPAFLSGEQKKAIVDLLFKTNRKVTVKQLKEDYFKKIECFDSVEISGVEDRFNASLGTYHDLLKIIKDKDFLDNEENEDILEDIVLTLTLFEDREMIEERLKTYAHLFDDKVMKQLKRRRYTGWGRLSRKLINGIRDKQSGKTILDFLKSDGFANRNFMQLIHDDSLTFKEDIQKAQVSGQGDSLHEHIANLAGSPAIKKGILQTVKVVDELVKVMGRHKPENIVIEMARENQTTQKGQKNSRERMKRIEEGIKELGSQILKEHPVENTQLQNEKLYLYYLQNGRDMYVDQELDINRLSDYDVDHIVPQSFLKDDSIDNKVLTRSDKARGKSDNVPSEEVVKKMKNYWRQLLNAKLITQRKFDNLTKAERGGLSELDKAGFIKRQLVETRQITKHVAQILDSRMNTKYDENDKLIREVKVITLKSKLVSDFRKDFQFYKVREINNYHHAHDAYLNAVVGTALIKKYPKLESEFVYGDYKVYDVRKMIAKSEQEIGKATAKYFFYSNIMNFFKTEITLANGEIRKRPLIETNGETGEIVWDKGRDFATVRKVLSMPQVNIVKKTEVQTGGFSKESILPKRNSDKLIARKKDWDPKKYGGFDSPTVAYSVLVVAKVEKGKSKKLKSVKELLGITIMERSSFEKNPIDFLEAKGYKEVKKDLIIKLPKYSLFELENGRKRMLASAGELQKGNELALPSKYVNFLYLASHYEKLKGSPEDNEQKQLFVEQHKHYLDEIIEQISEFSKRVILADANLDKVLSAYNKHRDKPIREQAENIIHLFTLTNLGAPAAFKYFDTTIDRKRYTSTKEVLDATLIHQSITGLYETRIDLSQLGGDGGGGSEAAAKGGGGGLDDEYRLYSPLVKPDQNIQFWLEQFPQAWAETAGMGLAKQVPPQVIQLKASATPVSVRQYPLSKEAQEGIRPHVQRLIQQGILVPVQSPWNTPLLPVRKPGTNDYRPVQDLREVNKRVQDIHPTVPNPYNLLCALPPQRSWYTVLDLKDAFFCLRLHPTSQPLFAFEWRDPGTGRTGQLTWTRLPQGFKNSPTIFNEALHRDLANFRIQHPQVTLLQYVDDLLLAGATKQDCLEGTKALLLELSDLGYRASAKKAQICRREVTYLGYSLRDGQRWLTEARKKTVVQIPAPTTAKQVREFLGKAGFCRLFIPGFATLAAPLYPLTKPKGEFSWAPEHQKAFDAIKKALLSAPALALPDVTKPFTLYVDERKGVARGVLTQTLGPWRRPVAYLSKKLDPVASGWPVCLKAIAAVAILVKDADKLTLGQNITVIAPHALENIVRQPPDRWMTNARMTHYQSLLLTERVTFAPPAALNPATLLPEETDEPVTHDCHQLLIEETGVRKDLTDIPLTGEVLTWFTDGSSYVVEGKRMAGAAVVDGTRTIWASSLPEGTSAQKAELMALTQALRLAEGKSINIYTDSRYAFATAHVHGAIYKQRGWLTSAGREIKNKEEILSLLEALHLPKRLAIIHCPGHQKAKDPISRGNQMADRVAKQAAQGVNLLPAGKRTADGSEFEKRTADGSEFESPKKKAKVE

SEQ ID NO: 251 - protein, 2086 aa, synthetic construct; identical to SEQ ID NO: 82

SEQ ID NO: 252 - protein, 2083 aa, synthetic construct
MPAAKRVKLDGGDKKYSIGLDIGTNSVGWAVITDEYKVPSKKFKVLGNTDRHSIKKNLIGALLFDSGETAEATRLKRTARRRYTRRKNRICYLQEIFSNEMAKVDDSFFHRLEESFLVEEDKKHERHPIFGNIVDEVAYHEKYPTIYHLRKKLVDSTDKADLRLIYLALAHMIKFRGHFLIEGDLNPDNSDVDKLFIQLVQTYNQLFEENPINASGVDAKAILSARLSKSRRLENLIAQLPGEKKNGLFGNLIALSLGLTPNFKSNFDLAEDAKLQLSKDTYDDDLDNLLAQIGDQYADLFLAAKNLSDAILLSDILRVNTEITKAPLSASMIKRYDEHHQDLTLLKALVRQQLPEKYKEIFFDQSKNGYAGYIDGGASQEEFYKFIKPILEKMDGTEELLVKLNREDLLRKQRTFDNGSIPHQIHLGELHAILRRQEDFYPFLKDNREKIEKILTFRIPYYVGPLARGNSRFAWMTRKSEETITPWNFEEVVDKGASAQSFIERMTNFDKNLPNEKVLPKHSLLYEYFTVYNELTKVKYVTEGMRKPAFLSGEQKKAIVDLLFKTNRKVTVKQLKEDYFKKIECFDSVEISGVEDRFNASLGTYHDLLKIIKDKDFLDNEENEDILEDIVLTLTLFEDREMIEERLKTYAHLFDDKVMKQLKRRRYTGWGRLSRKLINGIRDKQSGKTILDFLKSDGFANRNFMQLIHDDSLTFKEDIQKAQVSGQGDSLHEHIANLAGSPAIKKGILQTVKVVDELVKVMGRHKPENIVIEMARENQTTQKGQKNSRERMKRIEEGIKELGSQILKEHPVENTQLQNEKLYLYYLQNGRDMYVDQELDINRLSDYDVDHIVPQSFLKDDSIDNKVLTRSDKARGKSDNVPSEEVVKKMKNYWRQLLNAKLITQRKFDNLTKAERGGLSELDKAGFIKRQLVETRQITKHVAQILDSRMNTKYDENDKLIREVKVITLKSKLVSDFRKDFQFYKVREINNYHHAHDAYLNAVVGTALIKKYPKLESEFVYGDYKVYDVRKMIAKSEQEIGKATAKYFFYSNIMNFFKTEITLANGEIRKRPLIETNGETGEIVWDKGRDFATVRKVLSMPQVNIVKKTEVQTGGFSKESILPKRNSDKLIARKKDWDPKKYGGFDSPTVAYSVLVVAKVEKGKSKKLKSVKELLGITIMERSSFEKNPIDFLEAKGYKEVKKDLIIKLPKYSLFELENGRKRMLASAGELQKGNELALPSKYVNFLYLASHYEKLKGSPEDNEQKQLFVEQHKHYLDEIIEQISEFSKRVILADANLDKVLSAYNKHRDKPIREQAENIIHLFTLTNLGAPAAFKYFDTTIDRKRYTSTKEVLDATLIHQSITGLYETRIDLSQLGGDGGPAPGGSGGLDDEYRLYSPLVKPDQNIQFWLEQFPQAWAETAGMGLAKQVPPQVIQLKASATPVSVRQYPLSKEAQEGIRPHVQRLIQQGILVPVQSPWNTPLLPVRKPGTNDYRPVQDLREVNKRVQDIHPTVPNPYNLLCALPPQRSWYTVLDLKDAFFCLRLHPTSQPLFAFEWRDPGTGRTGQLTWTRLPQGFKNSPTIFNEALHRDLANFRIQHPQVTLLQYVDDLLLAGATKQDCLEGTKALLLELSDLGYRASAKKAQICRREVTYLGYSLRDGQRWLTEARKKTVVQIPAPTTAKQVREFLGKAGFCRLFIPGFATLAAPLYPLTKPKGEFSWAPEHQKAFDAIKKALLSAPALALPDVTKPFTLYVDERKGVARGVLTQTLGPWRRPVAYLSKKLDPVASGWPVCLKAIAAVAILVKDADKLTLGQNITVIAPHALENIVRQPPDRWMTNARMTHYQSLLLTERVTFAPPAALNPATLLPEETDEPVTHDCHQLLIEETGVRKDLTDIPLTGEVLTWFTDGSSYVVEGKRMAGAAVVDGTRTIWASSLPEGTSAQKAELMALTQALRLAEGKSINIYTDSRYAFATAHVHGAIYKQRGWLTSAGREIKNKEEILSLLEALHLPKRLAIIHCPGHQKAKDPISRGNQMADRVAKQAAQGVNLLPAGKRTADGSEFEKRTADGSEFESPKKKAKVE

SEQ ID NO: 253 - protein, 2083 aa, synthetic construct; identical to SEQ ID NO: 59

SEQ ID NO: 254 - protein, 2088 aa, synthetic construct
MPAAKRVKLDGGDKKYSIGLDIGTNSVGWAVITDEYKVPSKKFKVLGNTDRHSIKKNLIGALLFDSGETAEATRLKRTARRRYTRRKNRICYLQEIFSNEMAKVDDSFFHRLEESFLVEEDKKHERHPIFGNIVDEVAYHEKYPTIYHLRKKLVDSTDKADLRLIYLALAHMIKFRGHFLIEGDLNPDNSDVDKLFIQLVQTYNQLFEENPINASGVDAKAILSARLSKSRRLENLIAQLPGEKKNGLFGNLIALSLGLTPNFKSNFDLAEDAKLQLSKDTYDDDLDNLLAQIGDQYADLFLAAKNLSDAILLSDILRVNTEITKAPLSASMIKRYDEHHQDLTLLKALVRQQLPEKYKEIFFDQSKNGYAGYIDGGASQEEFYKFIKPILEKMDGTEELLVKLNREDLLRKQRTFDNGSIPHQIHLGELHAILRRQEDFYPFLKDNREKIEKILTFRIPYYVGPLARGNSRFAWMTRKSEETITPWNFEEVVDKGASAQSFIERMTNFDKNLPNEKVLPKHSLLYEYFTVYNELTKVKYVTEGMRKPAFLSGEQKKAIVDLLFKTNRKVTVKQLKEDYFKKIECFDSVEISGVEDRFNASLGTYHDLLKIIKDKDFLDNEENEDILEDIVLTLTLFEDREMIEERLKTYAHLFDDKVMKQLKRRRYTGWGRLSRKLINGIRDKQSGKTILDFLKSDGFANRNFMQLIHDDSLTFKEDIQKAQVSGQGDSLHEHIANLAGSPAIKKGILQTVKVVDELVKVMGRHKPENIVIEMARENQTTQKGQKNSRERMKRIEEGIKELGSQILKEHPVENTQLQNEKLYLYYLQNGRDMYVDQELDINRLSDYDVDHIVPQSFLKDDSIDNKVLTRSDKARGKSDNVPSEEVVKKMKNYWRQLLNAKLITQRKFDNLTKAERGGLSELDKAGFIKRQLVETRQITKHVAQILDSRMNTKYDENDKLIREVKVITLKSKLVSDFRKDFQFYKVREINNYHHAHDAYLNAVVGTALIKKYPKLESEFVYGDYKVYDVRKMIAKSEQEIGKATAKYFFYSNIMNFFKTEITLANGEIRKRPLIETNGETGEIVWDKGRDFATVRKVLSMPQVNIVKKTEVQTGGFSKESILPKRNSDKLIARKKDWDPKKYGGFDSPTVAYSVLVVAKVEKGKSKKLKSVKELLGITIMERSSFEKNPIDFLEAKGYKEVKKDLIIKLPKYSLFELENGRKRMLASAGELQKGNELALPSKYVNFLYLASHYEKLKGSPEDNEQKQLFVEQHKHYLDEIIEQISEFSKRVILADANLDKVLSAYNKHRDKPIREQAENIIHLFTLTNLGAPAAFKYFDTTIDRKRYTSTKEVLDATLIHQSITGLYETRIDLSQLGGDGGGSSGGSEAAAKGGLDDEYRLYSPLVKPDQNIQFWLEQFPQAWAETAGMGLAKQVPPQVIQLKASATPVSVRQYPLSKEAQEGIRPHVQRLIQQGILVPVQSPWNTPLLPVRKPGTNDYRPVQDLREVNKRVQDIHPTVPNPYNLLCALPPQRSWYTVLDLKDAFFCLRLHPTSQPLFAFEWRDPGTGRTGQLTWTRLPQGFKNSPTIFNEALHRDLANFRIQHPQVTLLQYVDDLLLAGATKQDCLEGTKALLLELSDLGYRASAKKAQICRREVTYLGYSLRDGQRWLTEARKKTVVQIPAPTTAKQVREFLGKAGFCRLFIPGFATLAAPLYPLTKPKGEFSWAPEHQKAFDAIKKALLSAPALALPDVTKPFTLYVDERKGVARGVLTQTLGPWRRPVAYLSKKLDPVASGWPVCLKAIAAVAILVKDADKLTLGQNITVIAPHALENIVRQPPDRWMTNARMTHYQSLLLTERVTFAPPAALNPATLLPEETDEPVTHDCHQLLIEETGVRKDLTDIPLTGEVLTWFTDGSSYVVEGKRMAGAAVVDGTRTIWASSLPEGTSAQKAELMALTQALRLAEGKSINIYTDSRYAFATAHVHGAIYKQRGWLTSAGREIKNKEEILSLLEALHLPKRLAIIHCPGHQKAKDPISRGNQMADRVAKQAAQGVNLLPAGKRTADGSEFEKRTADGSEFESPKKKAKVE

SEQ ID NO: 255 - protein, 2088 aa, synthetic construct; identical to SEQ ID NO: 86

SEQ ID NO: 256 - protein, 2107 aa, synthetic construct
MPAAKRVKLDGGDKKYSIGLDIGTNSVGWAVITDEYKVPSKKFKVLGNTDRHSIKKNLIGALLFDSGETAEATRLKRTARRRYTRRKNRICYLQEIFSNEMAKVDDSFFHRLEESFLVEEDKKHERHPIFGNIVDEVAYHEKYPTIYHLRKKLVDSTDKADLRLIYLALAHMIKFRGHFLIEGDLNPDNSDVDKLFIQLVQTYNQLFEENPINASGVDAKAILSARLSKSRRLENLIAQLPGEKKNGLFGNLIALSLGLTPNFKSNFDLAEDAKLQLSKDTYDDDLDNLLAQIGDQYADLFLAAKNLSDAILLSDILRVNTEITKAPLSASMIKRYDEHHQDLTLLKALVRQQLPEKYKEIFFDQSKNGYAGYIDGGASQEEFYKFIKPILEKMDGTEELLVKLNREDLLRKQRTFDNGSIPHQIHLGELHAILRRQEDFYPFLKDNREKIEKILTFRIPYYVGPLARGNSRFAWMTRKSEETITPWNFEEVVDKGASAQSFIERMTNFDKNLPNEKVLPKHSLLYEYFTVYNELTKVKYVTEGMRKPAFLSGEQKKAIVDLLFKTNRKVTVKQLKEDYFKKIECFDSVEISGVEDRFNASLGTYHDLLKIIKDKDFLDNEENEDILEDIVLTLTLFEDREMIEERLKTYAHLFDDKVMKQLKRRRYTGWGRLSRKLINGIRDKQSGKTILDFLKSDGFANRNFMQLIHDDSLTFKEDIQKAQVSGQGDSLHEHIANLAGSPAIKKGILQTVKVVDELVKVMGRHKPENIVIEMARENQTTQKGQKNSRERMKRIEEGIKELGSQILKEHPVENTQLQNEKLYLYYLQNGRDMYVDQELDINRLSDYDVDHIVPQSFLKDDSIDNKVLTRSDKARGKSDNVPSEEVVKKMKNYWRQLLNAKLITQRKFDNLTKAERGGLSELDKAGFIKRQLVETRQITKHVAQILDSRMNTKYDENDKLIREVKVITLKSKLVSDFRKDFQFYKVREINNYHHAHDAYLNAVVGTALIKKYPKLESEFVYGDYKVYDVRKMIAKSEQEIGKATAKYFFYSNIMNFFKTEITLANGEIRKRPLIETNGETGEIVWDKGRDFATVRKVLSMPQVNIVKKTEVQTGGFSKESILPKRNSDKLIARKKDWDPKKYGGFDSPTVAYSVLVVAKVEKGKSKKLKSVKELLGITIMERSSFEKNPIDFLEAKGYKEVKKDLIIKLPKYSLFELENGRKRMLASAGELQKGNELALPSKYVNFLYLASHYEKLKGSPEDNEQKQLFVEQHKHYLDEIIEQISEFSKRVILADANLDKVLSAYNKHRDKPIREQAENIIHLFTLTNLGAPAAFKYFDTTIDRKRYTSTKEVLDATLIHQSITGLYETRIDLSQLGGDGGGGGGSGGGGSGGGGSGGGGSGGGGSGGGGSGGLDDEYRLYSPLVKPDQNIQFWLEQFPQAWAETAGMGLAKQVPPQVIQLKASATPVSVRQYPLSKEAQEGIRPHVQRLIQQGILVPVQSPWNTPLLPVRKPGTNDYRPVQDLREVNKRVQDIHPTVPNPYNLLCALPPQRSWYTVLDLKDAFFCLRLHPTSQPLFAFEWRDPGTGRTGQLTWTRLPQGFKNSPTIFNEALHRDLANFRIQHPQVTLLQYVDDLLLAGATKQDCLEGTKALLLELSDLGYRASAKKAQICRREVTYLGYSLRDGQRWLTEARKKTVVQIPAPTTAKQVREFLGKAGFCRLFIPGFATLAAPLYPLTKPKGEFSWAPEHQKAFDAIKKALLSAPALALPDVTKPFTLYVDERKGVARGVLTQTLGPWRRPVAYLSKKLDPVASGWPVCLKAIAAVAILVKDADKLTLGQNITVIAPHALENIVRQPPDRWMTNARMTHYQSLLLTERVTFAPPAALNPATLLPEETDEPVTHDCHQLLIEETGVRKDLTDIPLTGEVLTWFTDGSSYVVEGKRMAGAAVVDGTRTIWASSLPEGTSAQKAELMALTQALRLAEGKSINIYTDSRYAFATAHVHGAIYKQRGWLTSAGREIKNKEEILSLLEALHLPKRLAIIHCPGHQKAKDPISRGNQMADRVAKQAAQGVNLLPAGKRTADGSEFEKRTADGSEFESPKKKAKVE

SEQ ID NO: 257 - protein, 2086 aa, synthetic construct; identical to SEQ ID NO: 64

SEQ ID NO: 258 - protein, 2088 aa, synthetic construct
MPAAKRVKLDGGDKKYSIGLDIGTNSVGWAVITDEYKVPSKKFKVLGNTDRHSIKKNLIGALLFDSGETAEATRLKRTARRRYTRRKNRICYLQEIFSNEMAKVDDSFFHRLEESFLVEEDKKHERHPIFGNIVDEVAYHEKYPTIYHLRKKLVDSTDKADLRLIYLALAHMIKFRGHFLIEGDLNPDNSDVDKLFIQLVQTYNQLFEENPINASGVDAKAILSARLSKSRRLENLIAQLPGEKKNGLFGNLIALSLGLTPNFKSNFDLAEDAKLQLSKDTYDDDLDNLLAQIGDQYADLFLAAKNLSDAILLSDILRVNTEITKAPLSASMIKRYDEHHQDLTLLKALVRQQLPEKYKEIFFDQSKNGYAGYIDGGASQEEFYKFIKPILEKMDGTEELLVKLNREDLLRKQRTFDNGSIPHQIHLGELHAILRRQEDFYPFLKDNREKIEKILTFRIPYYVGPLARGNSRFAWMTRKSEETITPWNFEEVVDKGASAQSFIERMTNFDKNLPNEKVLPKHSLLYEYFTVYNELTKVKYVTEGMRKPAFLSGEQKKAIVDLLFKTNRKVTVKQLKEDYFKKIECFDSVEISGVEDRFNASLGTYHDLLKIIKDKDFLDNEENEDILEDIVLTLTLFEDREMIEERLKTYAHLFDDKVMKQLKRRRYTGWGRLSRKLINGIRDKQSGKTILDFLKSDGFANRNFMQLIHDDSLTFKEDIQKAQVSGQGDSLHEHIANLAGSPAIKKGILQTVKVVDELVKVMGRHKPENIVIEMARENQTTQKGQKNSRERMKRIEEGIKELGSQILKEHPVENTQLQNEKLYLYYLQNGRDMYVDQELDINRLSDYDVDHIVPQSFLKDDSIDNKVLTRSDKARGKSDNVPSEEVVKKMKNYWRQLLNAKLITQRKFDNLTKAERGGLSELDKAGFIKRQLVETRQITKHVAQILDSRMNTKYDENDKLIREVKVITLKSKLVSDFRKDFQFYKVREINNYHHAHDAYLNAVVGTALIKKYPKLESEFVYGDYKVYDVRKMIAKSEQEIGKATAKYFFYSNIMNFFKTEITLANGEIRKRPLIETNGETGEIVWDKGRDFATVRKVLSMPQVNIVKKTEVQTGGFSKESILPKRNSDKLIARKKDWDPKKYGGFDSPTVAYSVLVVAKVEKGKSKKLKSVKELLGITIMERSSFEKNPIDFLEAKGYKEVKKDLIIKLPKYSLFELENGRKRMLASAGELQKGNELALPSKYVNFLYLASHYEKLKGSPEDNEQKQLFVEQHKHYLDEIIEQISEFSKRVILADANLDKVLSAYNKHRDKPIREQAENIIHLFTLTNLGAPAAFKYFDTTIDRKRYTSTKEVLDATLIHQSITGLYETRIDLSQLGGDGGGSSEAAAKGGSGGLDDEYRLYSPLVKPDQNIQFWLEQFPQAWAETAGMGLAKQVPPQVIQLKASATPVSVRQYPLSKEAQEGIRPHVQRLIQQGILVPVQSPWNTPLLPVRKPGTNDYRPVQDLREVNKRVQDIHPTVPNPYNLLCALPPQRSWYTVLDLKDAFFCLRLHPTSQPLFAFEWRDPGTGRTGQLTWTRLPQGFKNSPTIFNEALHRDLANFRIQHPQVTLLQYVDDLLLAGATKQDCLEGTKALLLELSDLGYRASAKKAQICRREVTYLGYSLRDGQRWLTEARKKTVVQIPAPTTAKQVREFLGKAGFCRLFIPGFATLAAPLYPLTKPKGEFSWAPEHQKAFDAIKKALLSAPALALPDVTKPFTLYVDERKGVARGVLTQTLGPWRRPVAYLSKKLDPVASGWPVCLKAIAAVAILVKDADKLTLGQNITVIAPHALENIVRQPPDRWMTNARMTHYQSLLLTERVTFAPPAALNPATLLPEETDEPVTHDCHQLLIEETGVRKDLTDIPLTGEVLTWFTDGSSYVVEGKRMAGAAVVDGTRTIWASSLPEGTSAQKAELMALTQALRLAEGKSINIYTDSRYAFATAHVHGAIYKQRGWLTSAGREIKNKEEILSLLEALHLPKRLAIIHCPGHQKAKDPISRGNQMADRVAKQAAQGVNLLPAGKRTADGSEFEKRTADGSEFESPKKKAKVE

SEQ ID NO: 259 - protein, 2083 aa, synthetic construct
MPAAKRVKLDGGDKKYSIGLDIGTNSVGWAVITDEYKVPSKKFKVLGNTDRHSIKKNLIGALLFDSGETAEATRLKRTARRRYTRRKNRICYLQEIFSNEMAKVDDSFFHRLEESFLVEEDKKHERHPIFGNIVDEVAYHEKYPTIYHLRKKLVDSTDKADLRLIYLALAHMIKFRGHFLIEGDLNPDNSDVDKLFIQLVQTYNQLFEENPINASGVDAKAILSARLSKSRRLENLIAQLPGEKKNGLFGNLIALSLGLTPNFKSNFDLAEDAKLQLSKDTYDDDLDNLLAQIGDQYADLFLAAKNLSDAILLSDILRVNTEITKAPLSASMIKRYDEHHQDLTLLKALVRQQLPEKYKEIFFDQSKNGYAGYIDGGASQEEFYKFIKPILEKMDGTEELLVKLNREDLLRKQRTFDNGSIPHQIHLGELHAILRRQEDFYPFLKDNREKIEKILTFRIPYYVGPLARGNSRFAWMTRKSEETITPWNFEEVVDKGASAQSFIERMTNFDKNLPNEKVLPKHSLLYEYFTVYNELTKVKYVTEGMRKPAFLSGEQKKAIVDLLFKTNRKVTVKQLKEDYFKKIECFDSVEISGVEDRFNASLGTYHDLLKIIKDKDFLDNEENEDILEDIVLTLTLFEDREMIEERLKTYAHLFDDKVMKQLKRRRYTGWGRLSRKLINGIRDKQSGKTILDFLKSDGFANRNFMQLIHDDSLTFKEDIQKAQVSGQGDSLHEHIANLAGSPAIKKGILQTVKVVDELVKVMGRHKPENIVIEMARENQTTQKGQKNSRERMKRIEEGIKELGSQILKEHPVENTQLQNEKLYLYYLQNGRDMYVDQELDINRLSDYDVDHIVPQSFLKDDSIDNKVLTRSDKARGKSDNVPSEEVVKKMKNYWRQLLNAKLITQRKFDNLTKAERGGLSELDKAGFIKRQLVETRQITKHVAQILDSRMNTKYDENDKLIREVKVITLKSKLVSDFRKDFQFYKVREINNYHHAHDAYLNAVVGTALIKKYPKLESEFVYGDYKVYDVRKMIAKSEQEIGKATAKYFFYSNIMNFFKTEITLANGEIRKRPLIETNGETGEIVWDKGRDFATVRKVLSMPQVNIVKKTEVQTGGFSKESILPKRNSDKLIARKKDWDPKKYGGFDSPTVAYSVLVVAKVEKGKSKKLKSVKELLGITIMERSSFEKNPIDFLEAKGYKEVKKDLIIKLPKYSLFELENGRKRMLASAGELQKGNELALPSKYVNFLYLASHYEKLKGSPEDNEQKQLFVEQHKHYLDEIIEQISEFSKRVILADANLDKVLSAYNKHRDKPIREQAENIIHLFTLTNLGAPAAFKYFDTTIDRKRYTSTKEVLDATLIHQSITGLYETRIDLSQLGGDGGGGSGGSGGLDDEYRLYSPLVKPDQNIQFWLEQFPQAWAETAGMGLAKQVPPQVIQLKASATPVSVRQYPLSKEAQEGIRPHVQRLIQQGILVPVQSPWNTPLLPVRKPGTNDYRPVQDLREVNKRVQDIHPTVPNPYNLLCALPPQRSWYTVLDLKDAFFCLRLHPTSQPLFAFEWRDPGTGRTGQLTWTRLPQGFKNSPTIFNEALHRDLANFRIQHPQVTLLQYVDDLLLAGATKQDCLEGTKALLLELSDLGYRASAKKAQICRREVTYLGYSLRDGQRWLTEARKKTVVQIPAPTTAKQVREFLGKAGFCRLFIPGFATLAAPLYPLTKPKGEFSWAPEHQKAFDAIKKALLSAPALALPDVTKPFTLYVDERKGVARGVLTQTLGPWRRPVAYLSKKLDPVASGWPVCLKAIAAVAILVKDADKLTLGQNITVIAPHALENIVRQPPDRWMTNARMTHYQSLLLTERVTFAPPAALNPATLLPEETDEPVTHDCHQLLIEETGVRKDLTDIPLTGEVLTWFTDGSSYVVEGKRMAGAAVVDGTRTIWASSLPEGTSAQKAELMALTQALRLAEGKSINIYTDSRYAFATAHVHGAIYKQRGWLTSAGREIKNKEEILSLLEALHLPKRLAIIHCPGHQKAKDPISRGNQMADRVAKQAAQGVNLLPAGKRTADGSEFEKRTADGSEFESPKKKAKVE

SEQ ID NO: 260 - protein, 2088 aa, synthetic construct; identical to SEQ ID NO: 93

SEQ ID NO: 261 - protein, 2083 aa, synthetic construct; identical to SEQ ID NO: 81

SEQ ID NO: 262 - protein, 2080 aa, synthetic construct
MPAAKRVKLDGGDKKYSIGLDIGTNSVGWAVITDEYKVPSKKFKVLGNTDRHSIKKNLIGALLFDSGETAEATRLKRTARRRYTRRKNRICYLQEIFSNEMAKVDDSFFHRLEESFLVEEDKKHERHPIFGNIVDEVAYHEKYPTIYHLRKKLVDSTDKADLRLIYLALAHMIKFRGHFLIEGDLNPDNSDVDKLFIQLVQTYNQLFEENPINASGVDAKAILSARLSKSRRLENLIAQLPGEKKNGLFGNLIALSLGLTPNFKSNFDLAEDAKLQLSKDTYDDDLDNLLAQIGDQYADLFLAAKNLSDAILLSDILRVNTEITKAPLSASMIKRYDEHHQDLTLLKALVRQQLPEKYKEIFFDQSKNGYAGYIDGGASQEEFYKFIKPILEKMDGTEELLVKLNREDLLRKQRTFDNGSIPHQIHLGELHAILRRQEDFYPFLKDNREKIEKILTFRIPYYVGPLARGNSRFAWMTRKSEETITPWNFEEVVDKGASAQSFIERMTNFDKNLPNEKVLPKHSLLYEYFTVYNELTKVKYVTEGMRKPAFLSGEQKKAIVDLLFKTNRKVTVKQLKEDYFKKIECFDSVEISGVEDRFNASLGTYHDLLKIIKDKDFLDNEENEDILEDIVLTLTLFEDREMIEERLKTYAHLFDDKVMKQLKRRRYTGWGRLSRKLINGIRDKQSGKTILDFLKSDGFANRNFMQLIHDDSLTFKEDIQKAQVSGQGDSLHEHIANLAGSPAIKKGILQTVKVVDELVKVMGRHKPENIVIEMARENQTTQKGQKNSRERMKRIEEGIKELGSQILKEHPVENTQLQNEKLYLYYLQNGRDMYVDQELDINRLSDYDVDHIVPQSFLKDDSIDNKVLTRSDKARGKSDNVPSEEVVKKMKNYWRQLLNAKLITQRKFDNLTKAERGGLSELDKAGFIKRQLVETRQITKHVAQILDSRMNTKYDENDKLIREVKVITLKSKLVSDFRKDFQFYKVREINNYHHAHDAYLNAVVGTALIKKYPKLESEFVYGDYKVYDVRKMIAKSEQEIGKATAKYFFYSNIMNFFKTEITLANGEIRKRPLIETNGETGEIVWDKGRDFATVRKVLSMPQVNIVKKTEVQTGGFSKESILPKRNSDKLIARKKDWDPKKYGGFDSPTVAYSVLVVAKVEKGKSKKLKSVKELLGITIMERSSFEKNPIDFLEAKGYKEVKKDLIIKLPKYSLFELENGRKRMLASAGELQKGNELALPSKYVNFLYLASHYEKLKGSPEDNEQKQLFVEQHKHYLDEIIEQISEFSKRVILADANLDKVLSAYNKHRDKPIREQAENIIHLFTLTNLGAPAAFKYFDTTIDRKRYTSTKEVLDATLIHQSITGLYETRIDLSQLGGDGGGGSGGLDDEYRLYSPLVKPDQNIQFWLEQFPQAWAETAGMGLAKQVPPQVIQLKASATPVSVRQYPLSKEAQEGIRPHVQRLIQQGILVPVQSPWNTPLLPVRKPGTNDYRPVQDLREVNKRVQDIHPTVPNPYNLLCALPPQRSWYTVLDLKDAFFCLRLHPTSQPLFAFEWRDPGTGRTGQLTWTRLPQGFKNSPTIFNEALHRDLANFRIQHPQVTLLQYVDDLLLAGATKQDCLEGTKALLLELSDLGYRASAKKAQICRREVTYLGYSLRDGQRWLTEARKKTVVQIPAPTTAKQVREFLGKAGFCRLFIPGFATLAAPLYPLTKPKGEFSWAPEHQKAFDAIKKALLSAPALALPDVTKPFTLYVDERKGVARGVLTQTLGPWRRPVAYLSKKLDPVASGWPVCLKAIAAVAILVKDADKLTLGQNITVIAPHALENIVRQPPDRWMTNARMTHYQSLLLTERVTFAPPAALNPATLLPEETDEPVTHDCHQLLIEETGVRKDLTDIPLTGEVLTWFTDGSSYVVEGKRMAGAAVVDGTRTIWASSLPEGTSAQKAELMALTQALRLAEGKSINIYTDSRYAFATAHVHGAIYKQRGWLTSAGREIKNKEEILSLLEALHLPKRLAIIHCPGHQKAKDPISRGNQMADRVAKQAAQGVNLLPAGKRTADGSEFEKRTADGSEFESPKKKAKVE

SEQ ID NO: 263 - protein, 2088 aa, synthetic construct; identical to SEQ ID NO: 92

SEQ ID NO: 264 - protein, 2088 aa, synthetic construct; identical to SEQ ID NO: 53

SEQ ID NO: 265 - protein, 2083 aa, synthetic construct; identical to SEQ ID NO: 79

SEQ ID NO: 266 - protein, 2082 aa, synthetic construct
MPAAKRVKLDGGDKKYSIGLDIGTNSVGWAVITDEYKVPSKKFKVLGNTDRHSIKKNLIGALLFDSGETAEATRLKRTARRRYTRRKNRICYLQEIFSNEMAKVDDSFFHRLEESFLVEEDKKHERHPIFGNIVDEVAYHEKYPTIYHLRKKLVDSTDKADLRLIYLALAHMIKFRGHFLIEGDLNPDNSDVDKLFIQLVQTYNQLFEENPINASGVDAKAILSARLSKSRRLENLIAQLPGEKKNGLFGNLIALSLGLTPNFKSNFDLAEDAKLQLSKDTYDDDLDNLLAQIGDQYADLFLAAKNLSDAILLSDILRVNTEITKAPLSASMIKRYDEHHQDLTLLKALVRQQLPEKYKEIFFDQSKNGYAGYIDGGASQEEFYKFIKPILEKMDGTEELLVKLNREDLLRKQRTFDNGSIPHQIHLGELHAILRRQEDFYPFLKDNREKIEKILTFRIPYYVGPLARGNSRFAWMTRKSEETITPWNFEEVVDKGASAQSFIERMTNFDKNLPNEKVLPKHSLLYEYFTVYNELTKVKYVTEGMRKPAFLSGEQKKAIVDLLFKTNRKVTVKQLKEDYFKKIECFDSVEISGVEDRFNASLGTYHDLLKIIKDKDFLDNEENEDILEDIVLTLTLFEDREMIEERLKTYAHLFDDKVMKQLKRRRYTGWGRLSRKLINGIRDKQSGKTILDFLKSDGFANRNFMQLIHDDSLTFKEDIQKAQVSGQGDSLHEHIANLAGSPAIKKGILQTVKVVDELVKVMGRHKPENIVIEMARENQTTQKGQKNSRERMKRIEEGIKELGSQILKEHPVENTQLQNEKLYLYYLQNGRDMYVDQELDINRLSDYDVDHIVPQSFLKDDSIDNKVLTRSDKARGKSDNVPSEEVVKKMKNYWRQLLNAKLITQRKFDNLTKAERGGLSELDKAGFIKRQLVETRQITKHVAQILDSRMNTKYDENDKLIREVKVITLKSKLVSDFRKDFQFYKVREINNYHHAHDAYLNAVVGTALIKKYPKLESEFVYGDYKVYDVRKMIAKSEQEIGKATAKYFFYSNIMNFFKTEITLANGEIRKRPLIETNGETGEIVWDKGRDFATVRKVLSMPQVNIVKKTEVQTGGFSKESILPKRNSDKLIARKKDWDPKKYGGFDSPTVAYSVLVVAKVEKGKSKKLKSVKELLGITIMERSSFEKNPIDFLEAKGYKEVKKDLIIKLPKYSLFELENGRKRMLASAGELQKGNELALPSKYVNFLYLASHYEKLKGSPEDNEQKQLFVEQHKHYLDEIIEQISEFSKRVILADANLDKVLSAYNKHRDKPIREQAENIIHLFTLTNLGAPAAFKYFDTTIDRKRYTSTKEVLDATLIHQSITGLYETRIDLSQLGGDGGPAPAPGGLDDEYRLYSPLVKPDQNIQFWLEQFPQAWAETAGMGLAKQVPPQVIQLKASATPVSVRQYPLSKEAQEGIRPHVQRLIQQGILVPVQSPWNTPLLPVRKPGTNDYRPVQDLREVNKRVQDIHPTVPNPYNLLCALPPQRSWYTVLDLKDAFFCLRLHPTSQPLFAFEWRDPGTGRTGQLTWTRLPQGFKNSPTIFNEALHRDLANFRIQHPQVTLLQYVDDLLLAGATKQDCLEGTKALLLELSDLGYRASAKKAQICRREVTYLGYSLRDGQRWLTEARKKTVVQIPAPTTAKQVREFLGKAGFCRLFIPGFATLAAPLYPLTKPKGEFSWAPEHQKAFDAIKKALLSAPALALPDVTKPFTLYVDERKGVARGVLTQTLGPWRRPVAYLSKKLDPVASGWPVCLKAIAAVAILVKDADKLTLGQNITVIAPHALENIVRQPPDRWMTNARMTHYQSLLLTERVTFAPPAALNPATLLPEETDEPVTHDCHQLLIEETGVRKDLTDIPLTGEVLTWFTDGSSYVVEGKRMAGAAVVDGTRTIWASSLPEGTSAQKAELMALTQALRLAEGKSINIYTDSRYAFATAHVHGAIYKQRGWLTSAGREIKNKEEILSLLEALHLPKRLAIIHCPGHQKAKDPISRGNQMADRVAKQAAQGVNLLPAGKRTADGSEFEKRTADGSEFESPKKKAKVE

SEQ ID NO: 267 - protein, 2086 aa, synthetic construct
MPAAKRVKLDGGDKKYSIGLDIGTNSVGWAVITDEYKVPSKKFKVLGNTDRHSIKKNLIGALLFDSGETAEATRLKRTARRRYTRRKNRICYLQEIFSNEMAKVDDSFFHRLEESFLVEEDKKHERHPIFGNIVDEVAYHEKYPTIYHLRKKLVDSTDKADLRLIYLALAHMIKFRGHFLIEGDLNPDNSDVDKLFIQLVQTYNQLFEENPINASGVDAKAILSARLSKSRRLENLIAQLPGEKKNGLFGNLIALSLGLTPNFKSNFDLAEDAKLQLSKDTYDDDLDNLLAQIGDQYADLFLAAKNLSDAILLSDILRVNTEITKAPLSASMIKRYDEHHQDLTLLKALVRQQLPEKYKEIFFDQSKNGYAGYIDGGASQEEFYKFIKPILEKMDGTEELLVKLNREDLLRKQRTFDNGSIPHQIHLGELHAILRRQEDFYPFLKDNREKIEKILTFRIPYYVGPLARGNSRFAWMTRKSEETITPWNFEEVVDKGASAQSFIERMTNFDKNLPNEKVLPKHSLLYEYFTVYNELTKVKYVTEGMRKPAFLSGEQKKAIVDLLFKTNRKVTVKQLKEDYFKKIECFDSVEISGVEDRFNASLGTYHDLLKIIKDKDFLDNEENEDILEDIVLTLTLFEDREMIEERLKTYAHLFDDKVMKQLKRRRYTGWGRLSRKLINGIRDKQSGKTILDFLKSDGFANRNFMQLIHDDSLTFKEDIQKAQVSGQGDSLHEHIANLAGSPAIKKGILQTVKVVDELVKVMGRHKPENIVIEMARENQTTQKGQKNSRERMKRIEEGIKELGSQILKEHPVENTQLQNEKLYLYYLQNGRDMYVDQELDINRLSDYDVDHIVPQSFLKDDSIDNKVLTRSDKARGKSDNVPSEEVVKKMKNYWRQLLNAKLITQRKFDNLTKAERGGLSELDKAGFIKRQLVETRQITKHVAQILDSRMNTKYDENDKLIREVKVITLKSKLVSDFRKDFQFYKVREINNYHHAHDAYLNAVVGTALIKKYPKLESEFVYGDYKVYDVRKMIAKSEQEIGKATAKYFFYSNIMNFFKTEITLANGEIRKRPLIETNGETGEIVWDKGRDFATVRKVLSMPQVNIVKKTEVQTGGFSKESILPKRNSDKLIARKKDWDPKKYGGFDSPTVAYSVLVVAKVEKGKSKKLKSVKELLGITIMERSSFEKNPIDFLEAKGYKEVKKDLIIKLPKYSLFELENGRKRMLASAGELQKGNELALPSKYVNFLYLASHYEKLKGSPEDNEQKQLFVEQHKHYLDEIIEQISEFSKRVILADANLDKVLSAYNKHRDKPIREQAENIIHLFTLTNLGAPAAFKYFDTTIDRKRYTSTKEVLDATLIHQSITGLYETRIDLSQLGGDGGGGSPAPGSSGGLDDEYRLYSPLVKPDQNIQFWLEQFPQAWAETAGMGLAKQVPPQVIQLKASATPVSVRQYPLSKEAQEGIRPHVQRLIQQGILVPVQSPWNTPLLPVRKPGTNDYRPVQDLREVNKRVQDIHPTVPNPYNLLCALPPQRSWYTVLDLKDAFFCLRLHPTSQPLFAFEWRDPGTGRTGQLTWTRLPQGFKNSPTIFNEALHRDLANFRIQHPQVTLLQYVDDLLLAGATKQDCLEGTKALLLELSDLGYRASAKKAQICRREVTYLGYSLRDGQRWLTEARKKTVVQIPAPTTAKQVREFLGKAGFCRLFIPGFATLAAPLYPLTKPKGEFSWAPEHQKAFDAIKKALLSAPALALPDVTKPFTLYVDERKGVARGVLTQTLGPWRRPVAYLSKKLDPVASGWPVCLKAIAAVAILVKDADKLTLGQNITVIAPHALENIVRQPPDRWMTNARMTHYQSLLLTERVTFAPPAALNPATLLPEETDEPVTHDCHQLLIEETGVRKDLTDIPLTGEVLTWFTDGSSYVVEGKRMAGAAVVDGTRTIWASSLPEGTSAQKAELMALTQALRLAEGKSINIYTDSRYAFATAHVHGAIYKQRGWLTSAGREIKNKEEILSLLEALHLPKRLAIIHCPGHQKAKDPISRGNQMADRVAKQAAQGVNLLPAGKRTADGSEFEKRTADGSEFESPKKKAKVE

SEQ ID NO: 268 - protein, 2086 aa, synthetic construct; identical to SEQ ID NO: 38

SEQ ID NO: 269 - protein, 2080 aa, synthetic construct
MPAAKRVKLDGGDKKYSIGLDIGTNSVGWAVITDEYKVPSKKFKVLGNTDRHSIKKNLIGALLFDSGETAEATRLKRTARRRYTRRKNRICYLQEIFSNEMAKVDDSFFHRLEESFLVEEDKKHERHPIFGNIVDEVAYHEKYPTIYHLRKKLVDSTDKADLRLIYLALAHMIKFRGHFLIEGDLNPDNSDVDKLFIQLVQTYNQLFEENPINASGVDAKAILSARLSKSRRLENLIAQLPGEKKNGLFGNLIALSLGLTPNFKSNFDLAEDAKLQLSKDTYDDDLDNLLAQIGDQYADLFLAAKNLSDAILLSDILRVNTEITKAPLSASMIKRYDEHHQDLTLLKALVRQQLPEKYKEIFFDQSKNGYAGYIDGGASQEEFYKFIKPILEKMDGTEELLVKLNREDLLRKQRTFDNGSIPHQIHLGELHAILRRQEDFYPFLKDNREKIEKILTFRIPYYVGPLARGNSRFAWMTRKSEETITPWNFEEVVDKGASAQSFIERMTNFDKNLPNEKVLPKHSLLYEYFTVYNELTKVKYVTEGMRKPAFLSGEQKKAIVDLLFKTNRKVTVKQLKEDYFKKIECFDSVEISGVEDRFNASLGTYHDLLKIIKDKDFLDNEENEDILEDIVLTLTLFEDREMIEERLKTYAHLFDDKVMKQLKRRRYTGWGRLSRKLINGIRDKQSGKTILDFLKSDGFANRNFMQLIHDDSLTFKEDIQKAQVSGQGDSLHEHIANLAGSPAIKKGILQTVKVVDELVKVMGRHKPENIVIEMARENQTTQKGQKNSRERMKRIEEGIKELGSQILKEHPVENTQLQNEKLYLYYLQNGRDMYVDQELDINRLSDYDVDHIVPQSFLKDDSIDNKVLTRSDKARGKSDNVPSEEVVKKMKNYWRQLLNAKLITQRKFDNLTKAERGGLSELDKAGFIKRQLVETRQITKHVAQILDSRMNTKYDENDKLIREVKVITLKSKLVSDFRKDFQFYKVREINNYHHAHDAYLNAVVGTALIKKYPKLESEFVYGDYKVYDVRKMIAKSEQEIGKATAKYFFYSNIMNFFKTEITLANGEIRKRPLIETNGETGEIVWDKGRDFATVRKVLSMPQVNIVKKTEVQTGGFSKESILPKRNSDKLIARKKDWDPKKYGGFDSPTVAYSVLVVAKVEKGKSKKLKSVKELLGITIMERSSFEKNPIDFLEAKGYKEVKKDLIIKLPKYSLFELENGRKRMLASAGELQKGNELALPSKYVNFLYLASHYEKLKGSPEDNEQKQLFVEQHKHYLDEIIEQISEFSKRVILADANLDKVLSAYNKHRDKPIREQAENIIHLFTLTNLGAPAAFKYFDTTIDRKRYTSTKEVLDATLIHQSITGLYETRIDLSQLGGDGGPAPGGLDDEYRLYSPLVKPDQNIQFWLEQFPQAWAETAGMGLAKQVPPQVIQLKASATPVSVRQYPLSKEAQEGIRPHVQRLIQQGILVPVQSPWNTPLLPVRKPGTNDYRPVQDLREVNKRVQDIHPTVPNPYNLLCALPPQRSWYTVLDLKDAFFCLRLHPTSQPLFAFEWRDPGTGRTGQLTWTRLPQGFKNSPTIFNEALHRDLANFRIQHPQVTLLQYVDDLLLAGATKQDCLEGTKALLLELSDLGYRASAKKAQICRREVTYLGYSLRDGQRWLTEARKKTVVQIPAPTTAKQVREFLGKAGFCRLFIPGFATLAAPLYPLTKPKGEFSWAPEHQKAFDAIKKALLSAPALALPDVTKPFTLYVDERKGVARGVLTQTLGPWRRPVAYLSKKLDPVASGWPVCLKAIAAVAILVKDADKLTLGQNITVIAPHALENIVRQPPDRWMTNARMTHYQSLLLTERVTFAPPAALNPATLLPEETDEPVTHDCHQLLIEETGVRKDLTDIPLTGEVLTWFTDGSSYVVEGKRMAGAAVVDGTRTIWASSLPEGTSAQKAELMALTQALRLAEGKSINIYTDSRYAFATAHVHGAIYKQRGWLTSAGREIKNKEEILSLLEALHLPKRLAIIHCPGHQKAKDPISRGNQMADRVAKQAAQGVNLLPAGKRTADGSEFEKRTADGSEFESPKKKAKVE

SEQ ID NO: 270 - protein, 2086 aa, synthetic construct; identical to SEQ ID NO: 69

SEQ ID NO: 271 - protein, 2083 aa, synthetic construct; identical to SEQ ID NO: 88

SEQ ID NO: 272 - protein, 2086 aa, synthetic construct; identical to SEQ ID NO: 85

SEQ ID NO: 273 - protein, 2085 aa, synthetic construct
MPAAKRVKLDGGDKKYSIGLDIGTNSVGWAVITDEYKVPSKKFKVLGNTDRHSIKKNLIGALLFDSGETAEATRLKRTARRRYTRRKNRICYLQEIFSNEMAKVDDSFFHRLEESFLVEEDKKHERHPIFGNIVDEVAYHEKYPTIYHLRKKLVDSTDKADLRLIYLALAHMIKFRGHFLIEGDLNPDNSDVDKLFIQLVQTYNQLFEENPINASGVDAKAILSARLSKSRRLENLIAQLPGEKKNGLFGNLIALSLGLTPNFKSNFDLAEDAKLQLSKDTYDDDLDNLLAQIGDQYADLFLAAKNLSDAILLSDILRVNTEITKAPLSASMIKRYDEHHQDLTLLKALVRQQLPEKYKEIFFDQSKNGYAGYIDGGASQEEFYKFIKPILEKMDGTEELLVKLNREDLLRKQRTFDNGSIPHQIHLGELHAILRRQEDFYPFLKDNREKIEKILTFRIPYYVGPLARGNSRFAWMTRKSEETITPWNFEEVVDKGASAQSFIERMTNFDKNLPNEKVLPKHSLLYEYFTVYNELTKVKYVTEGMRKPAFLSGEQKKAIVDLLFKTNRKVTVKQLKEDYFKKIECFDSVEISGVEDRFNASLGTYHDLLKIIKDKDFLDNEENEDILEDIVLTLTLFEDREMIEERLKTYAHLFDDKVMKQLKRRRYTGWGRLSRKLINGIRDKQSGKTILDFLKSDGFANRNFMQLIHDDSLTFKEDIQKAQVSGQGDSLHEHIANLAGSPAIKKGILQTVKVVDELVKVMGRHKPENIVIEMARENQTTQKGQKNSRERMKRIEEGIKELGSQILKEHPVENTQLQNEKLYLYYLQNGRDMYVDQELDINRLSDYDVDHIVPQSFLKDDSIDNKVLTRSDKARGKSDNVPSEEVVKKMKNYWRQLLNAKLITQRKFDNLTKAERGGLSELDKAGFIKRQLVETRQITKHVAQILDSRMNTKYDENDKLIREVKVITLKSKLVSDFRKDFQFYKVREINNYHHAHDAYLNAVVGTALIKKYPKLESEFVYGDYKVYDVRKMIAKSEQEIGKATAKYFFYSNIMNFFKTEITLANGEIRKRPLIETNGETGEIVWDKGRDFATVRKVLSMPQVNIVKKTEVQTGGFSKESILPKRNSDKLIARKKDWDPKKYGGFDSPTVAYSVLVVAKVEKGKSKKLKSVKELLGITIMERSSFEKNPIDFLEAKGYKEVKKDLIIKLPKYSLFELENGRKRMLASAGELQKGNELALPSKYVNFLYLASHYEKLKGSPEDNEQKQLFVEQHKHYLDEIIEQISEFSKRVILADANLDKVLSAYNKHRDKPIREQAENIIHLFTLTNLGAPAAFKYFDTTIDRKRYTSTKEVLDATLIHQSITGLYETRIDLSQLGGDGGGGGEAAAKGGLDDEYRLYSPLVKPDQNIQFWLEQFPQAWAETAGMGLAKQVPPQVIQLKASATPVSVRQYPLSKEAQEGIRPHVQRLIQQGILVPVQSPWNTPLLPVRKPGTNDYRPVQDLREVNKRVQDIHPTVPNPYNLLCALPPQRSWYTVLDLKDAFFCLRLHPTSQPLFAFEWRDPGTGRTGQLTWTRLPQGFKNSPTIFNEALHRDLANFRIQHPQVTLLQYVDDLLLAGATKQDCLEGTKALLLELSDLGYRASAKKAQICRREVTYLGYSLRDGQRWLTEARKKTVVQIPAPTTAKQVREFLGKAGFCRLFIPGFATLAAPLYPLTKPKGEFSWAPEHQKAFDAIKKALLSAPALALPDVTKPFTLYVDERKGVARGVLTQTLGPWRRPVAYLSKKLDPVASGWPVCLKAIAAVAILVKDADKLTLGQNITVIAPHALENIVRQPPDRWMTNARMTHYQSLLLTERVTFAPPAALNPATLLPEETDEPVTHDCHQLLIEETGVRKDLTDIPLTGEVLTWFTDGSSYVVEGKRMAGAAVVDGTRTIWASSLPEGTSAQKAELMALTQALRLAEGKSINIYTDSRYAFATAHVHGAIYKQRGWLTSAGREIKNKEEILSLLEALHLPKRLAIIHCPGHQKAKDPISRGNQMADRVAKQAAQGVNLLPAGKRTADGSEFEKRTADGSEFESPKKKAKVE

SEQ ID NO: 274 - protein, 2086 aa, synthetic construct
MPAAKRVKLDGGDKKYSIGLDIGTNSVGWAVITDEYKVPSKKFKVLGNTDRHSIKKNLIGALLFDSGETAEATRLKRTARRRYTRRKNRICYLQEIFSNEMAKVDDSFFHRLEESFLVEEDKKHERHPIFGNIVDEVAYHEKYPTIYHLRKKLVDSTDKADLRLIYLALAHMIKFRGHFLIEGDLNPDNSDVDKLFIQLVQTYNQLFEENPINASGVDAKAILSARLSKSRRLENLIAQLPGEKKNGLFGNLIALSLGLTPNFKSNFDLAEDAKLQLSKDTYDDDLDNLLAQIGDQYADLFLAAKNLSDAILLSDILRVNTEITKAPLSASMIKRYDEHHQDLTLLKALVRQQLPEKYKEIFFDQSKNGYAGYIDGGASQEEFYKFIKPILEKMDGTEELLVKLNREDLLRKQRTFDNGSIPHQIHLGELHAILRRQEDFYPFLKDNREKIEKILTFRIPYYVGPLARGNSRFAWMTRKSEETITPWNFEEVVDKGASAQSFIERMTNFDKNLPNEKVLPKHSLLYEYFTVYNELTKVKYVTEGMRKPAFLSGEQKKAIVDLLFKTNRKVTVKQLKEDYFKKIECFDSVEISGVEDRFNASLGTYHDLLKIIKDKDFLDNEENEDILEDIVLTLTLFEDREMIEERLKTYAHLFDDKVMKQLKRRRYTGWGRLSRKLINGIRDKQSGKTILDFLKSDGFANRNFMQLIHDDSLTFKEDIQKAQVSGQGDSLHEHIANLAGSPAIKKGILQTVKVVDELVKVMGRHKPENIVIEMARENQTTQKGQKNSRERMKRIEEGIKELGSQILKEHPVENTQLQNEKLYLYYLQNGRDMYVDQELDINRLSDYDVDHIVPQSFLKDDSIDNKVLTRSDKARGKSDNVPSEEVVKKMKNYWRQLLNAKLITQRKFDNLTKAERGGLSELDKAGFIKRQLVETRQITKHVAQILDSRMNTKYDENDKLIREVKVITLKSKLVSDFRKDFQFYKVREINNYHHAHDAYLNAVVGTALIKKYPKLESEFVYGDYKVYDVRKMIAKSEQEIGKATAKYFFYSNIMNFFKTEITLANGEIRKRPLIETNGETGEIVWDKGRDFATVRKVLSMPQVNIVKKTEVQTGGFSKESILPKRNSDKLIARKKDWDPKKYGGFDSPTVAYSVLVVAKVEKGKSKKLKSVKELLGITIMERSSFEKNPIDFLEAKGYKEVKKDLIIKLPKYSLFELENGRKRMLASAGELQKGNELALPSKYVNFLYLASHYEKLKGSPEDNEQKQLFVEQHKHYLDEIIEQISEFSKRVILADANLDKVLSAYNKHRDKPIREQAENIIHLFTLTNLGAPAAFKYFDTTIDRKRYTSTKEVLDATLIHQSITGLYETRIDLSQLGGDGGGGSGGGGSSGGLDDEYRLYSPLVKPDQNIQFWLEQFPQAWAETAGMGLAKQVPPQVIQLKASATPVSVRQYPLSKEAQEGIRPHVQRLIQQGILVPVQSPWNTPLLPVRKPGTNDYRPVQDLREVNKRVQDIHPTVPNPYNLLCALPPQRSWYTVLDLKDAFFCLRLHPTSQPLFAFEWRDPGTGRTGQLTWTRLPQGFKNSPTIFNEALHRDLANFRIQHPQVTLLQYVDDLLLAGATKQDCLEGTKALLLELSDLGYRASAKKAQICRREVTYLGYSLRDGQRWLTEARKKTVVQIPAPTTAKQVREFLGKAGFCRLFIPGFATLAAPLYPLTKPKGEFSWAPEHQKAFDAIKKALLSAPALALPDVTKPFTLYVDERKGVARGVLTQTLGPWRRPVAYLSKKLDPVASGWPVCLKAIAAVAILVKDADKLTLGQNITVIAPHALENIVRQPPDRWMTNARMTHYQSLLLTERVTFAPPAALNPATLLPEETDEPVTHDCHQLLIEETGVRKDLTDIPLTGEVLTWFTDGSSYVVEGKRMAGAAVVDGTRTIWASSLPEGTSAQKAELMALTQALRLAEGKSINIYTDSRYAFATAHVHGAIYKQRGWLTSAGREIKNKEEILSLLEALHLPKRLAIIHCPGHQKAKDPISRGNQMADRVAKQAAQGVNLLPAGKRTADGSEFEKRTADGSEFESPKKKAKVE

SEQ ID NO: 275 - protein, 2086 aa, synthetic construct; identical to SEQ ID NO: 91

SEQ ID NO: 276 - protein, 2086 aa, synthetic construct; identical to SEQ ID NO: 95

SEQ ID NO: 277 - protein, 2085 aa, synthetic construct
MPAAKRVKLDGGDKKYSIGLDIGTNSVGWAVITDEYKVPSKKFKVLGNTDRHSIKKNLIGALLFDSGETAEATRLKRTARRRYTRRKNRICYLQEIFSNEMAKVDDSFFHRLEESFLVEEDKKHERHPIFGNIVDEVAYHEKYPTIYHLRKKLVDSTDKADLRLIYLALAHMIKFRGHFLIEGDLNPDNSDVDKLFIQLVQTYNQLFEENPINASGVDAKAILSARLSKSRRLENLIAQLPGEKKNGLFGNLIALSLGLTPNFKSNFDLAEDAKLQLSKDTYDDDLDNLLAQIGDQYADLFLAAKNLSDAILLSDILRVNTEITKAPLSASMIKRYDEHHQDLTLLKALVRQQLPEKYKEIFFDQSKNGYAGYIDGGASQEEFYKFIKPILEKMDGTEELLVKLNREDLLRKQRTFDNGSIPHQIHLGELHAILRRQEDFYPFLKDNREKIEKILTFRIPYYVGPLARGNSRFAWMTRKSEETITPWNFEEVVDKGASAQSFIERMTNFDKNLPNEKVLPKHSLLYEYFTVYNELTKVKYVTEGMRKPAFLSGEQKKAIVDLLFKTNRKVTVKQLKEDYFKKIECFDSVEISGVEDRFNASLGTYHDLLKIIKDKDFLDNEENEDILEDIVLTLTLFEDREMIEERLKTYAHLFDDKVMKQLKRRRYTGWGRLSRKLINGIRDKQSGKTILDFLKSDGFANRNFMQLIHDDSLTFKEDIQKAQVSGQGDSLHEHIANLAGSPAIKKGILQTVKVVDELVKVMGRHKPENIVIEMARENQTTQKGQKNSRERMKRIEEGIKELGSQILKEHPVENTQLQNEKLYLYYLQNGRDMYVDQELDINRLSDYDVDHIVPQSFLKDDSIDNKVLTRSDKARGKSDNVPSEEVVKKMKNYWRQLLNAKLITQRKFDNLTKAERGGLSELDKAGFIKRQLVETRQITKHVAQILDSRMNTKYDENDKLIREVKVITLKSKLVSDFRKDFQFYKVREINNYHHAHDAYLNAVVGTALIKKYPKLESEFVYGDYKVYDVRKMIAKSEQEIGKATAKYFFYSNIMNFFKTEITLANGEIRKRPLIETNGETGEIVWDKGRDFATVRKVLSMPQVNIVKKTEVQTGGFSKESILPKRNSDKLIARKKDWDPKKYGGFDSPTVAYSVLVVAKVEKGKSKKLKSVKELLGITIMERSSFEKNPIDFLEAKGYKEVKKDLIIKLPKYSLFELENGRKRMLASAGELQKGNELALPSKYVNFLYLASHYEKLKGSPEDNEQKQLFVEQHKHYLDEIIEQISEFSKRVILADANLDKVLSAYNKHRDKPIREQAENIIHLFTLTNLGAPAAFKYFDTTIDRKRYTSTKEVLDATLIHQSITGLYETRIDLSQLGGDGGGGSEAAAKGGLDDEYRLYSPLVKPDQNIQFWLEQFPQAWAETAGMGLAKQVPPQVIQLKASATPVSVRQYPLSKEAQEGIRPHVQRLIQQGILVPVQSPWNTPLLPVRKPGTNDYRPVQDLREVNKRVQDIHPTVPNPYNLLCALPPQRSWYTVLDLKDAFFCLRLHPTSQPLFAFEWRDPGTGRTGQLTWTRLPQGFKNSPTIFNEALHRDLANFRIQHPQVTLLQYVDDLLLAGATKQDCLEGTKALLLELSDLGYRASAKKAQICRREVTYLGYSLRDGQRWLTEARKKTVVQIPAPTTAKQVREFLGKAGFCRLFIPGFATLAAPLYPLTKPKGEFSWAPEHQKAFDAIKKALLSAPALALPDVTKPFTLYVDERKGVARGVLTQTLGPWRRPVAYLSKKLDPVASGWPVCLKAIAAVAILVKDADKLTLGQNITVIAPHALENIVRQPPDRWMTNARMTHYQSLLLTERVTFAPPAALNPATLLPEETDEPVTHDCHQLLIEETGVRKDLTDIPLTGEVLTWFTDGSSYVVEGKRMAGAAVVDGTRTIWASSLPEGTSAQKAELMALTQALRLAEGKSINIYTDSRYAFATAHVHGAIYKQRGWLTSAGREIKNKEEILSLLEALHLPKRLAIIHCPGHQKAKDPISRGNQMADRVAKQAAQGVNLLPAGKRTADGSEFEKRTADGSEFESPKKKAKVE

SEQ ID NO: 278 - protein, 2090 aa, synthetic construct; identical to SEQ ID NO: 112

SEQ ID NO: 279 - protein, 2094 aa, synthetic construct
MPAAKRVKLDGGDKKYSIGLDIGTNSVGWAVITDEYKVPSKKFKVLGNTDRHSIKKNLIGALLFDSGETAEATRLKRTARRRYTRRKNRICYLQEIFSNEMAKVDDSFFHRLEESFLVEEDKKHERHPIFGNIVDEVAYHEKYPTIYHLRKKLVDSTDKADLRLIYLALAHMIKFRGHFLIEGDLNPDNSDVDKLFIQLVQTYNQLFEENPINASGVDAKAILSARLSKSRRLENLIAQLPGEKKNGLFGNLIALSLGLTPNFKSNFDLAEDAKLQLSKDTYDDDLDNLLAQIGDQYADLFLAAKNLSDAILLSDILRVNTEITKAPLSASMIKRYDEHHQDLTLLKALVRQQLPEKYKEIFFDQSKNGYAGYIDGGASQEEFYKFIKPILEKMDGTEELLVKLNREDLLRKQRTFDNGSIPHQIHLGELHAILRRQEDFYPFLKDNREKIEKILTFRIPYYVGPLARGNSRFAWMTRKSEETITPWNFEEVVDKGASAQSFIERMTNFDKNLPNEKVLPKHSLLYEYFTVYNELTKVKYVTEGMRKPAFLSGEQKKAIVDLLFKTNRKVTVKQLKEDYFKKIECFDSVEISGVEDRFNASLGTYHDLLKIIKDKDFLDNEENEDILEDIVLTLTLFEDREMIEERLKTYAHLFDDKVMKQLKRRRYTGWGRLSRKLINGIRDKQSGKTILDFLKSDGFANRNFMQLIHDDSLTFKEDIQKAQVSGQGDSLHEHIANLAGSPAIKKGILQTVKVVDELVKVMGRHKPENIVIEMARENQTTQKGQKNSRERMKRIEEGIKELGSQILKEHPVENTQLQNEKLYLYYLQNGRDMYVDQELDINRLSDYDVDHIVPQSFLKDDSIDNKVLTRSDKARGKSDNVPSEEVVKKMKNYWRQLLNAKLITQRKFDNLTKAERGGLSELDKAGFIKRQLVETRQITKHVAQILDSRMNTKYDENDKLIREVKVITLKSKLVSDFRKDFQFYKVREINNYHHAHDAYLNAVVGTALIKKYPKLESEFVYGDYKVYDVRKMIAKSEQEIGKATAKYFFYSNIMNFFKTEITLANGEIRKRPLIETNGETGEIVWDKGRDFATVRKVLSMPQVNIVKKTEVQTGGFSKESILPKRNSDKLIARKKDWDPKKYGGFDSPTVAYSVLVVAKVEKGKSKKLKSVKELLGITIMERSSFEKNPIDFLEAKGYKEVKKDLIIKLPKYSLFELENGRKRMLASAGELQKGNELALPSKYVNFLYLASHYEKLKGSPEDNEQKQLFVEQHKHYLDEIIEQISEFSKRVILADANLDKVLSAYNKHRDKPIREQAENIIHLFTLTNLGAPAAFKYFDTTIDRKRYTSTKEVLDATLIHQSITGLYETRIDLSQLGGDGGEAAAKEAAAKEAAAKGGTLQLDDEYRLYSPLVKPDQNIQFWLEQFPQAWAETAGMGLAKQVPPQVIQLKASATPVSVRQYPLSKEAQEGIRPHVQRLIQQGILVPVQSPWNTPLLPVRKPGTNDYRPVQDLREVNKRVQDIHPTVPNPYNLLCALPPQRSWYTVLDLKDAFFCLRLHPTSQPLFAFEWRDPGTGRTGQLTWTRLPQGFKNSPTIFDEALHRDLANFRIQHPQVTLLQYVDDLLLAGATKQDCLEGTKALLLELSDLGYRASAKKAQICRREVTYLGYSLRDGQRWLTEARKKTVVQIPAPTTAKQVREFLGTAGFCRLWIPGFATLAAPLYPLTKEKGEFSWAPEHQKAFDAIKKALLSAPALALPDVTKPFTLYVDERKGVARGVLTQTLGPWRRPVAYLSKKLDPVASGWPVCLKAIAAVAILVKDADKLTLGQNITVIAPHALENIVRQPPDRWMTNARMTHYQSLLLTERVTFAPPAALNPATLLPEETDEPVTHDCHQLLIEETGVRKDLTDIPLTGEVLTWFTDGSSYVVEGKRMAGAAVVDGTRTIWASSLPEGTSAQKAELMALTQALRLAEGKSINIYTDSRYAFATAHVHGAIYKQRGLLTSAGREIKNKEEILSLLEALHLPKRLAIIHCPGHQKAKDPISRGNQMADRVAKQAAQGVNLLAGKRTADGSEFEKRTADGSEFESPKKKAKVE

SEQ ID NO: 280 - protein, 2109 aa, synthetic construct
MPAAKRVKLDGGDKKYSIGLDIGTNSVGWAVITDEYKVPSKKFKVLGNTDRHSIKKNLIGALLFDSGETAEATRLKRTARRRYTRRKNRICYLQEIFSNEMAKVDDSFFHRLEESFLVEEDKKHERHPIFGNIVDEVAYHEKYPTIYHLRKKLVDSTDKADLRLIYLALAHMIKFRGHFLIEGDLNPDNSDVDKLFIQLVQTYNQLFEENPINASGVDAKAILSARLSKSRRLENLIAQLPGEKKNGLFGNLIALSLGLTPNFKSNFDLAEDAKLQLSKDTYDDDLDNLLAQIGDQYADLFLAAKNLSDAILLSDILRVNTEITKAPLSASMIKRYDEHHQDLTLLKALVRQQLPEKYKEIFFDQSKNGYAGYIDGGASQEEFYKFIKPILEKMDGTEELLVKLNREDLLRKQRTFDNGSIPHQIHLGELHAILRRQEDFYPFLKDNREKIEKILTFRIPYYVGPLARGNSRFAWMTRKSEETITPWNFEEVVDKGASAQSFIERMTNFDKNLPNEKVLPKHSLLYEYFTVYNELTKVKYVTEGMRKPAFLSGEQKKAIVDLLFKTNRKVTVKQLKEDYFKKIECFDSVEISGVEDRFNASLGTYHDLLKIIKDKDFLDNEENEDILEDIVLTLTLFEDREMIEERLKTYAHLFDDKVMKQLKRRRYTGWGRLSRKLINGIRDKQSGKTILDFLKSDGFANRNFMQLIHDDSLTFKEDIQKAQVSGQGDSLHEHIANLAGSPAIKKGILQTVKVVDELVKVMGRHKPENIVIEMARENQTTQKGQKNSRERMKRIEEGIKELGSQILKEHPVENTQLQNEKLYLYYLQNGRDMYVDQELDINRLSDYDVDHIVPQSFLKDDSIDNKVLTRSDKARGKSDNVPSEEVVKKMKNYWRQLLNAKLITQRKFDNLTKAERGGLSELDKAGFIKRQLVETRQITKHVAQILDSRMNTKYDENDKLIREVKVITLKSKLVSDFRKDFQFYKVREINNYHHAHDAYLNAVVGTALIKKYPKLESEFVYGDYKVYDVRKMIAKSEQEIGKATAKYFFYSNIMNFFKTEITLANGEIRKRPLIETNGETGEIVWDKGRDFATVRKVLSMPQVNIVKKTEVQTGGFSKESILPKRNSDKLIARKKDWDPKKYGGFDSPTVAYSVLVVAKVEKGKSKKLKSVKELLGITIMERSSFEKNPIDFLEAKGYKEVKKDLIIKLPKYSLFELENGRKRMLASAGELQKGNELALPSKYVNFLYLASHYEKLKGSPEDNEQKQLFVEQHKHYLDEIIEQISEFSKRVILADANLDKVLSAYNKHRDKPIREQAENIIHLFTLTNLGAPAAFKYFDTTIDRKRYTSTKEVLDATLIHQSITGLYETRIDLSQLGGDGGEAAAKEAAAKEAAAKEAAAKEAAAKEAAAKGGTLQLDDEYRLYSPLVKPDQNIQFWLEQFPQAWAETAGMGLAKQVPPQVIQLKASATPVSVRQYPLSKEAQEGIRPHVQRLIQQGILVPVQSPWNTPLLPVRKPGTNDYRPVQDLREVNKRVQDIHPTVPNPYNLLCALPPQRSWYTVLDLKDAFFCLRLHPTSQPLFAFEWRDPGTGRTGQLTWTRLPQGFKNSPTIFDEALHRDLANFRIQHPQVTLLQYVDDLLLAGATKQDCLEGTKALLLELSDLGYRASAKKAQICRREVTYLGYSLRDGQRWLTEARKKTVVQIPAPTTAKQVREFLGTAGFCRLWIPGFATLAAPLYPLTKEKGEFSWAPEHQKAFDAIKKALLSAPALALPDVTKPFTLYVDERKGVARGVLTQTLGPWRRPVAYLSKKLDPVASGWPVCLKAIAAVAILVKDADKLTLGQNITVIAPHALENIVRQPPDRWMTNARMTHYQSLLLTERVTFAPPAALNPATLLPEETDEPVTHDCHQLLIEETGVRKDLTDIPLTGEVLTWFTDGSSYVVEGKRMAGAAVVDGTRTIWASSLPEGTSAQKAELMALTQALRLAEGKSINIYTDSRYAFATAHVHGAIYKQRGLLTSAGREIKNKEEILSLLEALHLPKRLAIIHCPGHQKAKDPISRGNQMADRVAKQAAQGVNLLAGKRTADGSEFEKRTADGSEFESPKKKAKVE

SEQ ID NO: 281 - protein, 2088 aa, synthetic construct
MPAAKRVKLDGGDKKYSIGLDIGTNSVGWAVITDEYKVPSKKFKVLGNTDRHSIKKNLIGALLFDSGETAEATRLKRTARRRYTRRKNRICYLQEIFSNEMAKVDDSFFHRLEESFLVEEDKKHERHPIFGNIVDEVAYHEKYPTIYHLRKKLVDSTDKADLRLIYLALAHMIKFRGHFLIEGDLNPDNSDVDKLFIQLVQTYNQLFEENPINASGVDAKAILSARLSKSRRLENLIAQLPGEKKNGLFGNLIALSLGLTPNFKSNFDLAEDAKLQLSKDTYDDDLDNLLAQIGDQYADLFLAAKNLSDAILLSDILRVNTEITKAPLSASMIKRYDEHHQDLTLLKALVRQQLPEKYKEIFFDQSKNGYAGYIDGGASQEEFYKFIKPILEKMDGTEELLVKLNREDLLRKQRTFDNGSIPHQIHLGELHAILRRQEDFYPFLKDNREKIEKILTFRIPYYVGPLARGNSRFAWMTRKSEETITPWNFEEVVDKGASAQSFIERMTNFDKNLPNEKVLPKHSLLYEYFTVYNELTKVKYVTEGMRKPAFLSGEQKKAIVDLLFKTNRKVTVKQLKEDYFKKIECFDSVEISGVEDRFNASLGTYHDLLKIIKDKDFLDNEENEDILEDIVLTLTLFEDREMIEERLKTYAHLFDDKVMKQLKRRRYTGWGRLSRKLINGIRDKQSGKTILDFLKSDGFANRNFMQLIHDDSLTFKEDIQKAQVSGQGDSLHEHIANLAGSPAIKKGILQTVKVVDELVKVMGRHKPENIVIEMARENQTTQKGQKNSRERMKRIEEGIKELGSQILKEHPVENTQLQNEKLYLYYLQNGRDMYVDQELDINRLSDYDVDHIVPQSFLKDDSIDNKVLTRSDKARGKSDNVPSEEVVKKMKNYWRQLLNAKLITQRKFDNLTKAERGGLSELDKAGFIKRQLVETRQITKHVAQILDSRMNTKYDENDKLIREVKVITLKSKLVSDFRKDFQFYKVREINNYHHAHDAYLNAVVGTALIKKYPKLESEFVYGDYKVYDVRKMIAKSEQEIGKATAKYFFYSNIMNFFKTEITLANGEIRKRPLIETNGETGEIVWDKGRDFATVRKVLSMPQVNIVKKTEVQTGGFSKESILPKRNSDKLIARKKDWDPKKYGGFDSPTVAYSVLVVAKVEKGKSKKLKSVKELLGITIMERSSFEKNPIDFLEAKGYKEVKKDLIIKLPKYSLFELENGRKRMLASAGELQKGNELALPSKYVNFLYLASHYEKLKGSPEDNEQKQLFVEQHKHYLDEIIEQISEFSKRVILADANLDKVLSAYNKHRDKPIREQAENIIHLFTLTNLGAPAAFKYFDTTIDRKRYTSTKEVLDATLIHQSITGLYETRIDLSQLGGDGGPAPGGSGSSGGTLQLDDEYRLYSPLVKPDQNIQFWLEQFPQAWAETAGMGLAKQVPPQVIQLKASATPVSVRQYPLSKEAQEGIRPHVQRLIQQGILVPVQSPWNTPLLPVRKPGTNDYRPVQDLREVNKRVQDIHPTVPNPYNLLCALPPQRSWYTVLDLKDAFFCLRLHPTSQPLFAFEWRDPGTGRTGQLTWTRLPQGFKNSPTIFDEALHRDLANFRIQHPQVTLLQYVDDLLLAGATKQDCLEGTKALLLELSDLGYRASAKKAQICRREVTYLGYSLRDGQRWLTEARKKTVVQIPAPTTAKQVREFLGTAGFCRLWIPGFATLAAPLYPLTKEKGEFSWAPEHQKAFDAIKKALLSAPALALPDVTKPFTLYVDERKGVARGVLTQTLGPWRRPVAYLSKKLDPVASGWPVCLKAIAAVAILVKDADKLTLGQNITVIAPHALENIVRQPPDRWMTNARMTHYQSLLLTERVTFAPPAALNPATLLPEETDEPVTHDCHQLLIEETGVRKDLTDIPLTGEVLTWFTDGSSYVVEGKRMAGAAVVDGTRTIWASSLPEGTSAQKAELMALTQALRLAEGKSINIYTDSRYAFATAHVHGAIYKQRGLLTSAGREIKNKEEILSLLEALHLPKRLAIIHCPGHQKAKDPISRGNQMADRVAKQAAQGVNLLAGKRTADGSEFEKRTADGSEFESPKKKAKVE

SEQ ID NO: 282 - protein, 2087 aa, synthetic construct
MPAAKRVKLDGGDKKYSIGLDIGTNSVGWAVITDEYKVPSKKFKVLGNTDRHSIKKNLIGALLFDSGETAEATRLKRTARRRYTRRKNRICYLQEIFSNEMAKVDDSFFHRLEESFLVEEDKKHERHPIFGNIVDEVAYHEKYPTIYHLRKKLVDSTDKADLRLIYLALAHMIKFRGHFLIEGDLNPDNSDVDKLFIQLVQTYNQLFEENPINASGVDAKAILSARLSKSRRLENLIAQLPGEKKNGLFGNLIALSLGLTPNFKSNFDLAEDAKLQLSKDTYDDDLDNLLAQIGDQYADLFLAAKNLSDAILLSDILRVNTEITKAPLSASMIKRYDEHHQDLTLLKALVRQQLPEKYKEIFFDQSKNGYAGYIDGGASQEEFYKFIKPILEKMDGTEELLVKLNREDLLRKQRTFDNGSIPHQIHLGELHAILRRQEDFYPFLKDNREKIEKILTFRIPYYVGPLARGNSRFAWMTRKSEETITPWNFEEVVDKGASAQSFIERMTNFDKNLPNEKVLPKHSLLYEYFTVYNELTKVKYVTEGMRKPAFLSGEQKKAIVDLLFKTNRKVTVKQLKEDYFKKIECFDSVEISGVEDRFNASLGTYHDLLKIIKDKDFLDNEENEDILEDIVLTLTLFEDREMIEERLKTYAHLFDDKVMKQLKRRRYTGWGRLSRKLINGIRDKQSGKTILDFLKSDGFANRNFMQLIHDDSLTFKEDIQKAQVSGQGDSLHEHIANLAGSPAIKKGILQTVKVVDELVKVMGRHKPENIVIEMARENQTTQKGQKNSRERMKRIEEGIKELGSQILKEHPVENTQLQNEKLYLYYLQNGRDMYVDQELDINRLSDYDVDHIVPQSFLKDDSIDNKVLTRSDKARGKSDNVPSEEVVKKMKNYWRQLLNAKLITQRKFDNLTKAERGGLSELDKAGFIKRQLVETRQITKHVAQILDSRMNTKYDENDKLIREVKVITLKSKLVSDFRKDFQFYKVREINNYHHAHDAYLNAVVGTALIKKYPKLESEFVYGDYKVYDVRKMIAKSEQEIGKATAKYFFYSNIMNFFKTEITLANGEIRKRPLIETNGETGEIVWDKGRDFATVRKVLSMPQVNIVKKTEVQTGGFSKESILPKRNSDKLIARKKDWDPKKYGGFDSPTVAYSVLVVAKVEKGKSKKLKSVKELLGITIMERSSFEKNPIDFLEAKGYKEVKKDLIIKLPKYSLFELENGRKRMLASAGELQKGNELALPSKYVNFLYLASHYEKLKGSPEDNEQKQLFVEQHKHYLDEIIEQISEFSKRVILADANLDKVLSAYNKHRDKPIREQAENIIHLFTLTNLGAPAAFKYFDTTIDRKRYTSTKEVLDATLIHQSITGLYETRIDLSQLGGDGGEAAAKGGGGGTLQLDDEYRLYSPLVKPDQNIQFWLEQFPQAWAETAGMGLAKQVPPQVIQLKASATPVSVRQYPLSKEAQEGIRPHVQRLIQQGILVPVQSPWNTPLLPVRKPGTNDYRPVQDLREVNKRVQDIHPTVPNPYNLLCALPPQRSWYTVLDLKDAFFCLRLHPTSQPLFAFEWRDPGTGRTGQLTWTRLPQGFKNSPTIFDEALHRDLANFRIQHPQVTLLQYVDDLLLAGATKQDCLEGTKALLLELSDLGYRASAKKAQICRREVTYLGYSLRDGQRWLTEARKKTVVQIPAPTTAKQVREFLGTAGFCRLWIPGFATLAAPLYPLTKEKGEFSWAPEHQKAFDAIKKALLSAPALALPDVTKPFTLYVDERKGVARGVLTQTLGPWRRPVAYLSKKLDPVASGWPVCLKAIAAVAILVKDADKLTLGQNITVIAPHALENIVRQPPDRWMTNARMTHYQSLLLTERVTFAPPAALNPATLLPEETDEPVTHDCHQLLIEETGVRKDLTDIPLTGEVLTWFTDGSSYVVEGKRMAGAAVVDGTRTIWASSLPEGTSAQKAELMALTQALRLAEGKSINIYTDSRYAFATAHVHGAIYKQRGLLTSAGREIKNKEEILSLLEALHLPKRLAIIHCPGHQKAKDPISRGNQMADRVAKQAAQGVNLLAGKRTADGSEFEKRTADGSEFESPKKKAKVE

SEQ ID NO: 283 - protein, 2091 aa, synthetic construct
MPAAKRVKLDGGDKKYSIGLDIGTNSVGWAVITDEYKVPSKKFKVLGNTDRHSIKKNLIGALLFDSGETAEATRLKRTARRRYTRRKNRICYLQEIFSNEMAKVDDSFFHRLEESFLVEEDKKHERHPIFGNIVDEVAYHEKYPTIYHLRKKLVDSTDKADLRLIYLALAHMIKFRGHFLIEGDLNPDNSDVDKLFIQLVQTYNQLFEENPINASGVDAKAILSARLSKSRRLENLIAQLPGEKKNGLFGNLIALSLGLTPNFKSNFDLAEDAKLQLSKDTYDDDLDNLLAQIGDQYADLFLAAKNLSDAILLSDILRVNTEITKAPLSASMIKRYDEHHQDLTLLKALVRQQLPEKYKEIFFDQSKNGYAGYIDGGASQEEFYKFIKPILEKMDGTEELLVKLNREDLLRKQRTFDNGSIPHQIHLGELHAILRRQEDFYPFLKDNREKIEKILTFRIPYYVGPLARGNSRFAWMTRKSEETITPWNFEEVVDKGASAQSFIERMTNFDKNLPNEKVLPKHSLLYEYFTVYNELTKVKYVTEGMRKPAFLSGEQKKAIVDLLFKTNRKVTVKQLKEDYFKKIECFDSVEISGVEDRFNASLGTYHDLLKIIKDKDFLDNEENEDILEDIVLTLTLFEDREMIEERLKTYAHLFDDKVMKQLKRRRYTGWGRLSRKLINGIRDKQSGKTILDFLKSDGFANRNFMQLIHDDSLTFKEDIQKAQVSGQGDSLHEHIANLAGSPAIKKGILQTVKVVDELVKVMGRHKPENIVIEMARENQTTQKGQKNSRERMKRIEEGIKELGSQILKEHPVENTQLQNEKLYLYYLQNGRDMYVDQELDINRLSDYDVDHIVPQSFLKDDSIDNKVLTRSDKARGKSDNVPSEEVVKKMKNYWRQLLNAKLITQRKFDNLTKAERGGLSELDKAGFIKRQLVETRQITKHVAQILDSRMNTKYDENDKLIREVKVITLKSKLVSDFRKDFQFYKVREINNYHHAHDAYLNAVVGTALIKKYPKLESEFVYGDYKVYDVRKMIAKSEQEIGKATAKYFFYSNIMNFFKTEITLANGEIRKRPLIETNGETGEIVWDKGRDFATVRKVLSMPQVNIVKKTEVQTGGFSKESILPKRNSDKLIARKKDWDPKKYGGFDSPTVAYSVLVVAKVEKGKSKKLKSVKELLGITIMERSSFEKNPIDFLEAKGYKEVKKDLIIKLPKYSLFELENGRKRMLASAGELQKGNELALPSKYVNFLYLASHYEKLKGSPEDNEQKQLFVEQHKHYLDEIIEQISEFSKRVILADANLDKVLSAYNKHRDKPIREQAENIIHLFTLTNLGAPAAFKYFDTTIDRKRYTSTKEVLDATLIHQSITGLYETRIDLSQLGGDGGGSAGSAAGSGEFGGTLQLDDEYRLYSPLVKPDQNIQFWLEQFPQAWAETAGMGLAKQVPPQVIQLKASATPVSVRQYPLSKEAQEGIRPHVQRLIQQGILVPVQSPWNTPLLPVRKPGTNDYRPVQDLREVNKRVQDIHPTVPNPYNLLCALPPQRSWYTVLDLKDAFFCLRLHPTSQPLFAFEWRDPGTGRTGQLTWTRLPQGFKNSPTIFDEALHRDLANFRIQHPQVTLLQYVDDLLLAGATKQDCLEGTKALLLELSDLGYRASAKKAQICRREVTYLGYSLRDGQRWLTEARKKTVVQIPAPTTAKQVREFLGTAGFCRLWIPGFATLAAPLYPLTKEKGEFSWAPEHQKAFDAIKKALLSAPALALPDVTKPFTLYVDERKGVARGVLTQTLGPWRRPVAYLSKKLDPVASGWPVCLKAIAAVAILVKDADKLTLGQNITVIAPHALENIVRQPPDRWMTNARMTHYQSLLLTERVTFAPPAALNPATLLPEETDEPVTHDCHQLLIEETGVRKDLTDIPLTGEVLTWFTDGSSYVVEGKRMAGAAVVDGTRTIWASSLPEGTSAQKAELMALTQALRLAEGKSINIYTDSRYAFATAHVHGAIYKQRGLLTSAGREIKNKEEILSLLEALHLPKRLAIIHCPGHQKAKDPISRGNQMADRVAKQAAQGVNLLAGKRTADGSEFEKRTADGSEFESPKKKAKVE

SEQ ID NO: 284 - protein, 2088 aa, synthetic construct
MPAAKRVKLDGGDKKYSIGLDIGTNSVGWAVITDEYKVPSKKFKVLGNTDRHSIKKNLIGALLFDSGETAEATRLKRTARRRYTRRKNRICYLQEIFSNEMAKVDDSFFHRLEESFLVEEDKKHERHPIFGNIVDEVAYHEKYPTIYHLRKKLVDSTDKADLRLIYLALAHMIKFRGHFLIEGDLNPDNSDVDKLFIQLVQTYNQLFEENPINASGVDAKAILSARLSKSRRLENLIAQLPGEKKNGLFGNLIALSLGLTPNFKSNFDLAEDAKLQLSKDTYDDDLDNLLAQIGDQYADLFLAAKNLSDAILLSDILRVNTEITKAPLSASMIKRYDEHHQDLTLLKALVRQQLPEKYKEIFFDQSKNGYAGYIDGGASQEEFYKFIKPILEKMDGTEELLVKLNREDLLRKQRTFDNGSIPHQIHLGELHAILRRQEDFYPFLKDNREKIEKILTFRIPYYVGPLARGNSRFAWMTRKSEETITPWNFEEVVDKGASAQSFIERMTNFDKNLPNEKVLPKHSLLYEYFTVYNELTKVKYVTEGMRKPAFLSGEQKKAIVDLLFKTNRKVTVKQLKEDYFKKIECFDSVEISGVEDRFNASLGTYHDLLKIIKDKDFLDNEENEDILEDIVLTLTLFEDREMIEERLKTYAHLFDDKVMKQLKRRRYTGWGRLSRKLINGIRDKQSGKTILDFLKSDGFANRNFMQLIHDDSLTFKEDIQKAQVSGQGDSLHEHIANLAGSPAIKKGILQTVKVVDELVKVMGRHKPENIVIEMARENQTTQKGQKNSRERMKRIEEGIKELGSQILKEHPVENTQLQNEKLYLYYLQNGRDMYVDQELDINRLSDYDVDHIVPQSFLKDDSIDNKVLTRSDKARGKSDNVPSEEVVKKMKNYWRQLLNAKLITQRKFDNLTKAERGGLSELDKAGFIKRQLVETRQITKHVAQILDSRMNTKYDENDKLIREVKVITLKSKLVSDFRKDFQFYKVREINNYHHAHDAYLNAVVGTALIKKYPKLESEFVYGDYKVYDVRKMIAKSEQEIGKATAKYFFYSNIMNFFKTEITLANGEIRKRPLIETNGETGEIVWDKGRDFATVRKVLSMPQVNIVKKTEVQTGGFSKESILPKRNSDKLIARKKDWDPKKYGGFDSPTVAYSVLVVAKVEKGKSKKLKSVKELLGITIMERSSFEKNPIDFLEAKGYKEVKKDLIIKLPKYSLFELENGRKRMLASAGELQKGNELALPSKYVNFLYLASHYEKLKGSPEDNEQKQLFVEQHKHYLDEIIEQISEFSKRVILADANLDKVLSAYNKHRDKPIREQAENIIHLFTLTNLGAPAAFKYFDTTIDRKRYTSTKEVLDATLIHQSITGLYETRIDLSQLGGDGGGSSGGGGGSGGTLQLDDEYRLYSPLVKPDQNIQFWLEQFPQAWAETAGMGLAKQVPPQVIQLKASATPVSVRQYPLSKEAQEGIRPHVQRLIQQGILVPVQSPWNTPLLPVRKPGTNDYRPVQDLREVNKRVQDIHPTVPNPYNLLCALPPQRSWYTVLDLKDAFFCLRLHPTSQPLFAFEWRDPGTGRTGQLTWTRLPQGFKNSPTIFDEALHRDLANFRIQHPQVTLLQYVDDLLLAGATKQDCLEGTKALLLELSDLGYRASAKKAQICRREVTYLGYSLRDGQRWLTEARKKTVVQIPAPTTAKQVREFLGTAGFCRLWIPGFATLAAPLYPLTKEKGEFSWAPEHQKAFDAIKKALLSAPALALPDVTKPFTLYVDERKGVARGVLTQTLGPWRRPVAYLSKKLDPVASGWPVCLKAIAAVAILVKDADKLTLGQNITVIAPHALENIVRQPPDRWMTNARMTHYQSLLLTERVTFAPPAALNPATLLPEETDEPVTHDCHQLLIEETGVRKDLTDIPLTGEVLTWFTDGSSYVVEGKRMAGAAVVDGTRTIWASSLPEGTSAQKAELMALTQALRLAEGKSINIYTDSRYAFATAHVHGAIYKQRGLLTSAGREIKNKEEILSLLEALHLPKRLAIIHCPGHQKAKDPISRGNQMADRVAKQAAQGVNLLAGKRTADGSEFEKRTADGSEFESPKKKAKVE

SEQ ID NO: 285 - protein, 2090 aa, synthetic construct
MPAAKRVKLDGGDKKYSIGLDIGTNSVGWAVITDEYKVPSKKFKVLGNTDRHSIKKNLIGALLFDSGETAEATRLKRTARRRYTRRKNRICYLQEIFSNEMAKVDDSFFHRLEESFLVEEDKKHERHPIFGNIVDEVAYHEKYPTIYHLRKKLVDSTDKADLRLIYLALAHMIKFRGHFLIEGDLNPDNSDVDKLFIQLVQTYNQLFEENPINASGVDAKAILSARLSKSRRLENLIAQLPGEKKNGLFGNLIALSLGLTPNFKSNFDLAEDAKLQLSKDTYDDDLDNLLAQIGDQYADLFLAAKNLSDAILLSDILRVNTEITKAPLSASMIKRYDEHHQDLTLLKALVRQQLPEKYKEIFFDQSKNGYAGYIDGGASQEEFYKFIKPILEKMDGTEELLVKLNREDLLRKQRTFDNGSIPHQIHLGELHAILRRQEDFYPFLKDNREKIEKILTFRIPYYVGPLARGNSRFAWMTRKSEETITPWNFEEVVDKGASAQSFIERMTNFDKNLPNEKVLPKHSLLYEYFTVYNELTKVKYVTEGMRKPAFLSGEQKKAIVDLLFKTNRKVTVKQLKEDYFKKIECFDSVEISGVEDRFNASLGTYHDLLKIIKDKDFLDNEENEDILEDIVLTLTLFEDREMIEERLKTYAHLFDDKVMKQLKRRRYTGWGRLSRKLINGIRDKQSGKTILDFLKSDGFANRNFMQLIHDDSLTFKEDIQKAQVSGQGDSLHEHIANLAGSPAIKKGILQTVKVVDELVKVMGRHKPENIVIEMARENQTTQKGQKNSRERMKRIEEGIKELGSQILKEHPVENTQLQNEKLYLYYLQNGRDMYVDQELDINRLSDYDVDHIVPQSFLKDDSIDNKVLTRSDKARGKSDNVPSEEVVKKMKNYWRQLLNAKLITQRKFDNLTKAERGGLSELDKAGFIKRQLVETRQITKHVAQILDSRMNTKYDENDKLIREVKVITLKSKLVSDFRKDFQFYKVREINNYHHAHDAYLNAVVGTALIKKYPKLESEFVYGDYKVYDVRKMIAKSEQEIGKATAKYFFYSNIMNFFKTEITLANGEIRKRPLIETNGETGEIVWDKGRDFATVRKVLSMPQVNIVKKTEVQTGGFSKESILPKRNSDKLIARKKDWDPKKYGGFDSPTVAYSVLVVAKVEKGKSKKLKSVKELLGITIMERSSFEKNPIDFLEAKGYKEVKKDLIIKLPKYSLFELENGRKRMLASAGELQKGNELALPSKYVNFLYLASHYEKLKGSPEDNEQKQLFVEQHKHYLDEIIEQISEFSKRVILADANLDKVLSAYNKHRDKPIREQAENIIHLFTLTNLGAPAAFKYFDTTIDRKRYTSTKEVLDATLIHQSITGLYETRIDLSQLGGDGGGSSEAAAKGGGGGTLQLDDEYRLYSPLVKPDQNIQFWLEQFPQAWAETAGMGLAKQVPPQVIQLKASATPVSVRQYPLSKEAQEGIRPHVQRLIQQGILVPVQSPWNTPLLPVRKPGTNDYRPVQDLREVNKRVQDIHPTVPNPYNLLCALPPQRSWYTVLDLKDAFFCLRLHPTSQPLFAFEWRDPGTGRTGQLTWTRLPQGFKNSPTIFDEALHRDLANFRIQHPQVTLLQYVDDLLLAGATKQDCLEGTKALLLELSDLGYRASAKKAQICRREVTYLGYSLRDGQRWLTEARKKTVVQIPAPTTAKQVREFLGTAGFCRLWIPGFATLAAPLYPLTKEKGEFSWAPEHQKAFDAIKKALLSAPALALPDVTKPFTLYVDERKGVARGVLTQTLGPWRRPVAYLSKKLDPVASGWPVCLKAIAAVAILVKDADKLTLGQNITVIAPHALENIVRQPPDRWMTNARMTHYQSLLLTERVTFAPPAALNPATLLPEETDEPVTHDCHQLLIEETGVRKDLTDIPLTGEVLTWFTDGSSYVVEGKRMAGAAVVDGTRTIWASSLPEGTSAQKAELMALTQALRLAEGKSINIYTDSRYAFATAHVHGAIYKQRGLLTSAGREIKNKEEILSLLEALHLPKRLAIIHCPGHQKAKDPISRGNQMADRVAKQAAQGVNLLAGKRTADGSEFEKRTADGSEFESPKKKAKVE

SEQ ID NO: 286 - protein, 2090 aa, synthetic construct
MPAAKRVKLDGGDKKYSIGLDIGTNSVGWAVITDEYKVPSKKFKVLGNTDRHSIKKNLIGALLFDSGETAEATRLKRTARRRYTRRKNRICYLQEIFSNEMAKVDDSFFHRLEESFLVEEDKKHERHPIFGNIVDEVAYHEKYPTIYHLRKKLVDSTDKADLRLIYLALAHMIKFRGHFLIEGDLNPDNSDVDKLFIQLVQTYNQLFEENPINASGVDAKAILSARLSKSRRLENLIAQLPGEKKNGLFGNLIALSLGLTPNFKSNFDLAEDAKLQLSKDTYDDDLDNLLAQIGDQYADLFLAAKNLSDAILLSDILRVNTEITKAPLSASMIKRYDEHHQDLTLLKALVRQQLPEKYKEIFFDQSKNGYAGYIDGGASQEEFYKFIKPILEKMDGTEELLVKLNREDLLRKQRTFDNGSIPHQIHLGELHAILRRQEDFYPFLKDNREKIEKILTFRIPYYVGPLARGNSRFAWMTRKSEETITPWNFEEVVDKGASAQSFIERMTNFDKNLPNEKVLPKHSLLYEYFTVYNELTKVKYVTEGMRKPAFLSGEQKKAIVDLLFKTNRKVTVKQLKEDYFKKIECFDSVEISGVEDRFNASLGTYHDLLKIIKDKDFLDNEENEDILEDIVLTLTLFEDREMIEERLKTYAHLFDDKVMKQLKRRRYTGWGRLSRKLINGIRDKQSGKTILDFLKSDGFANRNFMQLIHDDSLTFKEDIQKAQVSGQGDSLHEHIANLAGSPAIKKGILQTVKVVDELVKVMGRHKPENIVIEMARENQTTQKGQKNSRERMKRIEEGIKELGSQILKEHPVENTQLQNEKLYLYYLQNGRDMYVDQELDINRLSDYDVDHIVPQSFLKDDSIDNKVLTRSDKARGKSDNVPSEEVVKKMKNYWRQLLNAKLITQRKFDNLTKAERGGLSELDKAGFIKRQLVETRQITKHVAQILDSRMNTKYDENDKLIREVKVITLKSKLVSDFRKDFQFYKVREINNYHHAHDAYLNAVVGTALIKKYPKLESEFVYGDYKVYDVRKMIAKSEQEIGKATAKYFFYSNIMNFFKTEITLANGEIRKRPLIETNGETGEIVWDKGRDFATVRKVLSMPQVNIVKKTEVQTGGFSKESILPKRNSDKLIARKKDWDPKKYGGFDSPTVAYSVLVVAKVEKGKSKKLKSVKELLGITIMERSSFEKNPIDFLEAKGYKEVKKDLIIKLPKYSLFELENGRKRMLASAGELQKGNELALPSKYVNFLYLASHYEKLKGSPEDNEQKQLFVEQHKHYLDEIIEQISEFSKRVILADANLDKVLSAYNKHRDKPIREQAENIIHLFTLTNLGAPAAFKYFDTTIDRKRYTSTKEVLDATLIHQSITGLYETRIDLSQLGGDGGGGSGGGEAAAKGGTLQLDDEYRLYSPLVKPDQNIQFWLEQFPQAWAETAGMGLAKQVPPQVIQLKASATPVSVRQYPLSKEAQEGIRPHVQRLIQQGILVPVQSPWNTPLLPVRKPGTNDYRPVQDLREVNKRVQDIHPTVPNPYNLLCALPPQRSWYTVLDLKDAFFCLRLHPTSQPLFAFEWRDPGTGRTGQLTWTRLPQGFKNSPTIFDEALHRDLANFRIQHPQVTLLQYVDDLLLAGATKQDCLEGTKALLLELSDLGYRASAKKAQICRREVTYLGYSLRDGQRWLTEARKKTVVQIPAPTTAKQVREFLGTAGFCRLWIPGFATLAAPLYPLTKEKGEFSWAPEHQKAFDAIKKALLSAPALALPDVTKPFTLYVDERKGVARGVLTQTLGPWRRPVAYLSKKLDPVASGWPVCLKAIAAVAILVKDADKLTLGQNITVIAPHALENIVRQPPDRWMTNARMTHYQSLLLTERVTFAPPAALNPATLLPEETDEPVTHDCHQLLIEETGVRKDLTDIPLTGEVLTWFTDGSSYVVEGKRMAGAAVVDGTRTIWASSLPEGTSAQKAELMALTQALRLAEGKSINIYTDSRYAFATAHVHGAIYKQRGLLTSAGREIKNKEEILSLLEALHLPKRLAIIHCPGHQKAKDPISRGNQMADRVAKQAAQGVNLLAGKRTADGSEFEKRTADGSEFESPKKKAKVE

SEQ ID NO: 287 - protein, 2090 aa, synthetic construct
MPAAKRVKLDGGDKKYSIGLDIGTNSVGWAVITDEYKVPSKKFKVLGNTDRHSIKKNLIGALLFDSGETAEATRLKRTARRRYTRRKNRICYLQEIFSNEMAKVDDSFFHRLEESFLVEEDKKHERHPIFGNIVDEVAYHEKYPTIYHLRKKLVDSTDKADLRLIYLALAHMIKFRGHFLIEGDLNPDNSDVDKLFIQLVQTYNQLFEENPINASGVDAKAILSARLSKSRRLENLIAQLPGEKKNGLFGNLIALSLGLTPNFKSNFDLAEDAKLQLSKDTYDDDLDNLLAQIGDQYADLFLAAKNLSDAILLSDILRVNTEITKAPLSASMIKRYDEHHQDLTLLKALVRQQLPEKYKEIFFDQSKNGYAGYIDGGASQEEFYKFIKPILEKMDGTEELLVKLNREDLLRKQRTFDNGSIPHQIHLGELHAILRRQEDFYPFLKDNREKIEKILTFRIPYYVGPLARGNSRFAWMTRKSEETITPWNFEEVVDKGASAQSFIERMTNFDKNLPNEKVLPKHSLLYEYFTVYNELTKVKYVTEGMRKPAFLSGEQKKAIVDLLFKTNRKVTVKQLKEDYFKKIECFDSVEISGVEDRFNASLGTYHDLLKIIKDKDFLDNEENEDILEDIVLTLTLFEDREMIEERLKTYAHLFDDKVMKQLKRRRYTGWGRLSRKLINGIRDKQSGKTILDFLKSDGFANRNFMQLIHDDSLTFKEDIQKAQVSGQGDSLHEHIANLAGSPAIKKGILQTVKVVDELVKVMGRHKPENIVIEMARENQTTQKGQKNSRERMKRIEEGIKELGSQILKEHPVENTQLQNEKLYLYYLQNGRDMYVDQELDINRLSDYDVDHIVPQSFLKDDSIDNKVLTRSDKARGKSDNVPSEEVVKKMKNYWRQLLNAKLITQRKFDNLTKAERGGLSELDKAGFIKRQLVETRQITKHVAQILDSRMNTKYDENDKLIREVKVITLKSKLVSDFRKDFQFYKVREINNYHHAHDAYLNAVVGTALIKKYPKLESEFVYGDYKVYDVRKMIAKSEQEIGKATAKYFFYSNIMNFFKTEITLANGEIRKRPLIETNGETGEIVWDKGRDFATVRKVLSMPQVNIVKKTEVQTGGFSKESILPKRNSDKLIARKKDWDPKKYGGFDSPTVAYSVLVVAKVEKGKSKKLKSVKELLGITIMERSSFEKNPIDFLEAKGYKEVKKDLIIKLPKYSLFELENGRKRMLASAGELQKGNELALPSKYVNFLYLASHYEKLKGSPEDNEQKQLFVEQHKHYLDEIIEQISEFSKRVILADANLDKVLSAYNKHRDKPIREQAENIIHLFTLTNLGAPAAFKYFDTTIDRKRYTSTKEVLDATLIHQSITGLYETRIDLSQLGGDGGEAAAKPAPGGSGGTLQLDDEYRLYSPLVKPDQNIQFWLEQFPQAWAETAGMGLAKQVPPQVIQLKASATPVSVRQYPLSKEAQEGIRPHVQRLIQQGILVPVQSPWNTPLLPVRKPGTNDYRPVQDLREVNKRVQDIHPTVPNPYNLLCALPPQRSWYTVLDLKDAFFCLRLHPTSQPLFAFEWRDPGTGRTGQLTWTRLPQGFKNSPTIFDEALHRDLANFRIQHPQVTLLQYVDDLLLAGATKQDCLEGTKALLLELSDLGYRASAKKAQICRREVTYLGYSLRDGQRWLTEARKKTVVQIPAPTTAKQVREFLGTAGFCRLWIPGFATLAAPLYPLTKEKGEFSWAPEHQKAFDAIKKALLSAPALALPDVTKPFTLYVDERKGVARGVLTQTLGPWRRPVAYLSKKLDPVASGWPVCLKAIAAVAILVKDADKLTLGQNITVIAPHALENIVRQPPDRWMTNARMTHYQSLLLTERVTFAPPAALNPATLLPEETDEPVTHDCHQLLIEETGVRKDLTDIPLTGEVLTWFTDGSSYVVEGKRMAGAAVVDGTRTIWASSLPEGTSAQKAELMALTQALRLAEGKSINIYTDSRYAFATAHVHGAIYKQRGLLTSAGREIKNKEEILSLLEALHLPKRLAIIHCPGHQKAKDPISRGNQMADRVAKQAAQGVNLLAGKRTADGSEFEKRTADGSEFESPKKKAKVE

SEQ ID NO: 288 - protein, 2090 aa, synthetic construct
MPAAKRVKLDGGDKKYSIGLDIGTNSVGWAVITDEYKVPSKKFKVLGNTDRHSIKKNLIGALLFDSGETAEATRLKRTARRRYTRRKNRICYLQEIFSNEMAKVDDSFFHRLEESFLVEEDKKHERHPIFGNIVDEVAYHEKYPTIYHLRKKLVDSTDKADLRLIYLALAHMIKFRGHFLIEGDLNPDNSDVDKLFIQLVQTYNQLFEENPINASGVDAKAILSARLSKSRRLENLIAQLPGEKKNGLFGNLIALSLGLTPNFKSNFDLAEDAKLQLSKDTYDDDLDNLLAQIGDQYADLFLAAKNLSDAILLSDILRVNTEITKAPLSASMIKRYDEHHQDLTLLKALVRQQLPEKYKEIFFDQSKNGYAGYIDGGASQEEFYKFIKPILEKMDGTEELLVKLNREDLLRKQRTFDNGSIPHQIHLGELHAILRRQEDFYPFLKDNREKIEKILTFRIPYYVGPLARGNSRFAWMTRKSEETITPWNFEEVVDKGASAQSFIERMTNFDKNLPNEKVLPKHSLLYEYFTVYNELTKVKYVTEGMRKPAFLSGEQKKAIVDLLFKTNRKVTVKQLKEDYFKKIECFDSVEISGVEDRFNASLGTYHDLLKIIKDKDFLDNEENEDILEDIVLTLTLFEDREMIEERLKTYAHLFDDKVMKQLKRRRYTGWGRLSRKLINGIRDKQSGKTILDFLKSDGFANRNFMQLIHDDSLTFKEDIQKAQVSGQGDSLHEHIANLAGSPAIKKGILQTVKVVDELVKVMGRHKPENIVIEMARENQTTQKGQKNSRERMKRIEEGIKELGSQILKEHPVENTQLQNEKLYLYYLQNGRDMYVDQELDINRLSDYDVDHIVPQSFLKDDSIDNKVLTRSDKARGKSDNVPSEEVVKKMKNYWRQLLNAKLITQRKFDNLTKAERGGLSELDKAGFIKRQLVETRQITKHVAQILDSRMNTKYDENDKLIREVKVITLKSKLVSDFRKDFQFYKVREINNYHHAHDAYLNAVVGTALIKKYPKLESEFVYGDYKVYDVRKMIAKSEQEIGKATAKYFFYSNIMNFFKTEITLANGEIRKRPLIETNGETGEIVWDKGRDFATVRKVLSMPQVNIVKKTEVQTGGFSKESILPKRNSDKLIARKKDWDPKKYGGFDSPTVAYSVLVVAKVEKGKSKKLKSVKELLGITIMERSSFEKNPIDFLEAKGYKEVKKDLIIKLPKYSLFELENGRKRMLASAGELQKGNELALPSKYVNFLYLASHYEKLKGSPEDNEQKQLFVEQHKHYLDEIIEQISEFSKRVILADANLDKVLSAYNKHRDKPIREQAENIIHLFTLTNLGAPAAFKYFDTTIDRKRYTSTKEVLDATLIHQSITGLYETRIDLSQLGGDGGEAAAKGGGGGSGGTLQLDDEYRLYSPLVKPDQNIQFWLEQFPQAWAETAGMGLAKQVPPQVIQLKASATPVSVRQYPLSKEAQEGIRPHVQRLIQQGILVPVQSPWNTPLLPVRKPGTNDYRPVQDLREVNKRVQDIHPTVPNPYNLLCALPPQRSWYTVLDLKDAFFCLRLHPTSQPLFAFEWRDPGTGRTGQLTWTRLPQGFKNSPTIFDEALHRDLANFRIQHPQVTLLQYVDDLLLAGATKQDCLEGTKALLLELSDLGYRASAKKAQICRREVTYLGYSLRDGQRWLTEARKKTVVQIPAPTTAKQVREFLGTAGFCRLWIPGFATLAAPLYPLTKEKGEFSWAPEHQKAFDAIKKALLSAPALALPDVTKPFTLYVDERKGVARGVLTQTLGPWRRPVAYLSKKLDPVASGWPVCLKAIAAVAILVKDADKLTLGQNITVIAPHALENIVRQPPDRWMTNARMTHYQSLLLTERVTFAPPAALNPATLLPEETDEPVTHDCHQLLIEETGVRKDLTDIPLTGEVLTWFTDGSSYVVEGKRMAGAAVVDGTRTIWASSLPEGTSAQKAELMALTQALRLAEGKSINIYTDSRYAFATAHVHGAIYKQRGLLTSAGREIKNKEEILSLLEALHLPKRLAIIHCPGHQKAKDPISRGNQMADRVAKQAAQGVNLLAGKRTADGSEFEKRTADGSEFESPKKKAKVE

SEQ ID NO: 289 - protein, 2082 aa, synthetic construct
MPAAKRVKLDGGDKKYSIGLDIGTNSVGWAVITDEYKVPSKKFKVLGNTDRHSIKKNLIGALLFDSGETAEATRLKRTARRRYTRRKNRICYLQEIFSNEMAKVDDSFFHRLEESFLVEEDKKHERHPIFGNIVDEVAYHEKYPTIYHLRKKLVDSTDKADLRLIYLALAHMIKFRGHFLIEGDLNPDNSDVDKLFIQLVQTYNQLFEENPINASGVDAKAILSARLSKSRRLENLIAQLPGEKKNGLFGNLIALSLGLTPNFKSNFDLAEDAKLQLSKDTYDDDLDNLLAQIGDQYADLFLAAKNLSDAILLSDILRVNTEITKAPLSASMIKRYDEHHQDLTLLKALVRQQLPEKYKEIFFDQSKNGYAGYIDGGASQEEFYKFIKPILEKMDGTEELLVKLNREDLLRKQRTFDNGSIPHQIHLGELHAILRRQEDFYPFLKDNREKIEKILTFRIPYYVGPLARGNSRFAWMTRKSEETITPWNFEEVVDKGASAQSFIERMTNFDKNLPNEKVLPKHSLLYEYFTVYNELTKVKYVTEGMRKPAFLSGEQKKAIVDLLFKTNRKVTVKQLKEDYFKKIECFDSVEISGVEDRFNASLGTYHDLLKIIKDKDFLDNEENEDILEDIVLTLTLFEDREMIEERLKTYAHLFDDKVMKQLKRRRYTGWGRLSRKLINGIRDKQSGKTILDFLKSDGFANRNFMQLIHDDSLTFKEDIQKAQVSGQGDSLHEHIANLAGSPAIKKGILQTVKVVDELVKVMGRHKPENIVIEMARENQTTQKGQKNSRERMKRIEEGIKELGSQILKEHPVENTQLQNEKLYLYYLQNGRDMYVDQELDINRLSDYDVDHIVPQSFLKDDSIDNKVLTRSDKARGKSDNVPSEEVVKKMKNYWRQLLNAKLITQRKFDNLTKAERGGLSELDKAGFIKRQLVETRQITKHVAQILDSRMNTKYDENDKLIREVKVITLKSKLVSDFRKDFQFYKVREINNYHHAHDAYLNAVVGTALIKKYPKLESEFVYGDYKVYDVRKMIAKSEQEIGKATAKYFFYSNIMNFFKTEITLANGEIRKRPLIETNGETGEIVWDKGRDFATVRKVLSMPQVNIVKKTEVQTGGFSKESILPKRNSDKLIARKKDWDPKKYGGFDSPTVAYSVLVVAKVEKGKSKKLKSVKELLGITIMERSSFEKNPIDFLEAKGYKEVKKDLIIKLPKYSLFELENGRKRMLASAGELQKGNELALPSKYVNFLYLASHYEKLKGSPEDNEQKQLFVEQHKHYLDEIIEQISEFSKRVILADANLDKVLSAYNKHRDKPIREQAENIIHLFTLTNLGAPAAFKYFDTTIDRKRYTSTKEVLDATLIHQSITGLYETRIDLSQLGGDGGGGGGGTLQLDDEYRLYSPLVKPDQNIQFWLEQFPQAWAETAGMGLAKQVPPQVIQLKASATPVSVRQYPLSKEAQEGIRPHVQRLIQQGILVPVQSPWNTPLLPVRKPGTNDYRPVQDLREVNKRVQDIHPTVPNPYNLLCALPPQRSWYTVLDLKDAFFCLRLHPTSQPLFAFEWRDPGTGRTGQLTWTRLPQGFKNSPTIFDEALHRDLANFRIQHPQVTLLQYVDDLLLAGATKQDCLEGTKALLLELSDLGYRASAKKAQICRREVTYLGYSLRDGQRWLTEARKKTVVQIPAPTTAKQVREFLGTAGFCRLWIPGFATLAAPLYPLTKEKGEFSWAPEHQKAFDAIKKALLSAPALALPDVTKPFTLYVDERKGVARGVLTQTLGPWRRPVAYLSKKLDPVASGWPVCLKAIAAVAILVKDADKLTLGQNITVIAPHALENIVRQPPDRWMTNARMTHYQSLLLTERVTFAPPAALNPATLLPEETDEPVTHDCHQLLIEETGVRKDLTDIPLTGEVLTWFTDGSSYVVEGKRMAGAAVVDGTRTIWASSLPEGTSAQKAELMALTQALRLAEGKSINIYTDSRYAFATAHVHGAIYKQRGLLTSAGREIKNKEEILSLLEALHLPKRLAIIHCPGHQKAKDPISRGNQMADRVAKQAAQGVNLLAGKRTADGSEFEKRTADGSEFESPKKKAKVE

SEQ ID NO: 290 - protein, 2090 aa, synthetic construct
MPAAKRVKLDGGDKKYSIGLDIGTNSVGWAVITDEYKVPSKKFKVLGNTDRHSIKKNLIGALLFDSGETAEATRLKRTARRRYTRRKNRICYLQEIFSNEMAKVDDSFFHRLEESFLVEEDKKHERHPIFGNIVDEVAYHEKYPTIYHLRKKLVDSTDKADLRLIYLALAHMIKFRGHFLIEGDLNPDNSDVDKLFIQLVQTYNQLFEENPINASGVDAKAILSARLSKSRRLENLIAQLPGEKKNGLFGNLIALSLGLTPNFKSNFDLAEDAKLQLSKDTYDDDLDNLLAQIGDQYADLFLAAKNLSDAILLSDILRVNTEITKAPLSASMIKRYDEHHQDLTLLKALVRQQLPEKYKEIFFDQSKNGYAGYIDGGASQEEFYKFIKPILEKMDGTEELLVKLNREDLLRKQRTFDNGSIPHQIHLGELHAILRRQEDFYPFLKDNREKIEKILTFRIPYYVGPLARGNSRFAWMTRKSEETITPWNFEEVVDKGASAQSFIERMTNFDKNLPNEKVLPKHSLLYEYFTVYNELTKVKYVTEGMRKPAFLSGEQKKAIVDLLFKTNRKVTVKQLKEDYFKKIECFDSVEISGVEDRFNASLGTYHDLLKIIKDKDFLDNEENEDILEDIVLTLTLFEDREMIEERLKTYAHLFDDKVMKQLKRRRYTGWGRLSRKLINGIRDKQSGKTILDFLKSDGFANRNFMQLIHDDSLTFKEDIQKAQVSGQGDSLHEHIANLAGSPAIKKGILQTVKVVDELVKVMGRHKPENIVIEMARENQTTQKGQKNSRERMKRIEEGIKELGSQILKEHPVENTQLQNEKLYLYYLQNGRDMYVDQELDINRLSDYDVDHIVPQSFLKDDSIDNKVLTRSDKARGKSDNVPSEEVVKKMKNYWRQLLNAKLITQRKFDNLTKAERGGLSELDKAGFIKRQLVETRQITKHVAQILDSRMNTKYDENDKLIREVKVITLKSKLVSDFRKDFQFYKVREINNYHHAHDAYLNAVVGTALIKKYPKLESEFVYGDYKVYDVRKMIAKSEQEIGKATAKYFFYSNIMNFFKTEITLANGEIRKRPLIETNGETGEIVWDKGRDFATVRKVLSMPQVNIVKKTEVQTGGFSKESILPKRNSDKLIARKKDWDPKKYGGFDSPTVAYSVLVVAKVEKGKSKKLKSVKELLGITIMERSSFEKNPIDFLEAKGYKEVKKDLIIKLPKYSLFELENGRKRMLASAGELQKGNELALPSKYVNFLYLASHYEKLKGSPEDNEQKQLFVEQHKHYLDEIIEQISEFSKRVILADANLDKVLSAYNKHRDKPIREQAENIIHLFTLTNLGAPAAFKYFDTTIDRKRYTSTKEVLDATLIHQSITGLYETRIDLSQLGGDGGEAAAKGGGGSSGGTLQLDDEYRLYSPLVKPDQNIQFWLEQFPQAWAETAGMGLAKQVPPQVIQLKASATPVSVRQYPLSKEAQEGIRPHVQRLIQQGILVPVQSPWNTPLLPVRKPGTNDYRPVQDLREVNKRVQDIHPTVPNPYNLLCALPPQRSWYTVLDLKDAFFCLRLHPTSQPLFAFEWRDPGTGRTGQLTWTRLPQGFKNSPTIFDEALHRDLANFRIQHPQVTLLQYVDDLLLAGATKQDCLEGTKALLLELSDLGYRASAKKAQICRREVTYLGYSLRDGQRWLTEARKKTVVQIPAPTTAKQVREFLGTAGFCRLWIPGFATLAAPLYPLTKEKGEFSWAPEHQKAFDAIKKALLSAPALALPDVTKPFTLYVDERKGVARGVLTQTLGPWRRPVAYLSKKLDPVASGWPVCLKAIAAVAILVKDADKLTLGQNITVIAPHALENIVRQPPDRWMTNARMTHYQSLLLTERVTFAPPAALNPATLLPEETDEPVTHDCHQLLIEETGVRKDLTDIPLTGEVLTWFTDGSSYVVEGKRMAGAAVVDGTRTIWASSLPEGTSAQKAELMALTQALRLAEGKSINIYTDSRYAFATAHVHGAIYKQRGLLTSAGREIKNKEEILSLLEALHLPKRLAIIHCPGHQKAKDPISRGNQMADRVAKQAAQGVNLLAGKRTADGSEFEKRTADGSEFESPKKKAKVE

SEQ ID NO: 291 - protein, 2083 aa, synthetic construct
MPAAKRVKLDGGDKKYSIGLDIGTNSVGWAVITDEYKVPSKKFKVLGNTDRHSIKKNLIGALLFDSGETAEATRLKRTARRRYTRRKNRICYLQEIFSNEMAKVDDSFFHRLEESFLVEEDKKHERHPIFGNIVDEVAYHEKYPTIYHLRKKLVDSTDKADLRLIYLALAHMIKFRGHFLIEGDLNPDNSDVDKLFIQLVQTYNQLFEENPINASGVDAKAILSARLSKSRRLENLIAQLPGEKKNGLFGNLIALSLGLTPNFKSNFDLAEDAKLQLSKDTYDDDLDNLLAQIGDQYADLFLAAKNLSDAILLSDILRVNTEITKAPLSASMIKRYDEHHQDLTLLKALVRQQLPEKYKEIFFDQSKNGYAGYIDGGASQEEFYKFIKPILEKMDGTEELLVKLNREDLLRKQRTFDNGSIPHQIHLGELHAILRRQEDFYPFLKDNREKIEKILTFRIPYYVGPLARGNSRFAWMTRKSEETITPWNFEEVVDKGASAQSFIERMTNFDKNLPNEKVLPKHSLLYEYFTVYNELTKVKYVTEGMRKPAFLSGEQKKAIVDLLFKTNRKVTVKQLKEDYFKKIECFDSVEISGVEDRFNASLGTYHDLLKIIKDKDFLDNEENEDILEDIVLTLTLFEDREMIEERLKTYAHLFDDKVMKQLKRRRYTGWGRLSRKLINGIRDKQSGKTILDFLKSDGFANRNFMQLIHDDSLTFKEDIQKAQVSGQGDSLHEHIANLAGSPAIKKGILQTVKVVDELVKVMGRHKPENIVIEMARENQTTQKGQKNSRERMKRIEEGIKELGSQILKEHPVENTQLQNEKLYLYYLQNGRDMYVDQELDINRLSDYDVDHIVPQSFLKDDSIDNKVLTRSDKARGKSDNVPSEEVVKKMKNYWRQLLNAKLITQRKFDNLTKAERGGLSELDKAGFIKRQLVETRQITKHVAQILDSRMNTKYDENDKLIREVKVITLKSKLVSDFRKDFQFYKVREINNYHHAHDAYLNAVVGTALIKKYPKLESEFVYGDYKVYDVRKMIAKSEQEIGKATAKYFFYSNIMNFFKTEITLANGEIRKRPLIETNGETGEIVWDKGRDFATVRKVLSMPQVNIVKKTEVQTGGFSKESILPKRNSDKLIARKKDWDPKKYGGFDSPTVAYSVLVVAKVEKGKSKKLKSVKELLGITIMERSSFEKNPIDFLEAKGYKEVKKDLIIKLPKYSLFELENGRKRMLASAGELQKGNELALPSKYVNFLYLASHYEKLKGSPEDNEQKQLFVEQHKHYLDEIIEQISEFSKRVILADANLDKVLSAYNKHRDKPIREQAENIIHLFTLTNLGAPAAFKYFDTTIDRKRYTSTKEVLDATLIHQSITGLYETRIDLSQLGGDGGGGGGGGTLQLDDEYRLYSPLVKPDQNIQFWLEQFPQAWAETAGMGLAKQVPPQVIQLKASATPVSVRQYPLSKEAQEGIRPHVQRLIQQGILVPVQSPWNTPLLPVRKPGTNDYRPVQDLREVNKRVQDIHPTVPNPYNLLCALPPQRSWYTVLDLKDAFFCLRLHPTSQPLFAFEWRDPGTGRTGQLTWTRLPQGFKNSPTIFDEALHRDLANFRIQHPQVTLLQYVDDLLLAGATKQDCLEGTKALLLELSDLGYRASAKKAQICRREVTYLGYSLRDGQRWLTEARKKTVVQIPAPTTAKQVREFLGTAGFCRLWIPGFATLAAPLYPLTKEKGEFSWAPEHQKAFDAIKKALLSAPALALPDVTKPFTLYVDERKGVARGVLTQTLGPWRRPVAYLSKKLDPVASGWPVCLKAIAAVAILVKDADKLTLGQNITVIAPHALENIVRQPPDRWMTNARMTHYQSLLLTERVTFAPPAALNPATLLPEETDEPVTHDCHQLLIEETGVRKDLTDIPLTGEVLTWFTDGSSYVVEGKRMAGAAVVDGTRTIWASSLPEGTSAQKAELMALTQALRLAEGKSINIYTDSRYAFATAHVHGAIYKQRGLLTSAGREIKNKEEILSLLEALHLPKRLAIIHCPGHQKAKDPISRGNQMADRVAKQAAQGVNLLAGKRTADGSEFEKRTADGSEFESPKKKAKVE

SEQ ID NO: 292 - protein, 2097 aa, synthetic construct
MPAAKRVKLDGGDKKYSIGLDIGTNSVGWAVITDEYKVPSKKFKVLGNTDRHSIKKNLIGALLFDSGETAEATRLKRTARRRYTRRKNRICYLQEIFSNEMAKVDDSFFHRLEESFLVEEDKKHERHPIFGNIVDEVAYHEKYPTIYHLRKKLVDSTDKADLRLIYLALAHMIKFRGHFLIEGDLNPDNSDVDKLFIQLVQTYNQLFEENPINASGVDAKAILSARLSKSRRLENLIAQLPGEKKNGLFGNLIALSLGLTPNFKSNFDLAEDAKLQLSKDTYDDDLDNLLAQIGDQYADLFLAAKNLSDAILLSDILRVNTEITKAPLSASMIKRYDEHHQDLTLLKALVRQQLPEKYKEIFFDQSKNGYAGYIDGGASQEEFYKFIKPILEKMDGTEELLVKLNREDLLRKQRTFDNGSIPHQIHLGELHAILRRQEDFYPFLKDNREKIEKILTFRIPYYVGPLARGNSRFAWMTRKSEETITPWNFEEVVDKGASAQSFIERMTNFDKNLPNEKVLPKHSLLYEYFTVYNELTKVKYVTEGMRKPAFLSGEQKKAIVDLLFKTNRKVTVKQLKEDYFKKIECFDSVEISGVEDRFNASLGTYHDLLKIIKDKDFLDNEENEDILEDIVLTLTLFEDREMIEERLKTYAHLFDDKVMKQLKRRRYTGWGRLSRKLINGIRDKQSGKTILDFLKSDGFANRNFMQLIHDDSLTFKEDIQKAQVSGQGDSLHEHIANLAGSPAIKKGILQTVKVVDELVKVMGRHKPENIVIEMARENQTTQKGQKNSRERMKRIEEGIKELGSQILKEHPVENTQLQNEKLYLYYLQNGRDMYVDQELDINRLSDYDVDHIVPQSFLKDDSIDNKVLTRSDKARGKSDNVPSEEVVKKMKNYWRQLLNAKLITQRKFDNLTKAERGGLSELDKAGFIKRQLVETRQITKHVAQILDSRMNTKYDENDKLIREVKVITLKSKLVSDFRKDFQFYKVREINNYHHAHDAYLNAVVGTALIKKYPKLESEFVYGDYKVYDVRKMIAKSEQEIGKATAKYFFYSNIMNFFKTEITLANGEIRKRPLIETNGETGEIVWDKGRDFATVRKVLSMPQVNIVKKTEVQTGGFSKESILPKRNSDKLIARKKDWDPKKYGGFDSPTVAYSVLVVAKVEKGKSKKLKSVKELLGITIMERSSFEKNPIDFLEAKGYKEVKKDLIIKLPKYSLFELENGRKRMLASAGELQKGNELALPSKYVNFLYLASHYEKLKGSPEDNEQKQLFVEQHKHYLDEIIEQISEFSKRVILADANLDKVLSAYNKHRDKPIREQAENIIHLFTLTNLGAPAAFKYFDTTIDRKRYTSTKEVLDATLIHQSITGLYETRIDLSQLGGDGGGGSGGSGGSGGSGGSGGSGGTLQLDDEYRLYSPLVKPDQNIQFWLEQFPQAWAETAGMGLAKQVPPQVIQLKASATPVSVRQYPLSKEAQEGIRPHVQRLIQQGILVPVQSPWNTPLLPVRKPGTNDYRPVQDLREVNKRVQDIHPTVPNPYNLLCALPPQRSWYTVLDLKDAFFCLRLHPTSQPLFAFEWRDPGTGRTGQLTWTRLPQGFKNSPTIFDEALHRDLANFRIQHPQVTLLQYVDDLLLAGATKQDCLEGTKALLLELSDLGYRASAKKAQICRREVTYLGYSLRDGQRWLTEARKKTVVQIPAPTTAKQVREFLGTAGFCRLWIPGFATLAAPLYPLTKEKGEFSWAPEHQKAFDAIKKALLSAPALALPDVTKPFTLYVDERKGVARGVLTQTLGPWRRPVAYLSKKLDPVASGWPVCLKAIAAVAILVKDADKLTLGQNITVIAPHALENIVRQPPDRWMTNARMTHYQSLLLTERVTFAPPAALNPATLLPEETDEPVTHDCHQLLIEETGVRKDLTDIPLTGEVLTWFTDGSSYVVEGKRMAGAAVVDGTRTIWASSLPEGTSAQKAELMALTQALRLAEGKSINIYTDSRYAFATAHVHGAIYKQRGLLTSAGREIKNKEEILSLLEALHLPKRLAIIHCPGHQKAKDPISRGNQMADRVAKQAAQGVNLLAGKRTADGSEFEKRTADGSEFESPKKKAKVE

SEQ ID NO: 293 - protein, 2087 aa, synthetic construct
MPAAKRVKLDGGDKKYSIGLDIGTNSVGWAVITDEYKVPSKKFKVLGNTDRHSIKKNLIGALLFDSGETAEATRLKRTARRRYTRRKNRICYLQEIFSNEMAKVDDSFFHRLEESFLVEEDKKHERHPIFGNIVDEVAYHEKYPTIYHLRKKLVDSTDKADLRLIYLALAHMIKFRGHFLIEGDLNPDNSDVDKLFIQLVQTYNQLFEENPINASGVDAKAILSARLSKSRRLENLIAQLPGEKKNGLFGNLIALSLGLTPNFKSNFDLAEDAKLQLSKDTYDDDLDNLLAQIGDQYADLFLAAKNLSDAILLSDILRVNTEITKAPLSASMIKRYDEHHQDLTLLKALVRQQLPEKYKEIFFDQSKNGYAGYIDGGASQEEFYKFIKPILEKMDGTEELLVKLNREDLLRKQRTFDNGSIPHQIHLGELHAILRRQEDFYPFLKDNREKIEKILTFRIPYYVGPLARGNSRFAWMTRKSEETITPWNFEEVVDKGASAQSFIERMTNFDKNLPNEKVLPKHSLLYEYFTVYNELTKVKYVTEGMRKPAFLSGEQKKAIVDLLFKTNRKVTVKQLKEDYFKKIECFDSVEISGVEDRFNASLGTYHDLLKIIKDKDFLDNEENEDILEDIVLTLTLFEDREMIEERLKTYAHLFDDKVMKQLKRRRYTGWGRLSRKLINGIRDKQSGKTILDFLKSDGFANRNFMQLIHDDSLTFKEDIQKAQVSGQGDSLHEHIANLAGSPAIKKGILQTVKVVDELVKVMGRHKPENIVIEMARENQTTQKGQKNSRERMKRIEEGIKELGSQILKEHPVENTQLQNEKLYLYYLQNGRDMYVDQELDINRLSDYDVDHIVPQSFLKDDSIDNKVLTRSDKARGKSDNVPSEEVVKKMKNYWRQLLNAKLITQRKFDNLTKAERGGLSELDKAGFIKRQLVETRQITKHVAQILDSRMNTKYDENDKLIREVKVITLKSKLVSDFRKDFQFYKVREINNYHHAHDAYLNAVVGTALIKKYPKLESEFVYGDYKVYDVRKMIAKSEQEIGKATAKYFFYSNIMNFFKTEITLANGEIRKRPLIETNGETGEIVWDKGRDFATVRKVLSMPQVNIVKKTEVQTGGFSKESILPKRNSDKLIARKKDWDPKKYGGFDSPTVAYSVLVVAKVEKGKSKKLKSVKELLGITIMERSSFEKNPIDFLEAKGYKEVKKDLIIKLPKYSLFELENGRKRMLASAGELQKGNELALPSKYVNFLYLASHYEKLKGSPEDNEQKQLFVEQHKHYLDEIIEQISEFSKRVILADANLDKVLSAYNKHRDKPIREQAENIIHLFTLTNLGAPAAFKYFDTTIDRKRYTSTKEVLDATLIHQSITGLYETRIDLSQLGGDGGGSSEAAAKGGTLQLDDEYRLYSPLVKPDQNIQFWLEQFPQAWAETAGMGLAKQVPPQVIQLKASATPVSVRQYPLSKEAQEGIRPHVQRLIQQGILVPVQSPWNTPLLPVRKPGTNDYRPVQDLREVNKRVQDIHPTVPNPYNLLCALPPQRSWYTVLDLKDAFFCLRLHPTSQPLFAFEWRDPGTGRTGQLTWTRLPQGFKNSPTIFDEALHRDLANFRIQHPQVTLLQYVDDLLLAGATKQDCLEGTKALLLELSDLGYRASAKKAQICRREVTYLGYSLRDGQRWLTEARKKTVVQIPAPTTAKQVREFLGTAGFCRLWIPGFATLAAPLYPLTKEKGEFSWAPEHQKAFDAIKKALLSAPALALPDVTKPFTLYVDERKGVARGVLTQTLGPWRRPVAYLSKKLDPVASGWPVCLKAIAAVAILVKDADKLTLGQNITVIAPHALENIVRQPPDRWMTNARMTHYQSLLLTERVTFAPPAALNPATLLPEETDEPVTHDCHQLLIEETGVRKDLTDIPLTGEVLTWFTDGSSYVVEGKRMAGAAVVDGTRTIWASSLPEGTSAQKAELMALTQALRLAEGKSINIYTDSRYAFATAHVHGAIYKQRGLLTSAGREIKNKEEILSLLEALHLPKRLAIIHCPGHQKAKDPISRGNQMADRVAKQAAQGVNLLAGKRTADGSEFEKRTADGSEFESPKKKAKVE

SEQ ID NO: 294 - protein, 2088 aa, synthetic construct
MPAAKRVKLDGGDKKYSIGLDIGTNSVGWAVITDEYKVPSKKFKVLGNTDRHSIKKNLIGALLFDSGETAEATRLKRTARRRYTRRKNRICYLQEIFSNEMAKVDDSFFHRLEESFLVEEDKKHERHPIFGNIVDEVAYHEKYPTIYHLRKKLVDSTDKADLRLIYLALAHMIKFRGHFLIEGDLNPDNSDVDKLFIQLVQTYNQLFEENPINASGVDAKAILSARLSKSRRLENLIAQLPGEKKNGLFGNLIALSLGLTPNFKSNFDLAEDAKLQLSKDTYDDDLDNLLAQIGDQYADLFLAAKNLSDAILLSDILRVNTEITKAPLSASMIKRYDEHHQDLTLLKALVRQQLPEKYKEIFFDQSKNGYAGYIDGGASQEEFYKFIKPILEKMDGTEELLVKLNREDLLRKQRTFDNGSIPHQIHLGELHAILRRQEDFYPFLKDNREKIEKILTFRIPYYVGPLARGNSRFAWMTRKSEETITPWNFEEVVDKGASAQSFIERMTNFDKNLPNEKVLPKHSLLYEYFTVYNELTKVKYVTEGMRKPAFLSGEQKKAIVDLLFKTNRKVTVKQLKEDYFKKIECFDSVEISGVEDRFNASLGTYHDLLKIIKDKDFLDNEENEDILEDIVLTLTLFEDREMIEERLKTYAHLFDDKVMKQLKRRRYTGWGRLSRKLINGIRDKQSGKTILDFLKSDGFANRNFMQLIHDDSLTFKEDIQKAQVSGQGDSLHEHIANLAGSPAIKKGILQTVKVVDELVKVMGRHKPENIVIEMARENQTTQKGQKNSRERMKRIEEGIKELGSQILKEHPVENTQLQNEKLYLYYLQNGRDMYVDQELDINRLSDYDVDHIVPQSFLKDDSIDNKVLTRSDKARGKSDNVPSEEVVKKMKNYWRQLLNAKLITQRKFDNLTKAERGGLSELDKAGFIKRQLVETRQITKHVAQILDSRMNTKYDENDKLIREVKVITLKSKLVSDFRKDFQFYKVREINNYHHAHDAYLNAVVGTALIKKYPKLESEFVYGDYKVYDVRKMIAKSEQEIGKATAKYFFYSNIMNFFKTEITLANGEIRKRPLIETNGETGEIVWDKGRDFATVRKVLSMPQVNIVKKTEVQTGGFSKESILPKRNSDKLIARKKDWDPKKYGGFDSPTVAYSVLVVAKVEKGKSKKLKSVKELLGITIMERSSFEKNPIDFLEAKGYKEVKKDLIIKLPKYSLFELENGRKRMLASAGELQKGNELALPSKYVNFLYLASHYEKLKGSPEDNEQKQLFVEQHKHYLDEIIEQISEFSKRVILADANLDKVLSAYNKHRDKPIREQAENIIHLFTLTNLGAPAAFKYFDTTIDRKRYTSTKEVLDATLIHQSITGLYETRIDLSQLGGDGGGGSGGSGGSGGTLQLDDEYRLYSPLVKPDQNIQFWLEQFPQAWAETAGMGLAKQVPPQVIQLKASATPVSVRQYPLSKEAQEGIRPHVQRLIQQGILVPVQSPWNTPLLPVRKPGTNDYRPVQDLREVNKRVQDIHPTVPNPYNLLCALPPQRSWYTVLDLKDAFFCLRLHPTSQPLFAFEWRDPGTGRTGQLTWTRLPQGFKNSPTIFDEALHRDLANFRIQHPQVTLLQYVDDLLLAGATKQDCLEGTKALLLELSDLGYRASAKKAQICRREVTYLGYSLRDGQRWLTEARKKTVVQIPAPTTAKQVREFLGTAGFCRLWIPGFATLAAPLYPLTKEKGEFSWAPEHQKAFDAIKKALLSAPALALPDVTKPFTLYVDERKGVARGVLTQTLGPWRRPVAYLSKKLDPVASGWPVCLKAIAAVAILVKDADKLTLGQNITVIAPHALENIVRQPPDRWMTNARMTHYQSLLLTERVTFAPPAALNPATLLPEETDEPVTHDCHQLLIEETGVRKDLTDIPLTGEVLTWFTDGSSYVVEGKRMAGAAVVDGTRTIWASSLPEGTSAQKAELMALTQALRLAEGKSINIYTDSRYAFATAHVHGAIYKQRGLLTSAGREIKNKEEILSLLEALHLPKRLAIIHCPGHQKAKDPISRGNQMADRVAKQAAQGVNLLAGKRTADGSEFEKRTADGSEFESPKKKAKVE

SEQ ID NO: 295 - protein, 2088 aa, synthetic construct
MPAAKRVKLDGGDKKYSIGLDIGTNSVGWAVITDEYKVPSKKFKVLGNTDRHSIKKNLIGALLFDSGETAEATRLKRTARRRYTRRKNRICYLQEIFSNEMAKVDDSFFHRLEESFLVEEDKKHERHPIFGNIVDEVAYHEKYPTIYHLRKKLVDSTDKADLRLIYLALAHMIKFRGHFLIEGDLNPDNSDVDKLFIQLVQTYNQLFEENPINASGVDAKAILSARLSKSRRLENLIAQLPGEKKNGLFGNLIALSLGLTPNFKSNFDLAEDAKLQLSKDTYDDDLDNLLAQIGDQYADLFLAAKNLSDAILLSDILRVNTEITKAPLSASMIKRYDEHHQDLTLLKALVRQQLPEKYKEIFFDQSKNGYAGYIDGGASQEEFYKFIKPILEKMDGTEELLVKLNREDLLRKQRTFDNGSIPHQIHLGELHAILRRQEDFYPFLKDNREKIEKILTFRIPYYVGPLARGNSRFAWMTRKSEETITPWNFEEVVDKGASAQSFIERMTNFDKNLPNEKVLPKHSLLYEYFTVYNELTKVKYVTEGMRKPAFLSGEQKKAIVDLLFKTNRKVTVKQLKEDYFKKIECFDSVEISGVEDRFNASLGTYHDLLKIIKDKDFLDNEENEDILEDIVLTLTLFEDREMIEERLKTYAHLFDDKVMKQLKRRRYTGWGRLSRKLINGIRDKQSGKTILDFLKSDGFANRNFMQLIHDDSLTFKEDIQKAQVSGQGDSLHEHIANLAGSPAIKKGILQTVKVVDELVKVMGRHKPENIVIEMARENQTTQKGQKNSRERMKRIEEGIKELGSQILKEHPVENTQLQNEKLYLYYLQNGRDMYVDQELDINRLSDYDVDHIVPQSFLKDDSIDNKVLTRSDKARGKSDNVPSEEVVKKMKNYWRQLLNAKLITQRKFDNLTKAERGGLSELDKAGFIKRQLVETRQITKHVAQILDSRMNTKYDENDKLIREVKVITLKSKLVSDFRKDFQFYKVREINNYHHAHDAYLNAVVGTALIKKYPKLESEFVYGDYKVYDVRKMIAKSEQEIGKATAKYFFYSNIMNFFKTEITLANGEIRKRPLIETNGETGEIVWDKGRDFATVRKVLSMPQVNIVKKTEVQTGGFSKESILPKRNSDKLIARKKDWDPKKYGGFDSPTVAYSVLVVAKVEKGKSKKLKSVKELLGITIMERSSFEKNPIDFLEAKGYKEVKKDLIIKLPKYSLFELENGRKRMLASAGELQKGNELALPSKYVNFLYLASHYEKLKGSPEDNEQKQLFVEQHKHYLDEIIEQISEFSKRVILADANLDKVLSAYNKHRDKPIREQAENIIHLFTLTNLGAPAAFKYFDTTIDRKRYTSTKEVLDATLIHQSITGLYETRIDLSQLGGDGGGSSPAPGGSGGTLQLDDEYRLYSPLVKPDQNIQFWLEQFPQAWAETAGMGLAKQVPPQVIQLKASATPVSVRQYPLSKEAQEGIRPHVQRLIQQGILVPVQSPWNTPLLPVRKPGTNDYRPVQDLREVNKRVQDIHPTVPNPYNLLCALPPQRSWYTVLDLKDAFFCLRLHPTSQPLFAFEWRDPGTGRTGQLTWTRLPQGFKNSPTIFDEALHRDLANFRIQHPQVTLLQYVDDLLLAGATKQDCLEGTKALLLELSDLGYRASAKKAQICRREVTYLGYSLRDGQRWLTEARKKTVVQIPAPTTAKQVREFLGTAGFCRLWIPGFATLAAPLYPLTKEKGEFSWAPEHQKAFDAIKKALLSAPALALPDVTKPFTLYVDERKGVARGVLTQTLGPWRRPVAYLSKKLDPVASGWPVCLKAIAAVAILVKDADKLTLGQNITVIAPHALENIVRQPPDRWMTNARMTHYQSLLLTERVTFAPPAALNPATLLPEETDEPVTHDCHQLLIEETGVRKDLTDIPLTGEVLTWFTDGSSYVVEGKRMAGAAVVDGTRTIWASSLPEGTSAQKAELMALTQALRLAEGKSINIYTDSRYAFATAHVHGAIYKQRGLLTSAGREIKNKEEILSLLEALHLPKRLAIIHCPGHQKAKDPISRGNQMADRVAKQAAQGVNLLAGKRTADGSEFEKRTADGSEFESPKKKAKVE

SEQ ID NO: 296 - protein, 2090 aa, synthetic construct
MPAAKRVKLDGGDKKYSIGLDIGTNSVGWAVITDEYKVPSKKFKVLGNTDRHSIKKNLIGALLFDSGETAEATRLKRTARRRYTRRKNRICYLQEIFSNEMAKVDDSFFHRLEESFLVEEDKKHERHPIFGNIVDEVAYHEKYPTIYHLRKKLVDSTDKADLRLIYLALAHMIKFRGHFLIEGDLNPDNSDVDKLFIQLVQTYNQLFEENPINASGVDAKAILSARLSKSRRLENLIAQLPGEKKNGLFGNLIALSLGLTPNFKSNFDLAEDAKLQLSKDTYDDDLDNLLAQIGDQYADLFLAAKNLSDAILLSDILRVNTEITKAPLSASMIKRYDEHHQDLTLLKALVRQQLPEKYKEIFFDQSKNGYAGYIDGGASQEEFYKFIKPILEKMDGTEELLVKLNREDLLRKQRTFDNGSIPHQIHLGELHAILRRQEDFYPFLKDNREKIEKILTFRIPYYVGPLARGNSRFAWMTRKSEETITPWNFEEVVDKGASAQSFIERMTNFDKNLPNEKVLPKHSLLYEYFTVYNELTKVKYVTEGMRKPAFLSGEQKKAIVDLLFKTNRKVTVKQLKEDYFKKIECFDSVEISGVEDRFNASLGTYHDLLKIIKDKDFLDNEENEDILEDIVLTLTLFEDREMIEERLKTYAHLFDDKVMKQLKRRRYTGWGRLSRKLINGIRDKQSGKTILDFLKSDGFANRNFMQLIHDDSLTFKEDIQKAQVSGQGDSLHEHIANLAGSPAIKKGILQTVKVVDELVKVMGRHKPENIVIEMARENQTTQKGQKNSRERMKRIEEGIKELGSQILKEHPVENTQLQNEKLYLYYLQNGRDMYVDQELDINRLSDYDVDHIVPQSFLKDDSIDNKVLTRSDKARGKSDNVPSEEVVKKMKNYWRQLLNAKLITQRKFDNLTKAERGGLSELDKAGFIKRQLVETRQITKHVAQILDSRMNTKYDENDKLIREVKVITLKSKLVSDFRKDFQFYKVREINNYHHAHDAYLNAVVGTALIKKYPKLESEFVYGDYKVYDVRKMIAKSEQEIGKATAKYFFYSNIMNFFKTEITLANGEIRKRPLIETNGETGEIVWDKGRDFATVRKVLSMPQVNIVKKTEVQTGGFSKESILPKRNSDKLIARKKDWDPKKYGGFDSPTVAYSVLVVAKVEKGKSKKLKSVKELLGITIMERSSFEKNPIDFLEAKGYKEVKKDLIIKLPKYSLFELENGRKRMLASAGELQKGNELALPSKYVNFLYLASHYEKLKGSPEDNEQKQLFVEQHKHYLDEIIEQISEFSKRVILADANLDKVLSAYNKHRDKPIREQAENIIHLFTLTNLGAPAAFKYFDTTIDRKRYTSTKEVLDATLIHQSITGLYETRIDLSQLGGDGGEAAAKGSSGGGGGTLQLDDEYRLYSPLVKPDQNIQFWLEQFPQAWAETAGMGLAKQVPPQVIQLKASATPVSVRQYPLSKEAQEGIRPHVQRLIQQGILVPVQSPWNTPLLPVRKPGTNDYRPVQDLREVNKRVQDIHPTVPNPYNLLCALPPQRSWYTVLDLKDAFFCLRLHPTSQPLFAFEWRDPGTGRTGQLTWTRLPQGFKNSPTIFDEALHRDLANFRIQHPQVTLLQYVDDLLLAGATKQDCLEGTKALLLELSDLGYRASAKKAQICRREVTYLGYSLRDGQRWLTEARKKTVVQIPAPTTAKQVREFLGTAGFCRLWIPGFATLAAPLYPLTKEKGEFSWAPEHQKAFDAIKKALLSAPALALPDVTKPFTLYVDERKGVARGVLTQTLGPWRRPVAYLSKKLDPVASGWPVCLKAIAAVAILVKDADKLTLGQNITVIAPHALENIVRQPPDRWMTNARMTHYQSLLLTERVTFAPPAALNPATLLPEETDEPVTHDCHQLLIEETGVRKDLTDIPLTGEVLTWFTDGSSYVVEGKRMAGAAVVDGTRTIWASSLPEGTSAQKAELMALTQALRLAEGKSINIYTDSRYAFATAHVHGAIYKQRGLLTSAGREIKNKEEILSLLEALHLPKRLAIIHCPGHQKAKDPISRGNQMADRVAKQAAQGVNLLAGKRTADGSEFEKRTADGSEFESPKKKAKVE

SEQ ID NO: 297 - protein, 2087 aa, synthetic construct
MPAAKRVKLDGGDKKYSIGLDIGTNSVGWAVITDEYKVPSKKFKVLGNTDRHSIKKNLIGALLFDSGETAEATRLKRTARRRYTRRKNRICYLQEIFSNEMAKVDDSFFHRLEESFLVEEDKKHERHPIFGNIVDEVAYHEKYPTIYHLRKKLVDSTDKADLRLIYLALAHMIKFRGHFLIEGDLNPDNSDVDKLFIQLVQTYNQLFEENPINASGVDAKAILSARLSKSRRLENLIAQLPGEKKNGLFGNLIALSLGLTPNFKSNFDLAEDAKLQLSKDTYDDDLDNLLAQIGDQYADLFLAAKNLSDAILLSDILRVNTEITKAPLSASMIKRYDEHHQDLTLLKALVRQQLPEKYKEIFFDQSKNGYAGYIDGGASQEEFYKFIKPILEKMDGTEELLVKLNREDLLRKQRTFDNGSIPHQIHLGELHAILRRQEDFYPFLKDNREKIEKILTFRIPYYVGPLARGNSRFAWMTRKSEETITPWNFEEVVDKGASAQSFIERMTNFDKNLPNEKVLPKHSLLYEYFTVYNELTKVKYVTEGMRKPAFLSGEQKKAIVDLLFKTNRKVTVKQLKEDYFKKIECFDSVEISGVEDRFNASLGTYHDLLKIIKDKDFLDNEENEDILEDIVLTLTLFEDREMIEERLKTYAHLFDDKVMKQLKRRRYTGWGRLSRKLINGIRDKQSGKTILDFLKSDGFANRNFMQLIHDDSLTFKEDIQKAQVSGQGDSLHEHIANLAGSPAIKKGILQTVKVVDELVKVMGRHKPENIVIEMARENQTTQKGQKNSRERMKRIEEGIKELGSQILKEHPVENTQLQNEKLYLYYLQNGRDMYVDQELDINRLSDYDVDHIVPQSFLKDDSIDNKVLTRSDKARGKSDNVPSEEVVKKMKNYWRQLLNAKLITQRKFDNLTKAERGGLSELDKAGFIKRQLVETRQITKHVAQILDSRMNTKYDENDKLIREVKVITLKSKLVSDFRKDFQFYKVREINNYHHAHDAYLNAVVGTALIKKYPKLESEFVYGDYKVYDVRKMIAKSEQEIGKATAKYFFYSNIMNFFKTEITLANGEIRKRPLIETNGETGEIVWDKGRDFATVRKVLSMPQVNIVKKTEVQTGGFSKESILPKRNSDKLIARKKDWDPKKYGGFDSPTVAYSVLVVAKVEKGKSKKLKSVKELLGITIMERSSFEKNPIDFLEAKGYKEVKKDLIIKLPKYSLFELENGRKRMLASAGELQKGNELALPSKYVNFLYLASHYEKLKGSPEDNEQKQLFVEQHKHYLDEIIEQISEFSKRVILADANLDKVLSAYNKHRDKPIREQAENIIHLFTLTNLGAPAAFKYFDTTIDRKRYTSTKEVLDATLIHQSITGLYETRIDLSQLGGDGGEAAAKPAPGGTLQLDDEYRLYSPLVKPDQNIQFWLEQFPQAWAETAGMGLAKQVPPQVIQLKASATPVSVRQYPLSKEAQEGIRPHVQRLIQQGILVPVQSPWNTPLLPVRKPGTNDYRPVQDLREVNKRVQDIHPTVPNPYNLLCALPPQRSWYTVLDLKDAFFCLRLHPTSQPLFAFEWRDPGTGRTGQLTWTRLPQGFKNSPTIFDEALHRDLANFRIQHPQVTLLQYVDDLLLAGATKQDCLEGTKALLLELSDLGYRASAKKAQICRREVTYLGYSLRDGQRWLTEARKKTVVQIPAPTTAKQVREFLGTAGFCRLWIPGFATLAAPLYPLTKEKGEFSWAPEHQKAFDAIKKALLSAPALALPDVTKPFTLYVDERKGVARGVLTQTLGPWRRPVAYLSKKLDPVASGWPVCLKAIAAVAILVKDADKLTLGQNITVIAPHALENIVRQPPDRWMTNARMTHYQSLLLTERVTFAPPAALNPATLLPEETDEPVTHDCHQLLIEETGVRKDLTDIPLTGEVLTWFTDGSSYVVEGKRMAGAAVVDGTRTIWASSLPEGTSAQKAELMALTQALRLAEGKSINIYTDSRYAFATAHVHGAIYKQRGLLTSAGREIKNKEEILSLLEALHLPKRLAIIHCPGHQKAKDPISRGNQMADRVAKQAAQGVNLLAGKRTADGSEFEKRTADGSEFESPKKKAKVE

SEQ ID NO: 298 - protein, 2094 aa, synthetic construct
MPAAKRVKLDGGDKKYSIGLDIGTNSVGWAVITDEYKVPSKKFKVLGNTDRHSIKKNLIGALLFDSGETAEATRLKRTARRRYTRRKNRICYLQEIFSNEMAKVDDSFFHRLEESFLVEEDKKHERHPIFGNIVDEVAYHEKYPTIYHLRKKLVDSTDKADLRLIYLALAHMIKFRGHFLIEGDLNPDNSDVDKLFIQLVQTYNQLFEENPINASGVDAKAILSARLSKSRRLENLIAQLPGEKKNGLFGNLIALSLGLTPNFKSNFDLAEDAKLQLSKDTYDDDLDNLLAQIGDQYADLFLAAKNLSDAILLSDILRVNTEITKAPLSASMIKRYDEHHQDLTLLKALVRQQLPEKYKEIFFDQSKNGYAGYIDGGASQEEFYKFIKPILEKMDGTEELLVKLNREDLLRKQRTFDNGSIPHQIHLGELHAILRRQEDFYPFLKDNREKIEKILTFRIPYYVGPLARGNSRFAWMTRKSEETITPWNFEEVVDKGASAQSFIERMTNFDKNLPNEKVLPKHSLLYEYFTVYNELTKVKYVTEGMRKPAFLSGEQKKAIVDLLFKTNRKVTVKQLKEDYFKKIECFDSVEISGVEDRFNASLGTYHDLLKIIKDKDFLDNEENEDILEDIVLTLTLFEDREMIEERLKTYAHLFDDKVMKQLKRRRYTGWGRLSRKLINGIRDKQSGKTILDFLKSDGFANRNFMQLIHDDSLTFKEDIQKAQVSGQGDSLHEHIANLAGSPAIKKGILQTVKVVDELVKVMGRHKPENIVIEMARENQTTQKGQKNSRERMKRIEEGIKELGSQILKEHPVENTQLQNEKLYLYYLQNGRDMYVDQELDINRLSDYDVDHIVPQSFLKDDSIDNKVLTRSDKARGKSDNVPSEEVVKKMKNYWRQLLNAKLITQRKFDNLTKAERGGLSELDKAGFIKRQLVETRQITKHVAQILDSRMNTKYDENDKLIREVKVITLKSKLVSDFRKDFQFYKVREINNYHHAHDAYLNAVVGTALIKKYPKLESEFVYGDYKVYDVRKMIAKSEQEIGKATAKYFFYSNIMNFFKTEITLANGEIRKRPLIETNGETGEIVWDKGRDFATVRKVLSMPQVNIVKKTEVQTGGFSKESILPKRNSDKLIARKKDWDPKKYGGFDSPTVAYSVLVVAKVEKGKSKKLKSVKELLGITIMERSSFEKNPIDFLEAKGYKEVKKDLIIKLPKYSLFELENGRKRMLASAGELQKGNELALPSKYVNFLYLASHYEKLKGSPEDNEQKQLFVEQHKHYLDEIIEQISEFSKRVILADANLDKVLSAYNKHRDKPIREQAENIIHLFTLTNLGAPAAFKYFDTTIDRKRYTSTKEVLDATLIHQSITGLYETRIDLSQLGGDGGEAAAKEAAAKEAAAKGGTLQLDDEYRLYSPLVKPDQNIQFWLEQFPQAWAETAGMGLAKQVPPQVIQLKASATPVSVRQYPLSKEAQEGIRPHVQRLIQQGILVPVQSPWNTPLLPVRKPGTNDYRPVQDLREVNKRVQDIHPTVPNPYNLLCALPPQRSWYTVLDLKDAFFCLRLHPTSQPLFAFEWRDPGTGRTGQLTWTRLPQGFKNSPTIFNEALHRDLANFRIQHPQVTLLQYVDDLLLAGATKQDCLEGTKALLLELSDLGYRASAKKAQICRREVTYLGYSLRDGQRWLTEARKKTVVQIPAPTTAKQVREFLGTAGFCRLWIPGFATLAAPLYPLTKPKGEFSWAPEHQKAFDAIKKALLSAPALALPDVTKPFTLYVDERKGVARGVLTQTLGPWRRPVAYLSKKLDPVASGWPVCLKAIAAVAILVKDADKLTLGQNITVIAPHALENIVRQPPDRWMTNARMTHYQSLLLTERVTFAPPAALNPATLLPEETDEPVTHDCHQLLIEETGVRKDLTDIPLTGEVLTWFTDGSSYVVEGKRMAGAAVVDGTRTIWASSLPEGTSAQKAELMALTQALRLAEGKSINIYTDSRYAFATAHVHGAIYKQRGWLTSAGREIKNKEEILSLLEALHLPKRLAIIHCPGHQKAKDPISRGNQMADRVAKQAAQGVNLLAGKRTADGSEFEKRTADGSEFESPKKKAKVE

SEQ ID NO: 299 - protein, 2090 aa, synthetic construct
MPAAKRVKLDGGDKKYSIGLDIGTNSVGWAVITDEYKVPSKKFKVLGNTDRHSIKKNLIGALLFDSGETAEATRLKRTARRRYTRRKNRICYLQEIFSNEMAKVDDSFFHRLEESFLVEEDKKHERHPIFGNIVDEVAYHEKYPTIYHLRKKLVDSTDKADLRLIYLALAHMIKFRGHFLIEGDLNPDNSDVDKLFIQLVQTYNQLFEENPINASGVDAKAILSARLSKSRRLENLIAQLPGEKKNGLFGNLIALSLGLTPNFKSNFDLAEDAKLQLSKDTYDDDLDNLLAQIGDQYADLFLAAKNLSDAILLSDILRVNTEITKAPLSASMIKRYDEHHQDLTLLKALVRQQLPEKYKEIFFDQSKNGYAGYIDGGASQEEFYKFIKPILEKMDGTEELLVKLNREDLLRKQRTFDNGSIPHQIHLGELHAILRRQEDFYPFLKDNREKIEKILTFRIPYYVGPLARGNSRFAWMTRKSEETITPWNFEEVVDKGASAQSFIERMTNFDKNLPNEKVLPKHSLLYEYFTVYNELTKVKYVTEGMRKPAFLSGEQKKAIVDLLFKTNRKVTVKQLKEDYFKKIECFDSVEISGVEDRFNASLGTYHDLLKIIKDKDFLDNEENEDILEDIVLTLTLFEDREMIEERLKTYAHLFDDKVMKQLKRRRYTGWGRLSRKLINGIRDKQSGKTILDFLKSDGFANRNFMQLIHDDSLTFKEDIQKAQVSGQGDSLHEHIANLAGSPAIKKGILQTVKVVDELVKVMGRHKPENIVIEMARENQTTQKGQKNSRERMKRIEEGIKELGSQILKEHPVENTQLQNEKLYLYYLQNGRDMYVDQELDINRLSDYDVDHIVPQSFLKDDSIDNKVLTRSDKARGKSDNVPSEEVVKKMKNYWRQLLNAKLITQRKFDNLTKAERGGLSELDKAGFIKRQLVETRQITKHVAQILDSRMNTKYDENDKLIREVKVITLKSKLVSDFRKDFQFYKVREINNYHHAHDAYLNAVVGTALIKKYPKLESEFVYGDYKVYDVRKMIAKSEQEIGKATAKYFFYSNIMNFFKTEITLANGEIRKRPLIETNGETGEIVWDKGRDFATVRKVLSMPQVNIVKKTEVQTGGFSKESILPKRNSDKLIARKKDWDPKKYGGFDSPTVAYSVLVVAKVEKGKSKKLKSVKELLGITIMERSSFEKNPIDFLEAKGYKEVKKDLIIKLPKYSLFELENGRKRMLASAGELQKGNELALPSKYVNFLYLASHYEKLKGSPEDNEQKQLFVEQHKHYLDEIIEQISEFSKRVILADANLDKVLSAYNKHRDKPIREQAENIIHLFTLTNLGAPAAFKYFDTTIDRKRYTSTKEVLDATLIHQSITGLYETRIDLSQLGGDGGEAAAKGGSGGGGGTLQLDDEYRLYSPLVKPDQNIQFWLEQFPQAWAETAGMGLAKQVPPQVIQLKASATPVSVRQYPLSKEAQEGIRPHVQRLIQQGILVPVQSPWNTPLLPVRKPGTNDYRPVQDLREVNKRVQDIHPTVPNPYNLLCALPPQRSWYTVLDLKDAFFCLRLHPTSQPLFAFEWRDPGTGRTGQLTWTRLPQGFKNSPTIFNEALHRDLANFRIQHPQVTLLQYVDDLLLAGATKQDCLEGTKALLLELSDLGYRASAKKAQICRREVTYLGYSLRDGQRWLTEARKKTVVQIPAPTTAKQVREFLGTAGFCRLWIPGFATLAAPLYPLTKPKGEFSWAPEHQKAFDAIKKALLSAPALALPDVTKPFTLYVDERKGVARGVLTQTLGPWRRPVAYLSKKLDPVASGWPVCLKAIAAVAILVKDADKLTLGQNITVIAPHALENIVRQPPDRWMTNARMTHYQSLLLTERVTFAPPAALNPATLLPEETDEPVTHDCHQLLIEETGVRKDLTDIPLTGEVLTWFTDGSSYVVEGKRMAGAAVVDGTRTIWASSLPEGTSAQKAELMALTQALRLAEGKSINIYTDSRYAFATAHVHGAIYKQRGWLTSAGREIKNKEEILSLLEALHLPKRLAIIHCPGHQKAKDPISRGNQMADRVAKQAAQGVNLLAGKRTADGSEFEKRTADGSEFESPKKKAKVE

SEQ ID NO: 300 - protein, 2125 aa, synthetic construct; identical to SEQ ID NO: 156

SEQ ID NO: 301 - protein, 2090 aa, synthetic construct
MPAAKRVKLDGGDKKYSIGLDIGTNSVGWAVITDEYKVPSKKFKVLGNTDRHSIKKNLIGALLFDSGETAEATRLKRTARRRYTRRKNRICYLQEIFSNEMAKVDDSFFHRLEESFLVEEDKKHERHPIFGNIVDEVAYHEKYPTIYHLRKKLVDSTDKADLRLIYLALAHMIKFRGHFLIEGDLNPDNSDVDKLFIQLVQTYNQLFEENPINASGVDAKAILSARLSKSRRLENLIAQLPGEKKNGLFGNLIALSLGLTPNFKSNFDLAEDAKLQLSKDTYDDDLDNLLAQIGDQYADLFLAAKNLSDAILLSDILRVNTEITKAPLSASMIKRYDEHHQDLTLLKALVRQQLPEKYKEIFFDQSKNGYAGYIDGGASQEEFYKFIKPILEKMDGTEELLVKLNREDLLRKQRTFDNGSIPHQIHLGELHAILRRQEDFYPFLKDNREKIEKILTFRIPYYVGPLARGNSRFAWMTRKSEETITPWNFEEVVDKGASAQSFIERMTNFDKNLPNEKVLPKHSLLYEYFTVYNELTKVKYVTEGMRKPAFLSGEQKKAIVDLLFKTNRKVTVKQLKEDYFKKIECFDSVEISGVEDRFNASLGTYHDLLKIIKDKDFLDNEENEDILEDIVLTLTLFEDREMIEERLKTYAHLFDDKVMKQLKRRRYTGWGRLSRKLINGIRDKQSGKTILDFLKSDGFANRNFMQLIHDDSLTFKEDIQKAQVSGQGDSLHEHIANLAGSPAIKKGILQTVKVVDELVKVMGRHKPENIVIEMARENQTTQKGQKNSRERMKRIEEGIKELGSQILKEHPVENTQLQNEKLYLYYLQNGRDMYVDQELDINRLSDYDVDHIVPQSFLKDDSIDNKVLTRSDKARGKSDNVPSEEVVKKMKNYWRQLLNAKLITQRKFDNLTKAERGGLSELDKAGFIKRQLVETRQITKHVAQILDSRMNTKYDENDKLIREVKVITLKSKLVSDFRKDFQFYKVREINNYHHAHDAYLNAVVGTALIKKYPKLESEFVYGDYKVYDVRKMIAKSEQEIGKATAKYFFYSNIMNFFKTEITLANGEIRKRPLIETNGETGEIVWDKGRDFATVRKVLSMPQVNIVKKTEVQTGGFSKESILPKRNSDKLIARKKDWDPKKYGGFDSPTVAYSVLVVAKVEKGKSKKLKSVKELLGITIMERSSFEKNPIDFLEAKGYKEVKKDLIIKLPKYSLFELENGRKRMLASAGELQKGNELALPSKYVNFLYLASHYEKLKGSPEDNEQKQLFVEQHKHYLDEIIEQISEFSKRVILADANLDKVLSAYNKHRDKPIREQAENIIHLFTLTNLGAPAAFKYFDTTIDRKRYTSTKEVLDATLIHQSITGLYETRIDLSQLGGDGGGGGEAAAKGSSGGTLQLDDEYRLYSPLVKPDQNIQFWLEQFPQAWAETAGMGLAKQVPPQVIQLKASATPVSVRQYPLSKEAQEGIRPHVQRLIQQGILVPVQSPWNTPLLPVRKPGTNDYRPVQDLREVNKRVQDIHPTVPNPYNLLCALPPQRSWYTVLDLKDAFFCLRLHPTSQPLFAFEWRDPGTGRTGQLTWTRLPQGFKNSPTIFNEALHRDLANFRIQHPQVTLLQYVDDLLLAGATKQDCLEGTKALLLELSDLGYRASAKKAQICRREVTYLGYSLRDGQRWLTEARKKTVVQIPAPTTAKQVREFLGTAGFCRLWIPGFATLAAPLYPLTKPKGEFSWAPEHQKAFDAIKKALLSAPALALPDVTKPFTLYVDERKGVARGVLTQTLGPWRRPVAYLSKKLDPVASGWPVCLKAIAAVAILVKDADKLTLGQNITVIAPHALENIVRQPPDRWMTNARMTHYQSLLLTERVTFAPPAALNPATLLPEETDEPVTHDCHQLLIEETGVRKDLTDIPLTGEVLTWFTDGSSYVVEGKRMAGAAVVDGTRTIWASSLPEGTSAQKAELMALTQALRLAEGKSINIYTDSRYAFATAHVHGAIYKQRGWLTSAGREIKNKEEILSLLEALHLPKRLAIIHCPGHQKAKDPISRGNQMADRVAKQAAQGVNLLAGKRTADGSEFEKRTADGSEFESPKKKAKVE

SEQ ID NO: 302 - protein, 2090 aa, synthetic construct; identical to SEQ ID NO: 164

SEQ ID NO: 303 - protein, 2112 aa, synthetic construct; identical to SEQ ID NO: 140

SEQ ID NO: 304 - protein, 2090 aa, synthetic construct
MPAAKRVKLDGGDKKYSIGLDIGTNSVGWAVITDEYKVPSKKFKVLGNTDRHSIKKNLIGALLFDSGETAEATRLKRTARRRYTRRKNRICYLQEIFSNEMAKVDDSFFHRLEESFLVEEDKKHERHPIFGNIVDEVAYHEKYPTIYHLRKKLVDSTDKADLRLIYLALAHMIKFRGHFLIEGDLNPDNSDVDKLFIQLVQTYNQLFEENPINASGVDAKAILSARLSKSRRLENLIAQLPGEKKNGLFGNLIALSLGLTPNFKSNFDLAEDAKLQLSKDTYDDDLDNLLAQIGDQYADLFLAAKNLSDAILLSDILRVNTEITKAPLSASMIKRYDEHHQDLTLLKALVRQQLPEKYKEIFFDQSKNGYAGYIDGGASQEEFYKFIKPILEKMDGTEELLVKLNREDLLRKQRTFDNGSIPHQIHLGELHAILRRQEDFYPFLKDNREKIEKILTFRIPYYVGPLARGNSRFAWMTRKSEETITPWNFEEVVDKGASAQSFIERMTNFDKNLPNEKVLPKHSLLYEYFTVYNELTKVKYVTEGMRKPAFLSGEQKKAIVDLLFKTNRKVTVKQLKEDYFKKIECFDSVEISGVEDRFNASLGTYHDLLKIIKDKDFLDNEENEDILEDIVLTLTLFEDREMIEERLKTYAHLFDDKVMKQLKRRRYTGWGRLSRKLINGIRDKQSGKTILDFLKSDGFANRNFMQLIHDDSLTFKEDIQKAQVSGQGDSLHEHIANLAGSPAIKKGILQTVKVVDELVKVMGRHKPENIVIEMARENQTTQKGQKNSRERMKRIEEGIKELGSQILKEHPVENTQLQNEKLYLYYLQNGRDMYVDQELDINRLSDYDVDHIVPQSFLKDDSIDNKVLTRSDKARGKSDNVPSEEVVKKMKNYWRQLLNAKLITQRKFDNLTKAERGGLSELDKAGFIKRQLVETRQITKHVAQILDSRMNTKYDENDKLIREVKVITLKSKLVSDFRKDFQFYKVREINNYHHAHDAYLNAVVGTALIKKYPKLESEFVYGDYKVYDVRKMIAKSEQEIGKATAKYFFYSNIMNFFKTEITLANGEIRKRPLIETNGETGEIVWDKGRDFATVRKVLSMPQVNIVKKTEVQTGGFSKESILPKRNSDKLIARKKDWDPKKYGGFDSPTVAYSVLVVAKVEKGKSKKLKSVKELLGITIMERSSFEKNPIDFLEAKGYKEVKKDLIIKLPKYSLFELENGRKRMLASAGELQKGNELALPSKYVNFLYLASHYEKLKGSPEDNEQKQLFVEQHKHYLDEIIEQISEFSKRVILADANLDKVLSAYNKHRDKPIREQAENIIHLFTLTNLGAPAAFKYFDTTIDRKRYTSTKEVLDATLIHQSITGLYETRIDLSQLGGDGGEAAAKPAPGSSGGTLQLDDEYRLYSPLVKPDQNIQFWLEQFPQAWAETAGMGLAKQVPPQVIQLKASATPVSVRQYPLSKEAQEGIRPHVQRLIQQGILVPVQSPWNTPLLPVRKPGTNDYRPVQDLREVNKRVQDIHPTVPNPYNLLCALPPQRSWYTVLDLKDAFFCLRLHPTSQPLFAFEWRDPGTGRTGQLTWTRLPQGFKNSPTIFNEALHRDLANFRIQHPQVTLLQYVDDLLLAGATKQDCLEGTKALLLELSDLGYRASAKKAQICRREVTYLGYSLRDGQRWLTEARKKTVVQIPAPTTAKQVREFLGTAGFCRLWIPGFATLAAPLYPLTKPKGEFSWAPEHQKAFDAIKKALLSAPALALPDVTKPFTLYVDERKGVARGVLTQTLGPWRRPVAYLSKKLDPVASGWPVCLKAIAAVAILVKDADKLTLGQNITVIAPHALENIVRQPPDRWMTNARMTHYQSLLLTERVTFAPPAALNPATLLPEETDEPVTHDCHQLLIEETGVRKDLTDIPLTGEVLTWFTDGSSYVVEGKRMAGAAVVDGTRTIWASSLPEGTSAQKAELMALTQALRLAEGKSINIYTDSRYAFATAHVHGAIYKQRGWLTSAGREIKNKEEILSLLEALHLPKRLAIIHCPGHQKAKDPISRGNQMADRVAKQAAQGVNLLAGKRTADGSEFEKRTADGSEFESPKKKAKVE

SEQ ID NO: 305 - protein, 2090 aa, synthetic construct; identical to SEQ ID NO: 127

SEQ ID NO: 306 - protein, 2087 aa, synthetic construct; identical to SEQ ID NO: 126

SEQ ID NO: 307 - protein, 2088 aa, synthetic construct
MPAAKRVKLDGGDKKYSIGLDIGTNSVGWAVITDEYKVPSKKFKVLGNTDRHSIKKNLIGALLFDSGETAEATRLKRTARRRYTRRKNRICYLQEIFSNEMAKVDDSFFHRLEESFLVEEDKKHERHPIFGNIVDEVAYHEKYPTIYHLRKKLVDSTDKADLRLIYLALAHMIKFRGHFLIEGDLNPDNSDVDKLFIQLVQTYNQLFEENPINASGVDAKAILSARLSKSRRLENLIAQLPGEKKNGLFGNLIALSLGLTPNFKSNFDLAEDAKLQLSKDTYDDDLDNLLAQIGDQYADLFLAAKNLSDAILLSDILRVNTEITKAPLSASMIKRYDEHHQDLTLLKALVRQQLPEKYKEIFFDQSKNGYAGYIDGGASQEEFYKFIKPILEKMDGTEELLVKLNREDLLRKQRTFDNGSIPHQIHLGELHAILRRQEDFYPFLKDNREKIEKILTFRIPYYVGPLARGNSRFAWMTRKSEETITPWNFEEVVDKGASAQSFIERMTNFDKNLPNEKVLPKHSLLYEYFTVYNELTKVKYVTEGMRKPAFLSGEQKKAIVDLLFKTNRKVTVKQLKEDYFKKIECFDSVEISGVEDRFNASLGTYHDLLKIIKDKDFLDNEENEDILEDIVLTLTLFEDREMIEERLKTYAHLFDDKVMKQLKRRRYTGWGRLSRKLINGIRDKQSGKTILDFLKSDGFANRNFMQLIHDDSLTFKEDIQKAQVSGQGDSLHEHIANLAGSPAIKKGILQTVKVVDELVKVMGRHKPENIVIEMARENQTTQKGQKNSRERMKRIEEGIKELGSQILKEHPVENTQLQNEKLYLYYLQNGRDMYVDQELDINRLSDYDVDHIVPQSFLKDDSIDNKVLTRSDKARGKSDNVPSEEVVKKMKNYWRQLLNAKLITQRKFDNLTKAERGGLSELDKAGFIKRQLVETRQITKHVAQILDSRMNTKYDENDKLIREVKVITLKSKLVSDFRKDFQFYKVREINNYHHAHDAYLNAVVGTALIKKYPKLESEFVYGDYKVYDVRKMIAKSEQEIGKATAKYFFYSNIMNFFKTEITLANGEIRKRPLIETNGETGEIVWDKGRDFATVRKVLSMPQVNIVKKTEVQTGGFSKESILPKRNSDKLIARKKDWDPKKYGGFDSPTVAYSVLVVAKVEKGKSKKLKSVKELLGITIMERSSFEKNPIDFLEAKGYKEVKKDLIIKLPKYSLFELENGRKRMLASAGELQKGNELALPSKYVNFLYLASHYEKLKGSPEDNEQKQLFVEQHKHYLDEIIEQISEFSKRVILADANLDKVLSAYNKHRDKPIREQAENIIHLFTLTNLGAPAAFKYFDTTIDRKRYTSTKEVLDATLIHQSITGLYETRIDLSQLGGDGGGGGGSSPAPGGTLQLDDEYRLYSPLVKPDQNIQFWLEQFPQAWAETAGMGLAKQVPPQVIQLKASATPVSVRQYPLSKEAQEGIRPHVQRLIQQGILVPVQSPWNTPLLPVRKPGTNDYRPVQDLREVNKRVQDIHPTVPNPYNLLCALPPQRSWYTVLDLKDAFFCLRLHPTSQPLFAFEWRDPGTGRTGQLTWTRLPQGFKNSPTIFNEALHRDLANFRIQHPQVTLLQYVDDLLLAGATKQDCLEGTKALLLELSDLGYRASAKKAQICRREVTYLGYSLRDGQRWLTEARKKTVVQIPAPTTAKQVREFLGTAGFCRLWIPGFATLAAPLYPLTKPKGEFSWAPEHQKAFDAIKKALLSAPALALPDVTKPFTLYVDERKGVARGVLTQTLGPWRRPVAYLSKKLDPVASGWPVCLKAIAAVAILVKDADKLTLGQNITVIAPHALENIVRQPPDRWMTNARMTHYQSLLLTERVTFAPPAALNPATLLPEETDEPVTHDCHQLLIEETGVRKDLTDIPLTGEVLTWFTDGSSYVVEGKRMAGAAVVDGTRTIWASSLPEGTSAQKAELMALTQALRLAEGKSINIYTDSRYAFATAHVHGAIYKQRGWLTSAGREIKNKEEILSLLEALHLPKRLAIIHCPGHQKAKDPISRGNQMADRVAKQAAQGVNLLAGKRTADGSEFEKRTADGSEFESPKKKAKVE

SEQ ID NO: 308 - protein, 2084 aa, synthetic construct; identical to SEQ ID NO: 151

SEQ ID NO: 309 - protein, 2092 aa, synthetic construct; identical to SEQ ID NO: 157

SEQ ID NO: 310 - protein, 2090 aa, synthetic construct
MPAAKRVKLDGGDKKYSIGLDIGTNSVGWAVITDEYKVPSKKFKVLGNTDRHSIKKNLIGALLFDSGETAEATRLKRTARRRYTRRKNRICYLQEIFSNEMAKVDDSFFHRLEESFLVEEDKKHERHPIFGNIVDEVAYHEKYPTIYHLRKKLVDSTDKADLRLIYLALAHMIKFRGHFLIEGDLNPDNSDVDKLFIQLVQTYNQLFEENPINASGVDAKAILSARLSKSRRLENLIAQLPGEKKNGLFGNLIALSLGLTPNFKSNFDLAEDAKLQLSKDTYDDDLDNLLAQIGDQYADLFLAAKNLSDAILLSDILRVNTEITKAPLSASMIKRYDEHHQDLTLLKALVRQQLPEKYKEIFFDQSKNGYAGYIDGGASQEEFYKFIKPILEKMDGTEELLVKLNREDLLRKQRTFDNGSIPHQIHLGELHAILRRQEDFYPFLKDNREKIEKILTFRIPYYVGPLARGNSRFAWMTRKSEETITPWNFEEVVDKGASAQSFIERMTNFDKNLPNEKVLPKHSLLYEYFTVYNELTKVKYVTEGMRKPAFLSGEQKKAIVDLLFKTNRKVTVKQLKEDYFKKIECFDSVEISGVEDRFNASLGTYHDLLKIIKDKDFLDNEENEDILEDIVLTLTLFEDREMIEERLKTYAHLFDDKVMKQLKRRRYTGWGRLSRKLINGIRDKQSGKTILDFLKSDGFANRNFMQLIHDDSLTFKEDIQKAQVSGQGDSLHEHIANLAGSPAIKKGILQTVKVVDELVKVMGRHKPENIVIEMARENQTTQKGQKNSRERMKRIEEGIKELGSQILKEHPVENTQLQNEKLYLYYLQNGRDMYVDQELDINRLSDYDVDHIVPQSFLKDDSIDNKVLTRSDKARGKSDNVPSEEVVKKMKNYWRQLLNAKLITQRKFDNLTKAERGGLSELDKAGFIKRQLVETRQITKHVAQILDSRMNTKYDENDKLIREVKVITLKSKLVSDFRKDFQFYKVREINNYHHAHDAYLNAVVGTALIKKYPKLESEFVYGDYKVYDVRKMIAKSEQEIGKATAKYFFYSNIMNFFKTEITLANGEIRKRPLIETNGETGEIVWDKGRDFATVRKVLSMPQVNIVKKTEVQTGGFSKESILPKRNSDKLIARKKDWDPKKYGGFDSPTVAYSVLVVAKVEKGKSKKLKSVKELLGITIMERSSFEKNPIDFLEAKGYKEVKKDLIIKLPKYSLFELENGRKRMLASAGELQKGNELALPSKYVNFLYLASHYEKLKGSPEDNEQKQLFVEQHKHYLDEIIEQISEFSKRVILADANLDKVLSAYNKHRDKPIREQAENIIHLFTLTNLGAPAAFKYFDTTIDRKRYTSTKEVLDATLIHQSITGLYETRIDLSQLGGDGGGSSPAPEAAAKGGTLQLDDEYRLYSPLVKPDQNIQFWLEQFPQAWAETAGMGLAKQVPPQVIQLKASATPVSVRQYPLSKEAQEGIRPHVQRLIQQGILVPVQSPWNTPLLPVRKPGTNDYRPVQDLREVNKRVQDIHPTVPNPYNLLCALPPQRSWYTVLDLKDAFFCLRLHPTSQPLFAFEWRDPGTGRTGQLTWTRLPQGFKNSPTIFNEALHRDLANFRIQHPQVTLLQYVDDLLLAGATKQDCLEGTKALLLELSDLGYRASAKKAQICRREVTYLGYSLRDGQRWLTEARKKTVVQIPAPTTAKQVREFLGTAGFCRLWIPGFATLAAPLYPLTKPKGEFSWAPEHQKAFDAIKKALLSAPALALPDVTKPFTLYVDERKGVARGVLTQTLGPWRRPVAYLSKKLDPVASGWPVCLKAIAAVAILVKDADKLTLGQNITVIAPHALENIVRQPPDRWMTNARMTHYQSLLLTERVTFAPPAALNPATLLPEETDEPVTHDCHQLLIEETGVRKDLTDIPLTGEVLTWFTDGSSYVVEGKRMAGAAVVDGTRTIWASSLPEGTSAQKAELMALTQALRLAEGKSINIYTDSRYAFATAHVHGAIYKQRGWLTSAGREIKNKEEILSLLEALHLPKRLAIIHCPGHQKAKDPISRGNQMADRVAKQAAQGVNLLAGKRTADGSEFEKRTADGSEFESPKKKAKVE

SEQ ID NO: 311 - protein, 2090 aa, synthetic construct
MPAAKRVKLDGGDKKYSIGLDIGTNSVGWAVITDEYKVPSKKFKVLGNTDRHSIKKNLIGALLFDSGETAEATRLKRTARRRYTRRKNRICYLQEIFSNEMAKVDDSFFHRLEESFLVEEDKKHERHPIFGNIVDEVAYHEKYPTIYHLRKKLVDSTDKADLRLIYLALAHMIKFRGHFLIEGDLNPDNSDVDKLFIQLVQTYNQLFEENPINASGVDAKAILSARLSKSRRLENLIAQLPGEKKNGLFGNLIALSLGLTPNFKSNFDLAEDAKLQLSKDTYDDDLDNLLAQIGDQYADLFLAAKNLSDAILLSDILRVNTEITKAPLSASMIKRYDEHHQDLTLLKALVRQQLPEKYKEIFFDQSKNGYAGYIDGGASQEEFYKFIKPILEKMDGTEELLVKLNREDLLRKQRTFDNGSIPHQIHLGELHAILRRQEDFYPFLKDNREKIEKILTFRIPYYVGPLARGNSRFAWMTRKSEETITPWNFEEVVDKGASAQSFIERMTNFDKNLPNEKVLPKHSLLYEYFTVYNELTKVKYVTEGMRKPAFLSGEQKKAIVDLLFKTNRKVTVKQLKEDYFKKIECFDSVEISGVEDRFNASLGTYHDLLKIIKDKDFLDNEENEDILEDIVLTLTLFEDREMIEERLKTYAHLFDDKVMKQLKRRRYTGWGRLSRKLINGIRDKQSGKTILDFLKSDGFANRNFMQLIHDDSLTFKEDIQKAQVSGQGDSLHEHIANLAGSPAIKKGILQTVKVVDELVKVMGRHKPENIVIEMARENQTTQKGQKNSRERMKRIEEGIKELGSQILKEHPVENTQLQNEKLYLYYLQNGRDMYVDQELDINRLSDYDVDHIVPQSFLKDDSIDNKVLTRSDKARGKSDNVPSEEVVKKMKNYWRQLLNAKLITQRKFDNLTKAERGGLSELDKAGFIKRQLVETRQITKHVAQILDSRMNTKYDENDKLIREVKVITLKSKLVSDFRKDFQFYKVREINNYHHAHDAYLNAVVGTALIKKYPKLESEFVYGDYKVYDVRKMIAKSEQEIGKATAKYFFYSNIMNFFKTEITLANGEIRKRPLIETNGETGEIVWDKGRDFATVRKVLSMPQVNIVKKTEVQTGGFSKESILPKRNSDKLIARKKDWDPKKYGGFDSPTVAYSVLVVAKVEKGKSKKLKSVKELLGITIMERSSFEKNPIDFLEAKGYKEVKKDLIIKLPKYSLFELENGRKRMLASAGELQKGNELALPSKYVNFLYLASHYEKLKGSPEDNEQKQLFVEQHKHYLDEIIEQISEFSKRVILADANLDKVLSAYNKHRDKPIREQAENIIHLFTLTNLGAPAAFKYFDTTIDRKRYTSTKEVLDATLIHQSITGLYETRIDLSQLGGDGGGGGGGSEAAAKGGTLQLDDEYRLYSPLVKPDQNIQFWLEQFPQAWAETAGMGLAKQVPPQVIQLKASATPVSVRQYPLSKEAQEGIRPHVQRLIQQGILVPVQSPWNTPLLPVRKPGTNDYRPVQDLREVNKRVQDIHPTVPNPYNLLCALPPQRSWYTVLDLKDAFFCLRLHPTSQPLFAFEWRDPGTGRTGQLTWTRLPQGFKNSPTIFNEALHRDLANFRIQHPQVTLLQYVDDLLLAGATKQDCLEGTKALLLELSDLGYRASAKKAQICRREVTYLGYSLRDGQRWLTEARKKTVVQIPAPTTAKQVREFLGTAGFCRLWIPGFATLAAPLYPLTKPKGEFSWAPEHQKAFDAIKKALLSAPALALPDVTKPFTLYVDERKGVARGVLTQTLGPWRRPVAYLSKKLDPVASGWPVCLKAIAAVAILVKDADKLTLGQNITVIAPHALENIVRQPPDRWMTNARMTHYQSLLLTERVTFAPPAALNPATLLPEETDEPVTHDCHQLLIEETGVRKDLTDIPLTGEVLTWFTDGSSYVVEGKRMAGAAVVDGTRTIWASSLPEGTSAQKAELMALTQALRLAEGKSINIYTDSRYAFATAHVHGAIYKQRGWLTSAGREIKNKEEILSLLEALHLPKRLAIIHCPGHQKAKDPISRGNQMADRVAKQAAQGVNLLAGKRTADGSEFEKRTADGSEFESPKKKAKVE

SEQ ID NO: 312 - protein, 2090 aa, synthetic construct; identical to SEQ ID NO: 116

SEQ ID NO: 313 - protein, 2109 aa, synthetic construct; identical to SEQ ID NO: 117

SEQ ID NO: 314 - protein, 2088 aa, synthetic construct
MPAAKRVKLDGGDKKYSIGLDIGTNSVGWAVITDEYKVPSKKFKVLGNTDRHSIKKNLIGALLFDSGETAEATRLKRTARRRYTRRKNRICYLQEIFSNEMAKVDDSFFHRLEESFLVEEDKKHERHPIFGNIVDEVAYHEKYPTIYHLRKKLVDSTDKADLRLIYLALAHMIKFRGHFLIEGDLNPDNSDVDKLFIQLVQTYNQLFEENPINASGVDAKAILSARLSKSRRLENLIAQLPGEKKNGLFGNLIALSLGLTPNFKSNFDLAEDAKLQLSKDTYDDDLDNLLAQIGDQYADLFLAAKNLSDAILLSDILRVNTEITKAPLSASMIKRYDEHHQDLTLLKALVRQQLPEKYKEIFFDQSKNGYAGYIDGGASQEEFYKFIKPILEKMDGTEELLVKLNREDLLRKQRTFDNGSIPHQIHLGELHAILRRQEDFYPFLKDNREKIEKILTFRIPYYVGPLARGNSRFAWMTRKSEETITPWNFEEVVDKGASAQSFIERMTNFDKNLPNEKVLPKHSLLYEYFTVYNELTKVKYVTEGMRKPAFLSGEQKKAIVDLLFKTNRKVTVKQLKEDYFKKIECFDSVEISGVEDRFNASLGTYHDLLKIIKDKDFLDNEENEDILEDIVLTLTLFEDREMIEERLKTYAHLFDDKVMKQLKRRRYTGWGRLSRKLINGIRDKQSGKTILDFLKSDGFANRNFMQLIHDDSLTFKEDIQKAQVSGQGDSLHEHIANLAGSPAIKKGILQTVKVVDELVKVMGRHKPENIVIEMARENQTTQKGQKNSRERMKRIEEGIKELGSQILKEHPVENTQLQNEKLYLYYLQNGRDMYVDQELDINRLSDYDVDHIVPQSFLKDDSIDNKVLTRSDKARGKSDNVPSEEVVKKMKNYWRQLLNAKLITQRKFDNLTKAERGGLSELDKAGFIKRQLVETRQITKHVAQILDSRMNTKYDENDKLIREVKVITLKSKLVSDFRKDFQFYKVREINNYHHAHDAYLNAVVGTALIKKYPKLESEFVYGDYKVYDVRKMIAKSEQEIGKATAKYFFYSNIMNFFKTEITLANGEIRKRPLIETNGETGEIVWDKGRDFATVRKVLSMPQVNIVKKTEVQTGGFSKESILPKRNSDKLIARKKDWDPKKYGGFDSPTVAYSVLVVAKVEKGKSKKLKSVKELLGITIMERSSFEKNPIDFLEAKGYKEVKKDLIIKLPKYSLFELENGRKRMLASAGELQKGNELALPSKYVNFLYLASHYEKLKGSPEDNEQKQLFVEQHKHYLDEIIEQISEFSKRVILADANLDKVLSAYNKHRDKPIREQAENIIHLFTLTNLGAPAAFKYFDTTIDRKRYTSTKEVLDATLIHQSITGLYETRIDLSQLGGDGGGGGPAPGSSGGTLQLDDEYRLYSPLVKPDQNIQFWLEQFPQAWAETAGMGLAKQVPPQVIQLKASATPVSVRQYPLSKEAQEGIRPHVQRLIQQGILVPVQSPWNTPLLPVRKPGTNDYRPVQDLREVNKRVQDIHPTVPNPYNLLCALPPQRSWYTVLDLKDAFFCLRLHPTSQPLFAFEWRDPGTGRTGQLTWTRLPQGFKNSPTIFNEALHRDLANFRIQHPQVTLLQYVDDLLLAGATKQDCLEGTKALLLELSDLGYRASAKKAQICRREVTYLGYSLRDGQRWLTEARKKTVVQIPAPTTAKQVREFLGTAGFCRLWIPGFATLAAPLYPLTKPKGEFSWAPEHQKAFDAIKKALLSAPALALPDVTKPFTLYVDERKGVARGVLTQTLGPWRRPVAYLSKKLDPVASGWPVCLKAIAAVAILVKDADKLTLGQNITVIAPHALENIVRQPPDRWMTNARMTHYQSLLLTERVTFAPPAALNPATLLPEETDEPVTHDCHQLLIEETGVRKDLTDIPLTGEVLTWFTDGSSYVVEGKRMAGAAVVDGTRTIWASSLPEGTSAQKAELMALTQALRLAEGKSINIYTDSRYAFATAHVHGAIYKQRGWLTSAGREIKNKEEILSLLEALHLPKRLAIIHCPGHQKAKDPISRGNQMADRVAKQAAQGVNLLAGKRTADGSEFEKRTADGSEFESPKKKAKVE

SEQ ID NO: 315 - protein, 2082 aa, synthetic construct; identical to SEQ ID NO: 120

SEQ ID NO: 316 - protein, 2097 aa, synthetic construct; identical to SEQ ID NO: 142

SEQ ID NO: 317 - protein, 2090 aa, synthetic construct
MPAAKRVKLDGGDKKYSIGLDIGTNSVGWAVITDEYKVPSKKFKVLGNTDRHSIKKNLIGALLFDSGETAEATRLKRTARRRYTRRKNRICYLQEIFSNEMAKVDDSFFHRLEESFLVEEDKKHERHPIFGNIVDEVAYHEKYPTIYHLRKKLVDSTDKADLRLIYLALAHMIKFRGHFLIEGDLNPDNSDVDKLFIQLVQTYNQLFEENPINASGVDAKAILSARLSKSRRLENLIAQLPGEKKNGLFGNLIALSLGLTPNFKSNFDLAEDAKLQLSKDTYDDDLDNLLAQIGDQYADLFLAAKNLSDAILLSDILRVNTEITKAPLSASMIKRYDEHHQDLTLLKALVRQQLPEKYKEIFFDQSKNGYAGYIDGGASQEEFYKFIKPILEKMDGTEELLVKLNREDLLRKQRTFDNGSIPHQIHLGELHAILRRQEDFYPFLKDNREKIEKILTFRIPYYVGPLARGNSRFAWMTRKSEETITPWNFEEVVDKGASAQSFIERMTNFDKNLPNEKVLPKHSLLYEYFTVYNELTKVKYVTEGMRKPAFLSGEQKKAIVDLLFKTNRKVTVKQLKEDYFKKIECFDSVEISGVEDRFNASLGTYHDLLKIIKDKDFLDNEENEDILEDIVLTLTLFEDREMIEERLKTYAHLFDDKVMKQLKRRRYTGWGRLSRKLINGIRDKQSGKTILDFLKSDGFANRNFMQLIHDDSLTFKEDIQKAQVSGQGDSLHEHIANLAGSPAIKKGILQTVKVVDELVKVMGRHKPENIVIEMARENQTTQKGQKNSRERMKRIEEGIKELGSQILKEHPVENTQLQNEKLYLYYLQNGRDMYVDQELDINRLSDYDVDHIVPQSFLKDDSIDNKVLTRSDKARGKSDNVPSEEVVKKMKNYWRQLLNAKLITQRKFDNLTKAERGGLSELDKAGFIKRQLVETRQITKHVAQILDSRMNTKYDENDKLIREVKVITLKSKLVSDFRKDFQFYKVREINNYHHAHDAYLNAVVGTALIKKYPKLESEFVYGDYKVYDVRKMIAKSEQEIGKATAKYFFYSNIMNFFKTEITLANGEIRKRPLIETNGETGEIVWDKGRDFATVRKVLSMPQVNIVKKTEVQTGGFSKESILPKRNSDKLIARKKDWDPKKYGGFDSPTVAYSVLVVAKVEKGKSKKLKSVKELLGITIMERSSFEKNPIDFLEAKGYKEVKKDLIIKLPKYSLFELENGRKRMLASAGELQKGNELALPSKYVNFLYLASHYEKLKGSPEDNEQKQLFVEQHKHYLDEIIEQISEFSKRVILADANLDKVLSAYNKHRDKPIREQAENIIHLFTLTNLGAPAAFKYFDTTIDRKRYTSTKEVLDATLIHQSITGLYETRIDLSQLGGDGGGSSGGGEAAAKGGTLQLDDEYRLYSPLVKPDQNIQFWLEQFPQAWAETAGMGLAKQVPPQVIQLKASATPVSVRQYPLSKEAQEGIRPHVQRLIQQGILVPVQSPWNTPLLPVRKPGTNDYRPVQDLREVNKRVQDIHPTVPNPYNLLCALPPQRSWYTVLDLKDAFFCLRLHPTSQPLFAFEWRDPGTGRTGQLTWTRLPQGFKNSPTIFNEALHRDLANFRIQHPQVTLLQYVDDLLLAGATKQDCLEGTKALLLELSDLGYRASAKKAQICRREVTYLGYSLRDGQRWLTEARKKTVVQIPAPTTAKQVREFLGTAGFCRLWIPGFATLAAPLYPLTKPKGEFSWAPEHQKAFDAIKKALLSAPALALPDVTKPFTLYVDERKGVARGVLTQTLGPWRRPVAYLSKKLDPVASGWPVCLKAIAAVAILVKDADKLTLGQNITVIAPHALENIVRQPPDRWMTNARMTHYQSLLLTERVTFAPPAALNPATLLPEETDEPVTHDCHQLLIEETGVRKDLTDIPLTGEVLTWFTDGSSYVVEGKRMAGAAVVDGTRTIWASSLPEGTSAQKAELMALTQALRLAEGKSINIYTDSRYAFATAHVHGAIYKQRGWLTSAGREIKNKEEILSLLEALHLPKRLAIIHCPGHQKAKDPISRGNQMADRVAKQAAQGVNLLAGKRTADGSEFEKRTADGSEFESPKKKAKVE

SEQ ID NO: 318 - protein, 2090 aa, synthetic construct; identical to SEQ ID NO: 121

SEQ ID NO: 319 - protein, 2090 aa, synthetic construct; identical to SEQ ID NO: 124

SEQ ID NO: 320 - protein, 2088 aa, synthetic construct
MPAAKRVKLDGGDKKYSIGLDIGTNSVGWAVITDEYKVPSKKFKVLGNTDRHSIKKNLIGALLFDSGETAEATRLKRTARRRYTRRKNRICYLQEIFSNEMAKVDDSFFHRLEESFLVEEDKKHERHPIFGNIVDEVAYHEKYPTIYHLRKKLVDSTDKADLRLIYLALAHMIKFRGHFLIEGDLNPDNSDVDKLFIQLVQTYNQLFEENPINASGVDAKAILSARLSKSRRLENLIAQLPGEKKNGLFGNLIALSLGLTPNFKSNFDLAEDAKLQLSKDTYDDDLDNLLAQIGDQYADLFLAAKNLSDAILLSDILRVNTEITKAPLSASMIKRYDEHHQDLTLLKALVRQQLPEKYKEIFFDQSKNGYAGYIDGGASQEEFYKFIKPILEKMDGTEELLVKLNREDLLRKQRTFDNGSIPHQIHLGELHAILRRQEDFYPFLKDNREKIEKILTFRIPYYVGPLARGNSRFAWMTRKSEETITPWNFEEVVDKGASAQSFIERMTNFDKNLPNEKVLPKHSLLYEYFTVYNELTKVKYVTEGMRKPAFLSGEQKKAIVDLLFKTNRKVTVKQLKEDYFKKIECFDSVEISGVEDRFNASLGTYHDLLKIIKDKDFLDNEENEDILEDIVLTLTLFEDREMIEERLKTYAHLFDDKVMKQLKRRRYTGWGRLSRKLINGIRDKQSGKTILDFLKSDGFANRNFMQLIHDDSLTFKEDIQKAQVSGQGDSLHEHIANLAGSPAIKKGILQTVKVVDELVKVMGRHKPENIVIEMARENQTTQKGQKNSRERMKRIEEGIKELGSQILKEHPVENTQLQNEKLYLYYLQNGRDMYVDQELDINRLSDYDVDHIVPQSFLKDDSIDNKVLTRSDKARGKSDNVPSEEVVKKMKNYWRQLLNAKLITQRKFDNLTKAERGGLSELDKAGFIKRQLVETRQITKHVAQILDSRMNTKYDENDKLIREVKVITLKSKLVSDFRKDFQFYKVREINNYHHAHDAYLNAVVGTALIKKYPKLESEFVYGDYKVYDVRKMIAKSEQEIGKATAKYFFYSNIMNFFKTEITLANGEIRKRPLIETNGETGEIVWDKGRDFATVRKVLSMPQVNIVKKTEVQTGGFSKESILPKRNSDKLIARKKDWDPKKYGGFDSPTVAYSVLVVAKVEKGKSKKLKSVKELLGITIMERSSFEKNPIDFLEAKGYKEVKKDLIIKLPKYSLFELENGRKRMLASAGELQKGNELALPSKYVNFLYLASHYEKLKGSPEDNEQKQLFVEQHKHYLDEIIEQISEFSKRVILADANLDKVLSAYNKHRDKPIREQAENIIHLFTLTNLGAPAAFKYFDTTIDRKRYTSTKEVLDATLIHQSITGLYETRIDLSQLGGDGGGGGGGSGSSGGTLQLDDEYRLYSPLVKPDQNIQFWLEQFPQAWAETAGMGLAKQVPPQVIQLKASATPVSVRQYPLSKEAQEGIRPHVQRLIQQGILVPVQSPWNTPLLPVRKPGTNDYRPVQDLREVNKRVQDIHPTVPNPYNLLCALPPQRSWYTVLDLKDAFFCLRLHPTSQPLFAFEWRDPGTGRTGQLTWTRLPQGFKNSPTIFNEALHRDLANFRIQHPQVTLLQYVDDLLLAGATKQDCLEGTKALLLELSDLGYRASAKKAQICRREVTYLGYSLRDGQRWLTEARKKTVVQIPAPTTAKQVREFLGTAGFCRLWIPGFATLAAPLYPLTKPKGEFSWAPEHQKAFDAIKKALLSAPALALPDVTKPFTLYVDERKGVARGVLTQTLGPWRRPVAYLSKKLDPVASGWPVCLKAIAAVAILVKDADKLTLGQNITVIAPHALENIVRQPPDRWMTNARMTHYQSLLLTERVTFAPPAALNPATLLPEETDEPVTHDCHQLLIEETGVRKDLTDIPLTGEVLTWFTDGSSYVVEGKRMAGAAVVDGTRTIWASSLPEGTSAQKAELMALTQALRLAEGKSINIYTDSRYAFATAHVHGAIYKQRGWLTSAGREIKNKEEILSLLEALHLPKRLAIIHCPGHQKAKDPISRGNQMADRVAKQAAQGVNLLAGKRTADGSEFEKRTADGSEFESPKKKAKVE

SEQ ID NO: 321 - protein, 2090 aa, synthetic construct; identical to SEQ ID NO: 138

SEQ ID NO: 322 - protein, 2090 aa, synthetic construct
MPAAKRVKLDGGDKKYSIGLDIGTNSVGWAVITDEYKVPSKKFKVLGNTDRHSIKKNLIGALLFDSGETAEATRLKRTARRRYTRRKNRICYLQEIFSNEMAKVDDSFFHRLEESFLVEEDKKHERHPIFGNIVDEVAYHEKYPTIYHLRKKLVDSTDKADLRLIYLALAHMIKFRGHFLIEGDLNPDNSDVDKLFIQLVQTYNQLFEENPINASGVDAKAILSARLSKSRRLENLIAQLPGEKKNGLFGNLIALSLGLTPNFKSNFDLAEDAKLQLSKDTYDDDLDNLLAQIGDQYADLFLAAKNLSDAILLSDILRVNTEITKAPLSASMIKRYDEHHQDLTLLKALVRQQLPEKYKEIFFDQSKNGYAGYIDGGASQEEFYKFIKPILEKMDGTEELLVKLNREDLLRKQRTFDNGSIPHQIHLGELHAILRRQEDFYPFLKDNREKIEKILTFRIPYYVGPLARGNSRFAWMTRKSEETITPWNFEEVVDKGASAQSFIERMTNFDKNLPNEKVLPKHSLLYEYFTVYNELTKVKYVTEGMRKPAFLSGEQKKAIVDLLFKTNRKVTVKQLKEDYFKKIECFDSVEISGVEDRFNASLGTYHDLLKIIKDKDFLDNEENEDILEDIVLTLTLFEDREMIEERLKTYAHLFDDKVMKQLKRRRYTGWGRLSRKLINGIRDKQSGKTILDFLKSDGFANRNFMQLIHDDSLTFKEDIQKAQVSGQGDSLHEHIANLAGSPAIKKGILQTVKVVDELVKVMGRHKPENIVIEMARENQTTQKGQKNSRERMKRIEEGIKELGSQILKEHPVENTQLQNEKLYLYYLQNGRDMYVDQELDINRLSDYDVDHIVPQSFLKDDSIDNKVLTRSDKARGKSDNVPSEEVVKKMKNYWRQLLNAKLITQRKFDNLTKAERGGLSELDKAGFIKRQLVETRQITKHVAQILDSRMNTKYDENDKLIREVKVITLKSKLVSDFRKDFQFYKVREINNYHHAHDAYLNAVVGTALIKKYPKLESEFVYGDYKVYDVRKMIAKSEQEIGKATAKYFFYSNIMNFFKTEITLANGEIRKRPLIETNGETGEIVWDKGRDFATVRKVLSMPQVNIVKKTEVQTGGFSKESILPKRNSDKLIARKKDWDPKKYGGFDSPTVAYSVLVVAKVEKGKSKKLKSVKELLGITIMERSSFEKNPIDFLEAKGYKEVKKDLIIKLPKYSLFELENGRKRMLASAGELQKGNELALPSKYVNFLYLASHYEKLKGSPEDNEQKQLFVEQHKHYLDEIIEQISEFSKRVILADANLDKVLSAYNKHRDKPIREQAENIIHLFTLTNLGAPAAFKYFDTTIDRKRYTSTKEVLDATLIHQSITGLYETRIDLSQLGGDGGGGGEAAAKGGSGGTLQLDDEYRLYSPLVKPDQNIQFWLEQFPQAWAETAGMGLAKQVPPQVIQLKASATPVSVRQYPLSKEAQEGIRPHVQRLIQQGILVPVQSPWNTPLLPVRKPGTNDYRPVQDLREVNKRVQDIHPTVPNPYNLLCALPPQRSWYTVLDLKDAFFCLRLHPTSQPLFAFEWRDPGTGRTGQLTWTRLPQGFKNSPTIFNEALHRDLANFRIQHPQVTLLQYVDDLLLAGATKQDCLEGTKALLLELSDLGYRASAKKAQICRREVTYLGYSLRDGQRWLTEARKKTVVQIPAPTTAKQVREFLGTAGFCRLWIPGFATLAAPLYPLTKPKGEFSWAPEHQKAFDAIKKALLSAPALALPDVTKPFTLYVDERKGVARGVLTQTLGPWRRPVAYLSKKLDPVASGWPVCLKAIAAVAILVKDADKLTLGQNITVIAPHALENIVRQPPDRWMTNARMTHYQSLLLTERVTFAPPAALNPATLLPEETDEPVTHDCHQLLIEETGVRKDLTDIPLTGEVLTWFTDGSSYVVEGKRMAGAAVVDGTRTIWASSLPEGTSAQKAELMALTQALRLAEGKSINIYTDSRYAFATAHVHGAIYKQRGWLTSAGREIKNKEEILSLLEALHLPKRLAIIHCPGHQKAKDPISRGNQMADRVAKQAAQGVNLLAGKRTADGSEFEKRTADGSEFESPKKKAKVE

SEQ ID NO: 323 - protein, 2090 aa, synthetic construct
MPAAKRVKLDGGDKKYSIGLDIGTNSVGWAVITDEYKVPSKKFKVLGNTDRHSIKKNLIGALLFDSGETAEATRLKRTARRRYTRRKNRICYLQEIFSNEMAKVDDSFFHRLEESFLVEEDKKHERHPIFGNIVDEVAYHEKYPTIYHLRKKLVDSTDKADLRLIYLALAHMIKFRGHFLIEGDLNPDNSDVDKLFIQLVQTYNQLFEENPINASGVDAKAILSARLSKSRRLENLIAQLPGEKKNGLFGNLIALSLGLTPNFKSNFDLAEDAKLQLSKDTYDDDLDNLLAQIGDQYADLFLAAKNLSDAILLSDILRVNTEITKAPLSASMIKRYDEHHQDLTLLKALVRQQLPEKYKEIFFDQSKNGYAGYIDGGASQEEFYKFIKPILEKMDGTEELLVKLNREDLLRKQRTFDNGSIPHQIHLGELHAILRRQEDFYPFLKDNREKIEKILTFRIPYYVGPLARGNSRFAWMTRKSEETITPWNFEEVVDKGASAQSFIERMTNFDKNLPNEKVLPKHSLLYEYFTVYNELTKVKYVTEGMRKPAFLSGEQKKAIVDLLFKTNRKVTVKQLKEDYFKKIECFDSVEISGVEDRFNASLGTYHDLLKIIKDKDFLDNEENEDILEDIVLTLTLFEDREMIEERLKTYAHLFDDKVMKQLKRRRYTGWGRLSRKLINGIRDKQSGKTILDFLKSDGFANRNFMQLIHDDSLTFKEDIQKAQVSGQGDSLHEHIANLAGSPAIKKGILQTVKVVDELVKVMGRHKPENIVIEMARENQTTQKGQKNSRERMKRIEEGIKELGSQILKEHPVENTQLQNEKLYLYYLQNGRDMYVDQELDINRLSDYDVDHIVPQSFLKDDSIDNKVLTRSDKARGKSDNVPSEEVVKKMKNYWRQLLNAKLITQRKFDNLTKAERGGLSELDKAGFIKRQLVETRQITKHVAQILDSRMNTKYDENDKLIREVKVITLKSKLVSDFRKDFQFYKVREINNYHHAHDAYLNAVVGTALIKKYPKLESEFVYGDYKVYDVRKMIAKSEQEIGKATAKYFFYSNIMNFFKTEITLANGEIRKRPLIETNGETGEIVWDKGRDFATVRKVLSMPQVNIVKKTEVQTGGFSKESILPKRNSDKLIARKKDWDPKKYGGFDSPTVAYSVLVVAKVEKGKSKKLKSVKELLGITIMERSSFEKNPIDFLEAKGYKEVKKDLIIKLPKYSLFELENGRKRMLASAGELQKGNELALPSKYVNFLYLASHYEKLKGSPEDNEQKQLFVEQHKHYLDEIIEQISEFSKRVILADANLDKVLSAYNKHRDKPIREQAENIIHLFTLTNLGAPAAFKYFDTTIDRKRYTSTKEVLDATLIHQSITGLYETRIDLSQLGGDGGGGSEAAAKGSSGGTLQLDDEYRLYSPLVKPDQNIQFWLEQFPQAWAETAGMGLAKQVPPQVIQLKASATPVSVRQYPLSKEAQEGIRPHVQRLIQQGILVPVQSPWNTPLLPVRKPGTNDYRPVQDLREVNKRVQDIHPTVPNPYNLLCALPPQRSWYTVLDLKDAFFCLRLHPTSQPLFAFEWRDPGTGRTGQLTWTRLPQGFKNSPTIFNEALHRDLANFRIQHPQVTLLQYVDDLLLAGATKQDCLEGTKALLLELSDLGYRASAKKAQICRREVTYLGYSLRDGQRWLTEARKKTVVQIPAPTTAKQVREFLGTAGFCRLWIPGFATLAAPLYPLTKPKGEFSWAPEHQKAFDAIKKALLSAPALALPDVTKPFTLYVDERKGVARGVLTQTLGPWRRPVAYLSKKLDPVASGWPVCLKAIAAVAILVKDADKLTLGQNITVIAPHALENIVRQPPDRWMTNARMTHYQSLLLTERVTFAPPAALNPATLLPEETDEPVTHDCHQLLIEETGVRKDLTDIPLTGEVLTWFTDGSSYVVEGKRMAGAAVVDGTRTIWASSLPEGTSAQKAELMALTQALRLAEGKSINIYTDSRYAFATAHVHGAIYKQRGWLTSAGREIKNKEEILSLLEALHLPKRLAIIHCPGHQKAKDPISRGNQMADRVAKQAAQGVNLLAGKRTADGSEFEKRTADGSEFESPKKKAKVE

SEQ ID NO: 324 - protein, 2090 aa, synthetic construct
MPAAKRVKLDGGDKKYSIGLDIGTNSVGWAVITDEYKVPSKKFKVLGNTDRHSIKKNLIGALLFDSGETAEATRLKRTARRRYTRRKNRICYLQEIFSNEMAKVDDSFFHRLEESFLVEEDKKHERHPIFGNIVDEVAYHEKYPTIYHLRKKLVDSTDKADLRLIYLALAHMIKFRGHFLIEGDLNPDNSDVDKLFIQLVQTYNQLFEENPINASGVDAKAILSARLSKSRRLENLIAQLPGEKKNGLFGNLIALSLGLTPNFKSNFDLAEDAKLQLSKDTYDDDLDNLLAQIGDQYADLFLAAKNLSDAILLSDILRVNTEITKAPLSASMIKRYDEHHQDLTLLKALVRQQLPEKYKEIFFDQSKNGYAGYIDGGASQEEFYKFIKPILEKMDGTEELLVKLNREDLLRKQRTFDNGSIPHQIHLGELHAILRRQEDFYPFLKDNREKIEKILTFRIPYYVGPLARGNSRFAWMTRKSEETITPWNFEEVVDKGASAQSFIERMTNFDKNLPNEKVLPKHSLLYEYFTVYNELTKVKYVTEGMRKPAFLSGEQKKAIVDLLFKTNRKVTVKQLKEDYFKKIECFDSVEISGVEDRFNASLGTYHDLLKIIKDKDFLDNEENEDILEDIVLTLTLFEDREMIEERLKTYAHLFDDKVMKQLKRRRYTGWGRLSRKLINGIRDKQSGKTILDFLKSDGFANRNFMQLIHDDSLTFKEDIQKAQVSGQGDSLHEHIANLAGSPAIKKGILQTVKVVDELVKVMGRHKPENIVIEMARENQTTQKGQKNSRERMKRIEEGIKELGSQILKEHPVENTQLQNEKLYLYYLQNGRDMYVDQELDINRLSDYDVDHIVPQSFLKDDSIDNKVLTRSDKARGKSDNVPSEEVVKKMKNYWRQLLNAKLITQRKFDNLTKAERGGLSELDKAGFIKRQLVETRQITKHVAQILDSRMNTKYDENDKLIREVKVITLKSKLVSDFRKDFQFYKVREINNYHHAHDAYLNAVVGTALIKKYPKLESEFVYGDYKVYDVRKMIAKSEQEIGKATAKYFFYSNIMNFFKTEITLANGEIRKRPLIETNGETGEIVWDKGRDFATVRKVLSMPQVNIVKKTEVQTGGFSKESILPKRNSDKLIARKKDWDPKKYGGFDSPTVAYSVLVVAKVEKGKSKKLKSVKELLGITIMERSSFEKNPIDFLEAKGYKEVKKDLIIKLPKYSLFELENGRKRMLASAGELQKGNELALPSKYVNFLYLASHYEKLKGSPEDNEQKQLFVEQHKHYLDEIIEQISEFSKRVILADANLDKVLSAYNKHRDKPIREQAENIIHLFTLTNLGAPAAFKYFDTTIDRKRYTSTKEVLDATLIHQSITGLYETRIDLSQLGGDGGGGGEAAAKPAPGGTLQLDDEYRLYSPLVKPDQNIQFWLEQFPQAWAETAGMGLAKQVPPQVIQLKASATPVSVRQYPLSKEAQEGIRPHVQRLIQQGILVPVQSPWNTPLLPVRKPGTNDYRPVQDLREVNKRVQDIHPTVPNPYNLLCALPPQRSWYTVLDLKDAFFCLRLHPTSQPLFAFEWRDPGTGRTGQLTWTRLPQGFKNSPTIFNEALHRDLANFRIQHPQVTLLQYVDDLLLAGATKQDCLEGTKALLLELSDLGYRASAKKAQICRREVTYLGYSLRDGQRWLTEARKKTVVQIPAPTTAKQVREFLGTAGFCRLWIPGFATLAAPLYPLTKPKGEFSWAPEHQKAFDAIKKALLSAPALALPDVTKPFTLYVDERKGVARGVLTQTLGPWRRPVAYLSKKLDPVASGWPVCLKAIAAVAILVKDADKLTLGQNITVIAPHALENIVRQPPDRWMTNARMTHYQSLLLTERVTFAPPAALNPATLLPEETDEPVTHDCHQLLIEETGVRKDLTDIPLTGEVLTWFTDGSSYVVEGKRMAGAAVVDGTRTIWASSLPEGTSAQKAELMALTQALRLAEGKSINIYTDSRYAFATAHVHGAIYKQRGWLTSAGREIKNKEEILSLLEALHLPKRLAIIHCPGHQKAKDPISRGNQMADRVAKQAAQGVNLLAGKRTADGSEFEKRTADGSEFESPKKKAKVE

SEQ ID NO: 325 - protein, 2087 aa, synthetic construct; identical to SEQ ID NO: 128

SEQ ID NO: 326 - protein, 2082 aa, synthetic construct
MPAAKRVKLDGGDKKYSIGLDIGTNSVGWAVITDEYKVPSKKFKVLGNTDRHSIKKNLIGALLFDSGETAEATRLKRTARRRYTRRKNRICYLQEIFSNEMAKVDDSFFHRLEESFLVEEDKKHERHPIFGNIVDEVAYHEKYPTIYHLRKKLVDSTDKADLRLIYLALAHMIKFRGHFLIEGDLNPDNSDVDKLFIQLVQTYNQLFEENPINASGVDAKAILSARLSKSRRLENLIAQLPGEKKNGLFGNLIALSLGLTPNFKSNFDLAEDAKLQLSKDTYDDDLDNLLAQIGDQYADLFLAAKNLSDAILLSDILRVNTEITKAPLSASMIKRYDEHHQDLTLLKALVRQQLPEKYKEIFFDQSKNGYAGYIDGGASQEEFYKFIKPILEKMDGTEELLVKLNREDLLRKQRTFDNGSIPHQIHLGELHAILRRQEDFYPFLKDNREKIEKILTFRIPYYVGPLARGNSRFAWMTRKSEETITPWNFEEVVDKGASAQSFIERMTNFDKNLPNEKVLPKHSLLYEYFTVYNELTKVKYVTEGMRKPAFLSGEQKKAIVDLLFKTNRKVTVKQLKEDYFKKIECFDSVEISGVEDRFNASLGTYHDLLKIIKDKDFLDNEENEDILEDIVLTLTLFEDREMIEERLKTYAHLFDDKVMKQLKRRRYTGWGRLSRKLINGIRDKQSGKTILDFLKSDGFANRNFMQLIHDDSLTFKEDIQKAQVSGQGDSLHEHIANLAGSPAIKKGILQTVKVVDELVKVMGRHKPENIVIEMARENQTTQKGQKNSRERMKRIEEGIKELGSQILKEHPVENTQLQNEKLYLYYLQNGRDMYVDQELDINRLSDYDVDHIVPQSFLKDDSIDNKVLTRSDKARGKSDNVPSEEVVKKMKNYWRQLLNAKLITQRKFDNLTKAERGGLSELDKAGFIKRQLVETRQITKHVAQILDSRMNTKYDENDKLIREVKVITLKSKLVSDFRKDFQFYKVREINNYHHAHDAYLNAVVGTALIKKYPKLESEFVYGDYKVYDVRKMIAKSEQEIGKATAKYFFYSNIMNFFKTEITLANGEIRKRPLIETNGETGEIVWDKGRDFATVRKVLSMPQVNIVKKTEVQTGGFSKESILPKRNSDKLIARKKDWDPKKYGGFDSPTVAYSVLVVAKVEKGKSKKLKSVKELLGITIMERSSFEKNPIDFLEAKGYKEVKKDLIIKLPKYSLFELENGRKRMLASAGELQKGNELALPSKYVNFLYLASHYEKLKGSPEDNEQKQLFVEQHKHYLDEIIEQISEFSKRVILADANLDKVLSAYNKHRDKPIREQAENIIHLFTLTNLGAPAAFKYFDTTIDRKRYTSTKEVLDATLIHQSITGLYETRIDLSQLGGDGGGGSGGTLQLDDEYRLYSPLVKPDQNIQFWLEQFPQAWAETAGMGLAKQVPPQVIQLKASATPVSVRQYPLSKEAQEGIRPHVQRLIQQGILVPVQSPWNTPLLPVRKPGTNDYRPVQDLREVNKRVQDIHPTVPNPYNLLCALPPQRSWYTVLDLKDAFFCLRLHPTSQPLFAFEWRDPGTGRTGQLTWTRLPQGFKNSPTIFNEALHRDLANFRIQHPQVTLLQYVDDLLLAGATKQDCLEGTKALLLELSDLGYRASAKKAQICRREVTYLGYSLRDGQRWLTEARKKTVVQIPAPTTAKQVREFLGTAGFCRLWIPGFATLAAPLYPLTKPKGEFSWAPEHQKAFDAIKKALLSAPALALPDVTKPFTLYVDERKGVARGVLTQTLGPWRRPVAYLSKKLDPVASGWPVCLKAIAAVAILVKDADKLTLGQNITVIAPHALENIVRQPPDRWMTNARMTHYQSLLLTERVTFAPPAALNPATLLPEETDEPVTHDCHQLLIEETGVRKDLTDIPLTGEVLTWFTDGSSYVVEGKRMAGAAVVDGTRTIWASSLPEGTSAQKAELMALTQALRLAEGKSINIYTDSRYAFATAHVHGAIYKQRGWLTSAGREIKNKEEILSLLEALHLPKRLAIIHCPGHQKAKDPISRGNQMADRVAKQAAQGVNLLAGKRTADGSEFEKRTADGSEFESPKKKAKVE

SEQ ID NO: 327 - protein, 2090 aa, synthetic construct; identical to SEQ ID NO: 132

SEQ ID NO: 328 - protein, 2095 aa, synthetic construct; identical to SEQ ID NO: 122

SEQ ID NO: 329 - protein, 2085 aa, synthetic construct; identical to SEQ ID NO: 143

SEQ ID NO: 330 - protein, 2090 aa, synthetic construct; identical to SEQ ID NO: 160

SEQ ID NO: 331 - protein, 2090 aa, synthetic construct
MPAAKRVKLDGGDKKYSIGLDIGTNSVGWAVITDEYKVPSKKFKVLGNTDRHSIKKNLIGALLFDSGETAEATRLKRTARRRYTRRKNRICYLQEIFSNEMAKVDDSFFHRLEESFLVEEDKKHERHPIFGNIVDEVAYHEKYPTIYHLRKKLVDSTDKADLRLIYLALAHMIKFRGHFLIEGDLNPDNSDVDKLFIQLVQTYNQLFEENPINASGVDAKAILSARLSKSRRLENLIAQLPGEKKNGLFGNLIALSLGLTPNFKSNFDLAEDAKLQLSKDTYDDDLDNLLAQIGDQYADLFLAAKNLSDAILLSDILRVNTEITKAPLSASMIKRYDEHHQDLTLLKALVRQQLPEKYKEIFFDQSKNGYAGYIDGGASQEEFYKFIKPILEKMDGTEELLVKLNREDLLRKQRTFDNGSIPHQIHLGELHAILRRQEDFYPFLKDNREKIEKILTFRIPYYVGPLARGNSRFAWMTRKSEETITPWNFEEVVDKGASAQSFIERMTNFDKNLPNEKVLPKHSLLYEYFTVYNELTKVKYVTEGMRKPAFLSGEQKKAIVDLLFKTNRKVTVKQLKEDYFKKIECFDSVEISGVEDRFNASLGTYHDLLKIIKDKDFLDNEENEDILEDIVLTLTLFEDREMIEERLKTYAHLFDDKVMKQLKRRRYTGWGRLSRKLINGIRDKQSGKTILDFLKSDGFANRNFMQLIHDDSLTFKEDIQKAQVSGQGDSLHEHIANLAGSPAIKKGILQTVKVVDELVKVMGRHKPENIVIEMARENQTTQKGQKNSRERMKRIEEGIKELGSQILKEHPVENTQLQNEKLYLYYLQNGRDMYVDQELDINRLSDYDVDHIVPQSFLKDDSIDNKVLTRSDKARGKSDNVPSEEVVKKMKNYWRQLLNAKLITQRKFDNLTKAERGGLSELDKAGFIKRQLVETRQITKHVAQILDSRMNTKYDENDKLIREVKVITLKSKLVSDFRKDFQFYKVREINNYHHAHDAYLNAVVGTALIKKYPKLESEFVYGDYKVYDVRKMIAKSEQEIGKATAKYFFYSNIMNFFKTEITLANGEIRKRPLIETNGETGEIVWDKGRDFATVRKVLSMPQVNIVKKTEVQTGGFSKESILPKRNSDKLIARKKDWDPKKYGGFDSPTVAYSVLVVAKVEKGKSKKLKSVKELLGITIMERSSFEKNPIDFLEAKGYKEVKKDLIIKLPKYSLFELENGRKRMLASAGELQKGNELALPSKYVNFLYLASHYEKLKGSPEDNEQKQLFVEQHKHYLDEIIEQISEFSKRVILADANLDKVLSAYNKHRDKPIREQAENIIHLFTLTNLGAPAAFKYFDTTIDRKRYTSTKEVLDATLIHQSITGLYETRIDLSQLGGDGGPAPEAAAKGGSGGTLQLDDEYRLYSPLVKPDQNIQFWLEQFPQAWAETAGMGLAKQVPPQVIQLKASATPVSVRQYPLSKEAQEGIRPHVQRLIQQGILVPVQSPWNTPLLPVRKPGTNDYRPVQDLREVNKRVQDIHPTVPNPYNLLCALPPQRSWYTVLDLKDAFFCLRLHPTSQPLFAFEWRDPGTGRTGQLTWTRLPQGFKNSPTIFNEALHRDLANFRIQHPQVTLLQYVDDLLLAGATKQDCLEGTKALLLELSDLGYRASAKKAQICRREVTYLGYSLRDGQRWLTEARKKTVVQIPAPTTAKQVREFLGTAGFCRLWIPGFATLAAPLYPLTKPKGEFSWAPEHQKAFDAIKKALLSAPALALPDVTKPFTLYVDERKGVARGVLTQTLGPWRRPVAYLSKKLDPVASGWPVCLKAIAAVAILVKDADKLTLGQNITVIAPHALENIVRQPPDRWMTNARMTHYQSLLLTERVTFAPPAALNPATLLPEETDEPVTHDCHQLLIEETGVRKDLTDIPLTGEVLTWFTDGSSYVVEGKRMAGAAVVDGTRTIWASSLPEGTSAQKAELMALTQALRLAEGKSINIYTDSRYAFATAHVHGAIYKQRGWLTSAGREIKNKEEILSLLEALHLPKRLAIIHCPGHQKAKDPISRGNQMADRVAKQAAQGVNLLAGKRTADGSEFEKRTADGSEFESPKKKAKVE

SEQ ID NO: 332 - protein, 2085 aa, synthetic construct
MPAAKRVKLDGGDKKYSIGLDIGTNSVGWAVITDEYKVPSKKFKVLGNTDRHSIKKNLIGALLFDSGETAEATRLKRTARRRYTRRKNRICYLQEIFSNEMAKVDDSFFHRLEESFLVEEDKKHERHPIFGNIVDEVAYHEKYPTIYHLRKKLVDSTDKADLRLIYLALAHMIKFRGHFLIEGDLNPDNSDVDKLFIQLVQTYNQLFEENPINASGVDAKAILSARLSKSRRLENLIAQLPGEKKNGLFGNLIALSLGLTPNFKSNFDLAEDAKLQLSKDTYDDDLDNLLAQIGDQYADLFLAAKNLSDAILLSDILRVNTEITKAPLSASMIKRYDEHHQDLTLLKALVRQQLPEKYKEIFFDQSKNGYAGYIDGGASQEEFYKFIKPILEKMDGTEELLVKLNREDLLRKQRTFDNGSIPHQIHLGELHAILRRQEDFYPFLKDNREKIEKILTFRIPYYVGPLARGNSRFAWMTRKSEETITPWNFEEVVDKGASAQSFIERMTNFDKNLPNEKVLPKHSLLYEYFTVYNELTKVKYVTEGMRKPAFLSGEQKKAIVDLLFKTNRKVTVKQLKEDYFKKIECFDSVEISGVEDRFNASLGTYHDLLKIIKDKDFLDNEENEDILEDIVLTLTLFEDREMIEERLKTYAHLFDDKVMKQLKRRRYTGWGRLSRKLINGIRDKQSGKTILDFLKSDGFANRNFMQLIHDDSLTFKEDIQKAQVSGQGDSLHEHIANLAGSPAIKKGILQTVKVVDELVKVMGRHKPENIVIEMARENQTTQKGQKNSRERMKRIEEGIKELGSQILKEHPVENTQLQNEKLYLYYLQNGRDMYVDQELDINRLSDYDVDHIVPQSFLKDDSIDNKVLTRSDKARGKSDNVPSEEVVKKMKNYWRQLLNAKLITQRKFDNLTKAERGGLSELDKAGFIKRQLVETRQITKHVAQILDSRMNTKYDENDKLIREVKVITLKSKLVSDFRKDFQFYKVREINNYHHAHDAYLNAVVGTALIKKYPKLESEFVYGDYKVYDVRKMIAKSEQEIGKATAKYFFYSNIMNFFKTEITLANGEIRKRPLIETNGETGEIVWDKGRDFATVRKVLSMPQVNIVKKTEVQTGGFSKESILPKRNSDKLIARKKDWDPKKYGGFDSPTVAYSVLVVAKVEKGKSKKLKSVKELLGITIMERSSFEKNPIDFLEAKGYKEVKKDLIIKLPKYSLFELENGRKRMLASAGELQKGNELALPSKYVNFLYLASHYEKLKGSPEDNEQKQLFVEQHKHYLDEIIEQISEFSKRVILADANLDKVLSAYNKHRDKPIREQAENIIHLFTLTNLGAPAAFKYFDTTIDRKRYTSTKEVLDATLIHQSITGLYETRIDLSQLGGDGGPAPGGGGGTLQLDDEYRLYSPLVKPDQNIQFWLEQFPQAWAETAGMGLAKQVPPQVIQLKASATPVSVRQYPLSKEAQEGIRPHVQRLIQQGILVPVQSPWNTPLLPVRKPGTNDYRPVQDLREVNKRVQDIHPTVPNPYNLLCALPPQRSWYTVLDLKDAFFCLRLHPTSQPLFAFEWRDPGTGRTGQLTWTRLPQGFKNSPTIFNEALHRDLANFRIQHPQVTLLQYVDDLLLAGATKQDCLEGTKALLLELSDLGYRASAKKAQICRREVTYLGYSLRDGQRWLTEARKKTVVQIPAPTTAKQVREFLGTAGFCRLWIPGFATLAAPLYPLTKPKGEFSWAPEHQKAFDAIKKALLSAPALALPDVTKPFTLYVDERKGVARGVLTQTLGPWRRPVAYLSKKLDPVASGWPVCLKAIAAVAILVKDADKLTLGQNITVIAPHALENIVRQPPDRWMTNARMTHYQSLLLTERVTFAPPAALNPATLLPEETDEPVTHDCHQLLIEETGVRKDLTDIPLTGEVLTWFTDGSSYVVEGKRMAGAAVVDGTRTIWASSLPEGTSAQKAELMALTQALRLAEGKSINIYTDSRYAFATAHVHGAIYKQRGWLTSAGREIKNKEEILSLLEALHLPKRLAIIHCPGHQKAKDPISRGNQMADRVAKQAAQGVNLLAGKRTADGSEFEKRTADGSEFESPKKKAKVE

SEQ ID NO: 333 - protein, 2083 aa, synthetic construct; identical to SEQ ID NO: 149

SEQ ID NO: 334 - protein, 2090 aa, synthetic construct; identical to SEQ ID NO: 146

SEQ ID NO: 335 - protein, 2087 aa, synthetic construct; identical to SEQ ID NO: 158

SEQ ID NO: 336 - protein, 2088 aa, synthetic construct
MPAAKRVKLDGGDKKYSIGLDIGTNSVGWAVITDEYKVPSKKFKVLGNTDRHSIKKNLIGALLFDSGETAEATRLKRTARRRYTRRKNRICYLQEIFSNEMAKVDDSFFHRLEESFLVEEDKKHERHPIFGNIVDEVAYHEKYPTIYHLRKKLVDSTDKADLRLIYLALAHMIKFRGHFLIEGDLNPDNSDVDKLFIQLVQTYNQLFEENPINASGVDAKAILSARLSKSRRLENLIAQLPGEKKNGLFGNLIALSLGLTPNFKSNFDLAEDAKLQLSKDTYDDDLDNLLAQIGDQYADLFLAAKNLSDAILLSDILRVNTEITKAPLSASMIKRYDEHHQDLTLLKALVRQQLPEKYKEIFFDQSKNGYAGYIDGGASQEEFYKFIKPILEKMDGTEELLVKLNREDLLRKQRTFDNGSIPHQIHLGELHAILRRQEDFYPFLKDNREKIEKILTFRIPYYVGPLARGNSRFAWMTRKSEETITPWNFEEVVDKGASAQSFIERMTNFDKNLPNEKVLPKHSLLYEYFTVYNELTKVKYVTEGMRKPAFLSGEQKKAIVDLLFKTNRKVTVKQLKEDYFKKIECFDSVEISGVEDRFNASLGTYHDLLKIIKDKDFLDNEENEDILEDIVLTLTLFEDREMIEERLKTYAHLFDDKVMKQLKRRRYTGWGRLSRKLINGIRDKQSGKTILDFLKSDGFANRNFMQLIHDDSLTFKEDIQKAQVSGQGDSLHEHIANLAGSPAIKKGILQTVKVVDELVKVMGRHKPENIVIEMARENQTTQKGQKNSRERMKRIEEGIKELGSQILKEHPVENTQLQNEKLYLYYLQNGRDMYVDQELDINRLSDYDVDHIVPQSFLKDDSIDNKVLTRSDKARGKSDNVPSEEVVKKMKNYWRQLLNAKLITQRKFDNLTKAERGGLSELDKAGFIKRQLVETRQITKHVAQILDSRMNTKYDENDKLIREVKVITLKSKLVSDFRKDFQFYKVREINNYHHAHDAYLNAVVGTALIKKYPKLESEFVYGDYKVYDVRKMIAKSEQEIGKATAKYFFYSNIMNFFKTEITLANGEIRKRPLIETNGETGEIVWDKGRDFATVRKVLSMPQVNIVKKTEVQTGGFSKESILPKRNSDKLIARKKDWDPKKYGGFDSPTVAYSVLVVAKVEKGKSKKLKSVKELLGITIMERSSFEKNPIDFLEAKGYKEVKKDLIIKLPKYSLFELENGRKRMLASAGELQKGNELALPSKYVNFLYLASHYEKLKGSPEDNEQKQLFVEQHKHYLDEIIEQISEFSKRVILADANLDKVLSAYNKHRDKPIREQAENIIHLFTLTNLGAPAAFKYFDTTIDRKRYTSTKEVLDATLIHQSITGLYETRIDLSQLGGDGGGGSGGGGSSGGTLQLDDEYRLYSPLVKPDQNIQFWLEQFPQAWAETAGMGLAKQVPPQVIQLKASATPVSVRQYPLSKEAQEGIRPHVQRLIQQGILVPVQSPWNTPLLPVRKPGTNDYRPVQDLREVNKRVQDIHPTVPNPYNLLCALPPQRSWYTVLDLKDAFFCLRLHPTSQPLFAFEWRDPGTGRTGQLTWTRLPQGFKNSPTIFNEALHRDLANFRIQHPQVTLLQYVDDLLLAGATKQDCLEGTKALLLELSDLGYRASAKKAQICRREVTYLGYSLRDGQRWLTEARKKTVVQIPAPTTAKQVREFLGTAGFCRLWIPGFATLAAPLYPLTKPKGEFSWAPEHQKAFDAIKKALLSAPALALPDVTKPFTLYVDERKGVARGVLTQTLGPWRRPVAYLSKKLDPVASGWPVCLKAIAAVAILVKDADKLTLGQNITVIAPHALENIVRQPPDRWMTNARMTHYQSLLLTERVTFAPPAALNPATLLPEETDEPVTHDCHQLLIEETGVRKDLTDIPLTGEVLTWFTDGSSYVVEGKRMAGAAVVDGTRTIWASSLPEGTSAQKAELMALTQALRLAEGKSINIYTDSRYAFATAHVHGAIYKQRGWLTSAGREIKNKEEILSLLEALHLPKRLAIIHCPGHQKAKDPISRGNQMADRVAKQAAQGVNLLAGKRTADGSEFEKRTADGSEFESPKKKAKVE

SEQ ID NO: 337 - protein, 2104 aa, synthetic construct; identical to SEQ ID NO: 150

SEQ ID NO: 338 - protein, 2088 aa, synthetic construct; identical to SEQ ID NO: 169

SEQ ID NO: 339 - protein, 2088 aa, synthetic construct; identical to SEQ ID NO: 162

SEQ ID NO: 340 - protein, 2088 aa, synthetic construct; identical to SEQ ID NO: 173

SEQ ID NO: 341 - protein, 2090 aa, synthetic construct; identical to SEQ ID NO: 141

SEQ ID NO: 342 - protein, 2094 aa, synthetic construct
MPAAKRVKLDGGDKKYSIGLDIGTNSVGWAVITDEYKVPSKKFKVLGNTDRHSIKKNLIGALLFDSGETAEATRLKRTARRRYTRRKNRICYLQEIFSNEMAKVDDSFFHRLEESFLVEEDKKHERHPIFGNIVDEVAYHEKYPTIYHLRKKLVDSTDKADLRLIYLALAHMIKFRGHFLIEGDLNPDNSDVDKLFIQLVQTYNQLFEENPINASGVDAKAILSARLSKSRRLENLIAQLPGEKKNGLFGNLIALSLGLTPNFKSNFDLAEDAKLQLSKDTYDDDLDNLLAQIGDQYADLFLAAKNLSDAILLSDILRVNTEITKAPLSASMIKRYDEHHQDLTLLKALVRQQLPEKYKEIFFDQSKNGYAGYIDGGASQEEFYKFIKPILEKMDGTEELLVKLNREDLLRKQRTFDNGSIPHQIHLGELHAILRRQEDFYPFLKDNREKIEKILTFRIPYYVGPLARGNSRFAWMTRKSEETITPWNFEEVVDKGASAQSFIERMTNFDKNLPNEKVLPKHSLLYEYFTVYNELTKVKYVTEGMRKPAFLSGEQKKAIVDLLFKTNRKVTVKQLKEDYFKKIECFDSVEISGVEDRFNASLGTYHDLLKIIKDKDFLDNEENEDILEDIVLTLTLFEDREMIEERLKTYAHLFDDKVMKQLKRRRYTGWGRLSRKLINGIRDKQSGKTILDFLKSDGFANRNFMQLIHDDSLTFKEDIQKAQVSGQGDSLHEHIANLAGSPAIKKGILQTVKVVDELVKVMGRHKPENIVIEMARENQTTQKGQKNSRERMKRIEEGIKELGSQILKEHPVENTQLQNEKLYLYYLQNGRDMYVDQELDINRLSDYDVDHIVPQSFLKDDSIDNKVLTRSDKARGKSDNVPSEEVVKKMKNYWRQLLNAKLITQRKFDNLTKAERGGLSELDKAGFIKRQLVETRQITKHVAQILDSRMNTKYDENDKLIREVKVITLKSKLVSDFRKDFQFYKVREINNYHHAHDAYLNAVVGTALIKKYPKLESEFVYGDYKVYDVRKMIAKSEQEIGKATAKYFFYSNIMNFFKTEITLANGEIRKRPLIETNGETGEIVWDKGRDFATVRKVLSMPQVNIVKKTEVQTGGFSKESILPKRNSDKLIARKKDWDPKKYGGFDSPTVAYSVLVVAKVEKGKSKKLKSVKELLGITIMERSSFEKNPIDFLEAKGYKEVKKDLIIKLPKYSLFELENGRKRMLASAGELQKGNELALPSKYVNFLYLASHYEKLKGSPEDNEQKQLFVEQHKHYLDEIIEQISEFSKRVILADANLDKVLSAYNKHRDKPIREQAENIIHLFTLTNLGAPAAFKYFDTTIDRKRYTSTKEVLDATLIHQSITGLYETRIDLSQLGGDGGEAAAKGGGGSEAAAKGGTLQLDDEYRLYSPLVKPDQNIQFWLEQFPQAWAETAGMGLAKQVPPQVIQLKASATPVSVRQYPLSKEAQEGIRPHVQRLIQQGILVPVQSPWNTPLLPVRKPGTNDYRPVQDLREVNKRVQDIHPTVPNPYNLLCALPPQRSWYTVLDLKDAFFCLRLHPTSQPLFAFEWRDPGTGRTGQLTWTRLPQGFKNSPTIFNEALHRDLANFRIQHPQVTLLQYVDDLLLAGATKQDCLEGTKALLLELSDLGYRASAKKAQICRREVTYLGYSLRDGQRWLTEARKKTVVQIPAPTTAKQVREFLGTAGFCRLWIPGFATLAAPLYPLTKPKGEFSWAPEHQKAFDAIKKALLSAPALALPDVTKPFTLYVDERKGVARGVLTQTLGPWRRPVAYLSKKLDPVASGWPVCLKAIAAVAILVKDADKLTLGQNITVIAPHALENIVRQPPDRWMTNARMTHYQSLLLTERVTFAPPAALNPATLLPEETDEPVTHDCHQLLIEETGVRKDLTDIPLTGEVLTWFTDGSSYVVEGKRMAGAAVVDGTRTIWASSLPEGTSAQKAELMALTQALRLAEGKSINIYTDSRYAFATAHVHGAIYKQRGWLTSAGREIKNKEEILSLLEALHLPKRLAIIHCPGHQKAKDPISRGNQMADRVAKQAAQGVNLLAGKRTADGSEFEKRTADGSEFESPKKKAKVE

SEQ ID NO: 343 - protein, 2087 aa, synthetic construct
MPAAKRVKLDGGDKKYSIGLDIGTNSVGWAVITDEYKVPSKKFKVLGNTDRHSIKKNLIGALLFDSGETAEATRLKRTARRRYTRRKNRICYLQEIFSNEMAKVDDSFFHRLEESFLVEEDKKHERHPIFGNIVDEVAYHEKYPTIYHLRKKLVDSTDKADLRLIYLALAHMIKFRGHFLIEGDLNPDNSDVDKLFIQLVQTYNQLFEENPINASGVDAKAILSARLSKSRRLENLIAQLPGEKKNGLFGNLIALSLGLTPNFKSNFDLAEDAKLQLSKDTYDDDLDNLLAQIGDQYADLFLAAKNLSDAILLSDILRVNTEITKAPLSASMIKRYDEHHQDLTLLKALVRQQLPEKYKEIFFDQSKNGYAGYIDGGASQEEFYKFIKPILEKMDGTEELLVKLNREDLLRKQRTFDNGSIPHQIHLGELHAILRRQEDFYPFLKDNREKIEKILTFRIPYYVGPLARGNSRFAWMTRKSEETITPWNFEEVVDKGASAQSFIERMTNFDKNLPNEKVLPKHSLLYEYFTVYNELTKVKYVTEGMRKPAFLSGEQKKAIVDLLFKTNRKVTVKQLKEDYFKKIECFDSVEISGVEDRFNASLGTYHDLLKIIKDKDFLDNEENEDILEDIVLTLTLFEDREMIEERLKTYAHLFDDKVMKQLKRRRYTGWGRLSRKLINGIRDKQSGKTILDFLKSDGFANRNFMQLIHDDSLTFKEDIQKAQVSGQGDSLHEHIANLAGSPAIKKGILQTVKVVDELVKVMGRHKPENIVIEMARENQTTQKGQKNSRERMKRIEEGIKELGSQILKEHPVENTQLQNEKLYLYYLQNGRDMYVDQELDINRLSDYDVDHIVPQSFLKDDSIDNKVLTRSDKARGKSDNVPSEEVVKKMKNYWRQLLNAKLITQRKFDNLTKAERGGLSELDKAGFIKRQLVETRQITKHVAQILDSRMNTKYDENDKLIREVKVITLKSKLVSDFRKDFQFYKVREINNYHHAHDAYLNAVVGTALIKKYPKLESEFVYGDYKVYDVRKMIAKSEQEIGKATAKYFFYSNIMNFFKTEITLANGEIRKRPLIETNGETGEIVWDKGRDFATVRKVLSMPQVNIVKKTEVQTGGFSKESILPKRNSDKLIARKKDWDPKKYGGFDSPTVAYSVLVVAKVEKGKSKKLKSVKELLGITIMERSSFEKNPIDFLEAKGYKEVKKDLIIKLPKYSLFELENGRKRMLASAGELQKGNELALPSKYVNFLYLASHYEKLKGSPEDNEQKQLFVEQHKHYLDEIIEQISEFSKRVILADANLDKVLSAYNKHRDKPIREQAENIIHLFTLTNLGAPAAFKYFDTTIDRKRYTSTKEVLDATLIHQSITGLYETRIDLSQLGGDGGEAAAKPAPGGTLQLDDEYRLYSPLVKPDQNIQFWLEQFPQAWAETAGMGLAKQVPPQVIQLKASATPVSVRQYPLSKEAQEGIRPHVQRLIQQGILVPVQSPWNTPLLPVRKPGTNDYRPVQDLREVNKRVQDIHPTVPNPYNLLCALPPQRSWYTVLDLKDAFFCLRLHPTSQPLFAFEWRDPGTGRTGQLTWTRLPQGFKNSPTIFNEALHRDLANFRIQHPQVTLLQYVDDLLLAGATKQDCLEGTKALLLELSDLGYRASAKKAQICRREVTYLGYSLRDGQRWLTEARKKTVVQIPAPTTAKQVREFLGTAGFCRLWIPGFATLAAPLYPLTKPKGEFSWAPEHQKAFDAIKKALLSAPALALPDVTKPFTLYVDERKGVARGVLTQTLGPWRRPVAYLSKKLDPVASGWPVCLKAIAAVAILVKDADKLTLGQNITVIAPHALENIVRQPPDRWMTNARMTHYQSLLLTERVTFAPPAALNPATLLPEETDEPVTHDCHQLLIEETGVRKDLTDIPLTGEVLTWFTDGSSYVVEGKRMAGAAVVDGTRTIWASSLPEGTSAQKAELMALTQALRLAEGKSINIYTDSRYAFATAHVHGAIYKQRGWLTSAGREIKNKEEILSLLEALHLPKRLAIIHCPGHQKAKDPISRGNQMADRVAKQAAQGVNLLAGKRTADGSEFEKRTADGSEFESPKKKAKVE

SEQ ID NO: 344 - protein, 2088 aa, synthetic construct; identical to SEQ ID NO: 131

SEQ ID NO: 345 - protein, 2085 aa, synthetic construct
MPAAKRVKLDGGDKKYSIGLDIGTNSVGWAVITDEYKVPSKKFKVLGNTDRHSIKKNLIGALLFDSGETAEATRLKRTARRRYTRRKNRICYLQEIFSNEMAKVDDSFFHRLEESFLVEEDKKHERHPIFGNIVDEVAYHEKYPTIYHLRKKLVDSTDKADLRLIYLALAHMIKFRGHFLIEGDLNPDNSDVDKLFIQLVQTYNQLFEENPINASGVDAKAILSARLSKSRRLENLIAQLPGEKKNGLFGNLIALSLGLTPNFKSNFDLAEDAKLQLSKDTYDDDLDNLLAQIGDQYADLFLAAKNLSDAILLSDILRVNTEITKAPLSASMIKRYDEHHQDLTLLKALVRQQLPEKYKEIFFDQSKNGYAGYIDGGASQEEFYKFIKPILEKMDGTEELLVKLNREDLLRKQRTFDNGSIPHQIHLGELHAILRRQEDFYPFLKDNREKIEKILTFRIPYYVGPLARGNSRFAWMTRKSEETITPWNFEEVVDKGASAQSFIERMTNFDKNLPNEKVLPKHSLLYEYFTVYNELTKVKYVTEGMRKPAFLSGEQKKAIVDLLFKTNRKVTVKQLKEDYFKKIECFDSVEISGVEDRFNASLGTYHDLLKIIKDKDFLDNEENEDILEDIVLTLTLFEDREMIEERLKTYAHLFDDKVMKQLKRRRYTGWGRLSRKLINGIRDKQSGKTILDFLKSDGFANRNFMQLIHDDSLTFKEDIQKAQVSGQGDSLHEHIANLAGSPAIKKGILQTVKVVDELVKVMGRHKPENIVIEMARENQTTQKGQKNSRERMKRIEEGIKELGSQILKEHPVENTQLQNEKLYLYYLQNGRDMYVDQELDINRLSDYDVDHIVPQSFLKDDSIDNKVLTRSDKARGKSDNVPSEEVVKKMKNYWRQLLNAKLITQRKFDNLTKAERGGLSELDKAGFIKRQLVETRQITKHVAQILDSRMNTKYDENDKLIREVKVITLKSKLVSDFRKDFQFYKVREINNYHHAHDAYLNAVVGTALIKKYPKLESEFVYGDYKVYDVRKMIAKSEQEIGKATAKYFFYSNIMNFFKTEITLANGEIRKRPLIETNGETGEIVWDKGRDFATVRKVLSMPQVNIVKKTEVQTGGFSKESILPKRNSDKLIARKKDWDPKKYGGFDSPTVAYSVLVVAKVEKGKSKKLKSVKELLGITIMERSSFEKNPIDFLEAKGYKEVKKDLIIKLPKYSLFELENGRKRMLASAGELQKGNELALPSKYVNFLYLASHYEKLKGSPEDNEQKQLFVEQHKHYLDEIIEQISEFSKRVILADANLDKVLSAYNKHRDKPIREQAENIIHLFTLTNLGAPAAFKYFDTTIDRKRYTSTKEVLDATLIHQSITGLYETRIDLSQLGGDGGGGSPAPGGTLQLDDEYRLYSPLVKPDQNIQFWLEQFPQAWAETAGMGLAKQVPPQVIQLKASATPVSVRQYPLSKEAQEGIRPHVQRLIQQGILVPVQSPWNTPLLPVRKPGTNDYRPVQDLREVNKRVQDIHPTVPNPYNLLCALPPQRSWYTVLDLKDAFFCLRLHPTSQPLFAFEWRDPGTGRTGQLTWTRLPQGFKNSPTIFNEALHRDLANFRIQHPQVTLLQYVDDLLLAGATKQDCLEGTKALLLELSDLGYRASAKKAQICRREVTYLGYSLRDGQRWLTEARKKTVVQIPAPTTAKQVREFLGTAGFCRLWIPGFATLAAPLYPLTKPKGEFSWAPEHQKAFDAIKKALLSAPALALPDVTKPFTLYVDERKGVARGVLTQTLGPWRRPVAYLSKKLDPVASGWPVCLKAIAAVAILVKDADKLTLGQNITVIAPHALENIVRQPPDRWMTNARMTHYQSLLLTERVTFAPPAALNPATLLPEETDEPVTHDCHQLLIEETGVRKDLTDIPLTGEVLTWFTDGSSYVVEGKRMAGAAVVDGTRTIWASSLPEGTSAQKAELMALTQALRLAEGKSINIYTDSRYAFATAHVHGAIYKQRGWLTSAGREIKNKEEILSLLEALHLPKRLAIIHCPGHQKAKDPISRGNQMADRVAKQAAQGVNLLAGKRTADGSEFEKRTADGSEFESPKKKAKVE

SEQ ID NO: 346 - protein, 2090 aa, synthetic construct
MPAAKRVKLDGGDKKYSIGLDIGTNSVGWAVITDEYKVPSKKFKVLGNTDRHSIKKNLIGALLFDSGETAEATRLKRTARRRYTRRKNRICYLQEIFSNEMAKVDDSFFHRLEESFLVEEDKKHERHPIFGNIVDEVAYHEKYPTIYHLRKKLVDSTDKADLRLIYLALAHMIKFRGHFLIEGDLNPDNSDVDKLFIQLVQTYNQLFEENPINASGVDAKAILSARLSKSRRLENLIAQLPGEKKNGLFGNLIALSLGLTPNFKSNFDLAEDAKLQLSKDTYDDDLDNLLAQIGDQYADLFLAAKNLSDAILLSDILRVNTEITKAPLSASMIKRYDEHHQDLTLLKALVRQQLPEKYKEIFFDQSKNGYAGYIDGGASQEEFYKFIKPILEKMDGTEELLVKLNREDLLRKQRTFDNGSIPHQIHLGELHAILRRQEDFYPFLKDNREKIEKILTFRIPYYVGPLARGNSRFAWMTRKSEETITPWNFEEVVDKGASAQSFIERMTNFDKNLPNEKVLPKHSLLYEYFTVYNELTKVKYVTEGMRKPAFLSGEQKKAIVDLLFKTNRKVTVKQLKEDYFKKIECFDSVEISGVEDRFNASLGTYHDLLKIIKDKDFLDNEENEDILEDIVLTLTLFEDREMIEERLKTYAHLFDDKVMKQLKRRRYTGWGRLSRKLINGIRDKQSGKTILDFLKSDGFANRNFMQLIHDDSLTFKEDIQKAQVSGQGDSLHEHIANLAGSPAIKKGILQTVKVVDELVKVMGRHKPENIVIEMARENQTTQKGQKNSRERMKRIEEGIKELGSQILKEHPVENTQLQNEKLYLYYLQNGRDMYVDQELDINRLSDYDVDHIVPQSFLKDDSIDNKVLTRSDKARGKSDNVPSEEVVKKMKNYWRQLLNAKLITQRKFDNLTKAERGGLSELDKAGFIKRQLVETRQITKHVAQILDSRMNTKYDENDKLIREVKVITLKSKLVSDFRKDFQFYKVREINNYHHAHDAYLNAVVGTALIKKYPKLESEFVYGDYKVYDVRKMIAKSEQEIGKATAKYFFYSNIMNFFKTEITLANGEIRKRPLIETNGETGEIVWDKGRDFATVRKVLSMPQVNIVKKTEVQTGGFSKESILPKRNSDKLIARKKDWDPKKYGGFDSPTVAYSVLVVAKVEKGKSKKLKSVKELLGITIMERSSFEKNPIDFLEAKGYKEVKKDLIIKLPKYSLFELENGRKRMLASAGELQKGNELALPSKYVNFLYLASHYEKLKGSPEDNEQKQLFVEQHKHYLDEIIEQISEFSKRVILADANLDKVLSAYNKHRDKPIREQAENIIHLFTLTNLGAPAAFKYFDTTIDRKRYTSTKEVLDATLIHQSITGLYETRIDLSQLGGDGGGGGPAPEAAAKGGTLQLDDEYRLYSPLVKPDQNIQFWLEQFPQAWAETAGMGLAKQVPPQVIQLKASATPVSVRQYPLSKEAQEGIRPHVQRLIQQGILVPVQSPWNTPLLPVRKPGTNDYRPVQDLREVNKRVQDIHPTVPNPYNLLCALPPQRSWYTVLDLKDAFFCLRLHPTSQPLFAFEWRDPGTGRTGQLTWTRLPQGFKNSPTIFNEALHRDLANFRIQHPQVTLLQYVDDLLLAGATKQDCLEGTKALLLELSDLGYRASAKKAQICRREVTYLGYSLRDGQRWLTEARKKTVVQIPAPTTAKQVREFLGTAGFCRLWIPGFATLAAPLYPLTKPKGEFSWAPEHQKAFDAIKKALLSAPALALPDVTKPFTLYVDERKGVARGVLTQTLGPWRRPVAYLSKKLDPVASGWPVCLKAIAAVAILVKDADKLTLGQNITVIAPHALENIVRQPPDRWMTNARMTHYQSLLLTERVTFAPPAALNPATLLPEETDEPVTHDCHQLLIEETGVRKDLTDIPLTGEVLTWFTDGSSYVVEGKRMAGAAVVDGTRTIWASSLPEGTSAQKAELMALTQALRLAEGKSINIYTDSRYAFATAHVHGAIYKQRGWLTSAGREIKNKEEILSLLEALHLPKRLAIIHCPGHQKAKDPISRGNQMADRVAKQAAQGVNLLAGKRTADGSEFEKRTADGSEFESPKKKAKVE

SEQ ID NO: 347 - protein, 2082 aa, synthetic construct; identical to SEQ ID NO: 177

SEQ ID NO: 348 - protein, 2090 aa, synthetic construct
MPAAKRVKLDGGDKKYSIGLDIGTNSVGWAVITDEYKVPSKKFKVLGNTDRHSIKKNLIGALLFDSGETAEATRLKRTARRRYTRRKNRICYLQEIFSNEMAKVDDSFFHRLEESFLVEEDKKHERHPIFGNIVDEVAYHEKYPTIYHLRKKLVDSTDKADLRLIYLALAHMIKFRGHFLIEGDLNPDNSDVDKLFIQLVQTYNQLFEENPINASGVDAKAILSARLSKSRRLENLIAQLPGEKKNGLFGNLIALSLGLTPNFKSNFDLAEDAKLQLSKDTYDDDLDNLLAQIGDQYADLFLAAKNLSDAILLSDILRVNTEITKAPLSASMIKRYDEHHQDLTLLKALVRQQLPEKYKEIFFDQSKNGYAGYIDGGASQEEFYKFIKPILEKMDGTEELLVKLNREDLLRKQRTFDNGSIPHQIHLGELHAILRRQEDFYPFLKDNREKIEKILTFRIPYYVGPLARGNSRFAWMTRKSEETITPWNFEEVVDKGASAQSFIERMTNFDKNLPNEKVLPKHSLLYEYFTVYNELTKVKYVTEGMRKPAFLSGEQKKAIVDLLFKTNRKVTVKQLKEDYFKKIECFDSVEISGVEDRFNASLGTYHDLLKIIKDKDFLDNEENEDILEDIVLTLTLFEDREMIEERLKTYAHLFDDKVMKQLKRRRYTGWGRLSRKLINGIRDKQSGKTILDFLKSDGFANRNFMQLIHDDSLTFKEDIQKAQVSGQGDSLHEHIANLAGSPAIKKGILQTVKVVDELVKVMGRHKPENIVIEMARENQTTQKGQKNSRERMKRIEEGIKELGSQILKEHPVENTQLQNEKLYLYYLQNGRDMYVDQELDINRLSDYDVDHIVPQSFLKDDSIDNKVLTRSDKARGKSDNVPSEEVVKKMKNYWRQLLNAKLITQRKFDNLTKAERGGLSELDKAGFIKRQLVETRQITKHVAQILDSRMNTKYDENDKLIREVKVITLKSKLVSDFRKDFQFYKVREINNYHHAHDAYLNAVVGTALIKKYPKLESEFVYGDYKVYDVRKMIAKSEQEIGKATAKYFFYSNIMNFFKTEITLANGEIRKRPLIETNGETGEIVWDKGRDFATVRKVLSMPQVNIVKKTEVQTGGFSKESILPKRNSDKLIARKKDWDPKKYGGFDSPTVAYSVLVVAKVEKGKSKKLKSVKELLGITIMERSSFEKNPIDFLEAKGYKEVKKDLIIKLPKYSLFELENGRKRMLASAGELQKGNELALPSKYVNFLYLASHYEKLKGSPEDNEQKQLFVEQHKHYLDEIIEQISEFSKRVILADANLDKVLSAYNKHRDKPIREQAENIIHLFTLTNLGAPAAFKYFDTTIDRKRYTSTKEVLDATLIHQSITGLYETRIDLSQLGGDGGEAAAKGGGPAPGGTLQLDDEYRLYSPLVKPDQNIQFWLEQFPQAWAETAGMGLAKQVPPQVIQLKASATPVSVRQYPLSKEAQEGIRPHVQRLIQQGILVPVQSPWNTPLLPVRKPGTNDYRPVQDLREVNKRVQDIHPTVPNPYNLLCALPPQRSWYTVLDLKDAFFCLRLHPTSQPLFAFEWRDPGTGRTGQLTWTRLPQGFKNSPTIFNEALHRDLANFRIQHPQVTLLQYVDDLLLAGATKQDCLEGTKALLLELSDLGYRASAKKAQICRREVTYLGYSLRDGQRWLTEARKKTVVQIPAPTTAKQVREFLGTAGFCRLWIPGFATLAAPLYPLTKPKGEFSWAPEHQKAFDAIKKALLSAPALALPDVTKPFTLYVDERKGVARGVLTQTLGPWRRPVAYLSKKLDPVASGWPVCLKAIAAVAILVKDADKLTLGQNITVIAPHALENIVRQPPDRWMTNARMTHYQSLLLTERVTFAPPAALNPATLLPEETDEPVTHDCHQLLIEETGVRKDLTDIPLTGEVLTWFTDGSSYVVEGKRMAGAAVVDGTRTIWASSLPEGTSAQKAELMALTQALRLAEGKSINIYTDSRYAFATAHVHGAIYKQRGWLTSAGREIKNKEEILSLLEALHLPKRLAIIHCPGHQKAKDPISRGNQMADRVAKQAAQGVNLLAGKRTADGSEFEKRTADGSEFESPKKKAKVE

SEQ ID NO: 349 - protein, 2090 aa, synthetic construct; identical to SEQ ID NO: 136

SEQ ID NO: 350 - protein, 2090 aa, synthetic construct; identical to SEQ ID NO: 115

SEQ ID NO: 351 - protein, 2099 aa, synthetic construct; identical to SEQ ID NO: 137

SEQ ID NO: 352 - protein, 2090 aa, synthetic construct
MPAAKRVKLDGGDKKYSIGLDIGTNSVGWAVITDEYKVPSKKFKVLGNTDRHSIKKNLIGALLFDSGETAEATRLKRTARRRYTRRKNRICYLQEIFSNEMAKVDDSFFHRLEESFLVEEDKKHERHPIFGNIVDEVAYHEKYPTIYHLRKKLVDSTDKADLRLIYLALAHMIKFRGHFLIEGDLNPDNSDVDKLFIQLVQTYNQLFEENPINASGVDAKAILSARLSKSRRLENLIAQLPGEKKNGLFGNLIALSLGLTPNFKSNFDLAEDAKLQLSKDTYDDDLDNLLAQIGDQYADLFLAAKNLSDAILLSDILRVNTEITKAPLSASMIKRYDEHHQDLTLLKALVRQQLPEKYKEIFFDQSKNGYAGYIDGGASQEEFYKFIKPILEKMDGTEELLVKLNREDLLRKQRTFDNGSIPHQIHLGELHAILRRQEDFYPFLKDNREKIEKILTFRIPYYVGPLARGNSRFAWMTRKSEETITPWNFEEVVDKGASAQSFIERMTNFDKNLPNEKVLPKHSLLYEYFTVYNELTKVKYVTEGMRKPAFLSGEQKKAIVDLLFKTNRKVTVKQLKEDYFKKIECFDSVEISGVEDRFNASLGTYHDLLKIIKDKDFLDNEENEDILEDIVLTLTLFEDREMIEERLKTYAHLFDDKVMKQLKRRRYTGWGRLSRKLINGIRDKQSGKTILDFLKSDGFANRNFMQLIHDDSLTFKEDIQKAQVSGQGDSLHEHIANLAGSPAIKKGILQTVKVVDELVKVMGRHKPENIVIEMARENQTTQKGQKNSRERMKRIEEGIKELGSQILKEHPVENTQLQNEKLYLYYLQNGRDMYVDQELDINRLSDYDVDHIVPQSFLKDDSIDNKVLTRSDKARGKSDNVPSEEVVKKMKNYWRQLLNAKLITQRKFDNLTKAERGGLSELDKAGFIKRQLVETRQITKHVAQILDSRMNTKYDENDKLIREVKVITLKSKLVSDFRKDFQFYKVREINNYHHAHDAYLNAVVGTALIKKYPKLESEFVYGDYKVYDVRKMIAKSEQEIGKATAKYFFYSNIMNFFKTEITLANGEIRKRPLIETNGETGEIVWDKGRDFATVRKVLSMPQVNIVKKTEVQTGGFSKESILPKRNSDKLIARKKDWDPKKYGGFDSPTVAYSVLVVAKVEKGKSKKLKSVKELLGITIMERSSFEKNPIDFLEAKGYKEVKKDLIIKLPKYSLFELENGRKRMLASAGELQKGNELALPSKYVNFLYLASHYEKLKGSPEDNEQKQLFVEQHKHYLDEIIEQISEFSKRVILADANLDKVLSAYNKHRDKPIREQAENIIHLFTLTNLGAPAAFKYFDTTIDRKRYTSTKEVLDATLIHQSITGLYETRIDLSQLGGDGGGGSEAAAKGGGGGTLQLDDEYRLYSPLVKPDQNIQFWLEQFPQAWAETAGMGLAKQVPPQVIQLKASATPVSVRQYPLSKEAQEGIRPHVQRLIQQGILVPVQSPWNTPLLPVRKPGTNDYRPVQDLREVNKRVQDIHPTVPNPYNLLCALPPQRSWYTVLDLKDAFFCLRLHPTSQPLFAFEWRDPGTGRTGQLTWTRLPQGFKNSPTIFNEALHRDLANFRIQHPQVTLLQYVDDLLLAGATKQDCLEGTKALLLELSDLGYRASAKKAQICRREVTYLGYSLRDGQRWLTEARKKTVVQIPAPTTAKQVREFLGTAGFCRLWIPGFATLAAPLYPLTKPKGEFSWAPEHQKAFDAIKKALLSAPALALPDVTKPFTLYVDERKGVARGVLTQTLGPWRRPVAYLSKKLDPVASGWPVCLKAIAAVAILVKDADKLTLGQNITVIAPHALENIVRQPPDRWMTNARMTHYQSLLLTERVTFAPPAALNPATLLPEETDEPVTHDCHQLLIEETGVRKDLTDIPLTGEVLTWFTDGSSYVVEGKRMAGAAVVDGTRTIWASSLPEGTSAQKAELMALTQALRLAEGKSINIYTDSRYAFATAHVHGAIYKQRGWLTSAGREIKNKEEILSLLEALHLPKRLAIIHCPGHQKAKDPISRGNQMADRVAKQAAQGVNLLAGKRTADGSEFEKRTADGSEFESPKKKAKVE

SEQ ID NO: 353 - protein, 2085 aa, synthetic construct; identical to SEQ ID NO: 183

SEQ ID NO: 354 - protein, 2090 aa, synthetic construct
MPAAKRVKLDGGDKKYSIGLDIGTNSVGWAVITDEYKVPSKKFKVLGNTDRHSIKKNLIGALLFDSGETAEATRLKRTARRRYTRRKNRICYLQEIFSNEMAKVDDSFFHRLEESFLVEEDKKHERHPIFGNIVDEVAYHEKYPTIYHLRKKLVDSTDKADLRLIYLALAHMIKFRGHFLIEGDLNPDNSDVDKLFIQLVQTYNQLFEENPINASGVDAKAILSARLSKSRRLENLIAQLPGEKKNGLFGNLIALSLGLTPNFKSNFDLAEDAKLQLSKDTYDDDLDNLLAQIGDQYADLFLAAKNLSDAILLSDILRVNTEITKAPLSASMIKRYDEHHQDLTLLKALVRQQLPEKYKEIFFDQSKNGYAGYIDGGASQEEFYKFIKPILEKMDGTEELLVKLNREDLLRKQRTFDNGSIPHQIHLGELHAILRRQEDFYPFLKDNREKIEKILTFRIPYYVGPLARGNSRFAWMTRKSEETITPWNFEEVVDKGASAQSFIERMTNFDKNLPNEKVLPKHSLLYEYFTVYNELTKVKYVTEGMRKPAFLSGEQKKAIVDLLFKTNRKVTVKQLKEDYFKKIECFDSVEISGVEDRFNASLGTYHDLLKIIKDKDFLDNEENEDILEDIVLTLTLFEDREMIEERLKTYAHLFDDKVMKQLKRRRYTGWGRLSRKLINGIRDKQSGKTILDFLKSDGFANRNFMQLIHDDSLTFKEDIQKAQVSGQGDSLHEHIANLAGSPAIKKGILQTVKVVDELVKVMGRHKPENIVIEMARENQTTQKGQKNSRERMKRIEEGIKELGSQILKEHPVENTQLQNEKLYLYYLQNGRDMYVDQELDINRLSDYDVDHIVPQSFLKDDSIDNKVLTRSDKARGKSDNVPSEEVVKKMKNYWRQLLNAKLITQRKFDNLTKAERGGLSELDKAGFIKRQLVETRQITKHVAQILDSRMNTKYDENDKLIREVKVITLKSKLVSDFRKDFQFYKVREINNYHHAHDAYLNAVVGTALIKKYPKLESEFVYGDYKVYDVRKMIAKSEQEIGKATAKYFFYSNIMNFFKTEITLANGEIRKRPLIETNGETGEIVWDKGRDFATVRKVLSMPQVNIVKKTEVQTGGFSKESILPKRNSDKLIARKKDWDPKKYGGFDSPTVAYSVLVVAKVEKGKSKKLKSVKELLGITIMERSSFEKNPIDFLEAKGYKEVKKDLIIKLPKYSLFELENGRKRMLASAGELQKGNELALPSKYVNFLYLASHYEKLKGSPEDNEQKQLFVEQHKHYLDEIIEQISEFSKRVILADANLDKVLSAYNKHRDKPIREQAENIIHLFTLTNLGAPAAFKYFDTTIDRKRYTSTKEVLDATLIHQSITGLYETRIDLSQLGGDGGEAAAKGGGGGSGGTLQLDDEYRLYSPLVKPDQNIQFWLEQFPQAWAETAGMGLAKQVPPQVIQLKASATPVSVRQYPLSKEAQEGIRPHVQRLIQQGILVPVQSPWNTPLLPVRKPGTNDYRPVQDLREVNKRVQDIHPTVPNPYNLLCALPPQRSWYTVLDLKDAFFCLRLHPTSQPLFAFEWRDPGTGRTGQLTWTRLPQGFKNSPTIFNEALHRDLANFRIQHPQVTLLQYVDDLLLAGATKQDCLEGTKALLLELSDLGYRASAKKAQICRREVTYLGYSLRDGQRWLTEARKKTVVQIPAPTTAKQVREFLGTAGFCRLWIPGFATLAAPLYPLTKPKGEFSWAPEHQKAFDAIKKALLSAPALALPDVTKPFTLYVDERKGVARGVLTQTLGPWRRPVAYLSKKLDPVASGWPVCLKAIAAVAILVKDADKLTLGQNITVIAPHALENIVRQPPDRWMTNARMTHYQSLLLTERVTFAPPAALNPATLLPEETDEPVTHDCHQLLIEETGVRKDLTDIPLTGEVLTWFTDGSSYVVEGKRMAGAAVVDGTRTIWASSLPEGTSAQKAELMALTQALRLAEGKSINIYTDSRYAFATAHVHGAIYKQRGWLTSAGREIKNKEEILSLLEALHLPKRLAIIHCPGHQKAKDPISRGNQMADRVAKQAAQGVNLLAGKRTADGSEFEKRTADGSEFESPKKKAKVE

SEQ ID NO: 355 - protein, 2099 aa, synthetic construct
MPAAKRVKLDGGDKKYSIGLDIGTNSVGWAVITDEYKVPSKKFKVLGNTDRHSIKKNLIGALLFDSGETAEATRLKRTARRRYTRRKNRICYLQEIFSNEMAKVDDSFFHRLEESFLVEEDKKHERHPIFGNIVDEVAYHEKYPTIYHLRKKLVDSTDKADLRLIYLALAHMIKFRGHFLIEGDLNPDNSDVDKLFIQLVQTYNQLFEENPINASGVDAKAILSARLSKSRRLENLIAQLPGEKKNGLFGNLIALSLGLTPNFKSNFDLAEDAKLQLSKDTYDDDLDNLLAQIGDQYADLFLAAKNLSDAILLSDILRVNTEITKAPLSASMIKRYDEHHQDLTLLKALVRQQLPEKYKEIFFDQSKNGYAGYIDGGASQEEFYKFIKPILEKMDGTEELLVKLNREDLLRKQRTFDNGSIPHQIHLGELHAILRRQEDFYPFLKDNREKIEKILTFRIPYYVGPLARGNSRFAWMTRKSEETITPWNFEEVVDKGASAQSFIERMTNFDKNLPNEKVLPKHSLLYEYFTVYNELTKVKYVTEGMRKPAFLSGEQKKAIVDLLFKTNRKVTVKQLKEDYFKKIECFDSVEISGVEDRFNASLGTYHDLLKIIKDKDFLDNEENEDILEDIVLTLTLFEDREMIEERLKTYAHLFDDKVMKQLKRRRYTGWGRLSRKLINGIRDKQSGKTILDFLKSDGFANRNFMQLIHDDSLTFKEDIQKAQVSGQGDSLHEHIANLAGSPAIKKGILQTVKVVDELVKVMGRHKPENIVIEMARENQTTQKGQKNSRERMKRIEEGIKELGSQILKEHPVENTQLQNEKLYLYYLQNGRDMYVDQELDINRLSDYDVDHIVPQSFLKDDSIDNKVLTRSDKARGKSDNVPSEEVVKKMKNYWRQLLNAKLITQRKFDNLTKAERGGLSELDKAGFIKRQLVETRQITKHVAQILDSRMNTKYDENDKLIREVKVITLKSKLVSDFRKDFQFYKVREINNYHHAHDAYLNAVVGTALIKKYPKLESEFVYGDYKVYDVRKMIAKSEQEIGKATAKYFFYSNIMNFFKTEITLANGEIRKRPLIETNGETGEIVWDKGRDFATVRKVLSMPQVNIVKKTEVQTGGFSKESILPKRNSDKLIARKKDWDPKKYGGFDSPTVAYSVLVVAKVEKGKSKKLKSVKELLGITIMERSSFEKNPIDFLEAKGYKEVKKDLIIKLPKYSLFELENGRKRMLASAGELQKGNELALPSKYVNFLYLASHYEKLKGSPEDNEQKQLFVEQHKHYLDEIIEQISEFSKRVILADANLDKVLSAYNKHRDKPIREQAENIIHLFTLTNLGAPAAFKYFDTTIDRKRYTSTKEVLDATLIHQSITGLYETRIDLSQLGGDGGGGGGSGGGGSGGGGSGGGGSGGTLQLDDEYRLYSPLVKPDQNIQFWLEQFPQAWAETAGMGLAKQVPPQVIQLKASATPVSVRQYPLSKEAQEGIRPHVQRLIQQGILVPVQSPWNTPLLPVRKPGTNDYRPVQDLREVNKRVQDIHPTVPNPYNLLCALPPQRSWYTVLDLKDAFFCLRLHPTSQPLFAFEWRDPGTGRTGQLTWTRLPQGFKNSPTIFNEALHRDLANFRIQHPQVTLLQYVDDLLLAGATKQDCLEGTKALLLELSDLGYRASAKKAQICRREVTYLGYSLRDGQRWLTEARKKTVVQIPAPTTAKQVREFLGTAGFCRLWIPGFATLAAPLYPLTKPKGEFSWAPEHQKAFDAIKKALLSAPALALPDVTKPFTLYVDERKGVARGVLTQTLGPWRRPVAYLSKKLDPVASGWPVCLKAIAAVAILVKDADKLTLGQNITVIAPHALENIVRQPPDRWMTNARMTHYQSLLLTERVTFAPPAALNPATLLPEETDEPVTHDCHQLLIEETGVRKDLTDIPLTGEVLTWFTDGSSYVVEGKRMAGAAVVDGTRTIWASSLPEGTSAQKAELMALTQALRLAEGKSINIYTDSRYAFATAHVHGAIYKQRGWLTSAGREIKNKEEILSLLEALHLPKRLAIIHCPGHQKAKDPISRGNQMADRVAKQAAQGVNLLAGKRTADGSEFEKRTADGSEFESPKKKAKVE

SEQ ID NO: 356 - protein, 2085 aa, synthetic construct; identical to SEQ ID NO: 125

SEQ ID NO: 357 - protein, 2091 aa, synthetic construct
MPAAKRVKLDGGDKKYSIGLDIGTNSVGWAVITDEYKVPSKKFKVLGNTDRHSIKKNLIGALLFDSGETAEATRLKRTARRRYTRRKNRICYLQEIFSNEMAKVDDSFFHRLEESFLVEEDKKHERHPIFGNIVDEVAYHEKYPTIYHLRKKLVDSTDKADLRLIYLALAHMIKFRGHFLIEGDLNPDNSDVDKLFIQLVQTYNQLFEENPINASGVDAKAILSARLSKSRRLENLIAQLPGEKKNGLFGNLIALSLGLTPNFKSNFDLAEDAKLQLSKDTYDDDLDNLLAQIGDQYADLFLAAKNLSDAILLSDILRVNTEITKAPLSASMIKRYDEHHQDLTLLKALVRQQLPEKYKEIFFDQSKNGYAGYIDGGASQEEFYKFIKPILEKMDGTEELLVKLNREDLLRKQRTFDNGSIPHQIHLGELHAILRRQEDFYPFLKDNREKIEKILTFRIPYYVGPLARGNSRFAWMTRKSEETITPWNFEEVVDKGASAQSFIERMTNFDKNLPNEKVLPKHSLLYEYFTVYNELTKVKYVTEGMRKPAFLSGEQKKAIVDLLFKTNRKVTVKQLKEDYFKKIECFDSVEISGVEDRFNASLGTYHDLLKIIKDKDFLDNEENEDILEDIVLTLTLFEDREMIEERLKTYAHLFDDKVMKQLKRRRYTGWGRLSRKLINGIRDKQSGKTILDFLKSDGFANRNFMQLIHDDSLTFKEDIQKAQVSGQGDSLHEHIANLAGSPAIKKGILQTVKVVDELVKVMGRHKPENIVIEMARENQTTQKGQKNSRERMKRIEEGIKELGSQILKEHPVENTQLQNEKLYLYYLQNGRDMYVDQELDINRLSDYDVDHIVPQSFLKDDSIDNKVLTRSDKARGKSDNVPSEEVVKKMKNYWRQLLNAKLITQRKFDNLTKAERGGLSELDKAGFIKRQLVETRQITKHVAQILDSRMNTKYDENDKLIREVKVITLKSKLVSDFRKDFQFYKVREINNYHHAHDAYLNAVVGTALIKKYPKLESEFVYGDYKVYDVRKMIAKSEQEIGKATAKYFFYSNIMNFFKTEITLANGEIRKRPLIETNGETGEIVWDKGRDFATVRKVLSMPQVNIVKKTEVQTGGFSKESILPKRNSDKLIARKKDWDPKKYGGFDSPTVAYSVLVVAKVEKGKSKKLKSVKELLGITIMERSSFEKNPIDFLEAKGYKEVKKDLIIKLPKYSLFELENGRKRMLASAGELQKGNELALPSKYVNFLYLASHYEKLKGSPEDNEQKQLFVEQHKHYLDEIIEQISEFSKRVILADANLDKVLSAYNKHRDKPIREQAENIIHLFTLTNLGAPAAFKYFDTTIDRKRYTSTKEVLDATLIHQSITGLYETRIDLSQLGGDGGGSSGSSGSSGSSGGTLQLDDEYRLYSPLVKPDQNIQFWLEQFPQAWAETAGMGLAKQVPPQVIQLKASATPVSVRQYPLSKEAQEGIRPHVQRLIQQGILVPVQSPWNTPLLPVRKPGTNDYRPVQDLREVNKRVQDIHPTVPNPYNLLCALPPQRSWYTVLDLKDAFFCLRLHPTSQPLFAFEWRDPGTGRTGQLTWTRLPQGFKNSPTIFNEALHRDLANFRIQHPQVTLLQYVDDLLLAGATKQDCLEGTKALLLELSDLGYRASAKKAQICRREVTYLGYSLRDGQRWLTEARKKTVVQIPAPTTAKQVREFLGTAGFCRLWIPGFATLAAPLYPLTKPKGEFSWAPEHQKAFDAIKKALLSAPALALPDVTKPFTLYVDERKGVARGVLTQTLGPWRRPVAYLSKKLDPVASGWPVCLKAIAAVAILVKDADKLTLGQNITVIAPHALENIVRQPPDRWMTNARMTHYQSLLLTERVTFAPPAALNPATLLPEETDEPVTHDCHQLLIEETGVRKDLTDIPLTGEVLTWFTDGSSYVVEGKRMAGAAVVDGTRTIWASSLPEGTSAQKAELMALTQALRLAEGKSINIYTDSRYAFATAHVHGAIYKQRGWLTSAGREIKNKEEILSLLEALHLPKRLAIIHCPGHQKAKDPISRGNQMADRVAKQAAQGVNLLAGKRTADGSEFEKRTADGSEFESPKKKAKVE

SEQ ID NO: 358 - protein, 2090 aa, synthetic construct
MPAAKRVKLDGGDKKYSIGLDIGTNSVGWAVITDEYKVPSKKFKVLGNTDRHSIKKNLIGALLFDSGETAEATRLKRTARRRYTRRKNRICYLQEIFSNEMAKVDDSFFHRLEESFLVEEDKKHERHPIFGNIVDEVAYHEKYPTIYHLRKKLVDSTDKADLRLIYLALAHMIKFRGHFLIEGDLNPDNSDVDKLFIQLVQTYNQLFEENPINASGVDAKAILSARLSKSRRLENLIAQLPGEKKNGLFGNLIALSLGLTPNFKSNFDLAEDAKLQLSKDTYDDDLDNLLAQIGDQYADLFLAAKNLSDAILLSDILRVNTEITKAPLSASMIKRYDEHHQDLTLLKALVRQQLPEKYKEIFFDQSKNGYAGYIDGGASQEEFYKFIKPILEKMDGTEELLVKLNREDLLRKQRTFDNGSIPHQIHLGELHAILRRQEDFYPFLKDNREKIEKILTFRIPYYVGPLARGNSRFAWMTRKSEETITPWNFEEVVDKGASAQSFIERMTNFDKNLPNEKVLPKHSLLYEYFTVYNELTKVKYVTEGMRKPAFLSGEQKKAIVDLLFKTNRKVTVKQLKEDYFKKIECFDSVEISGVEDRFNASLGTYHDLLKIIKDKDFLDNEENEDILEDIVLTLTLFEDREMIEERLKTYAHLFDDKVMKQLKRRRYTGWGRLSRKLINGIRDKQSGKTILDFLKSDGFANRNFMQLIHDDSLTFKEDIQKAQVSGQGDSLHEHIANLAGSPAIKKGILQTVKVVDELVKVMGRHKPENIVIEMARENQTTQKGQKNSRERMKRIEEGIKELGSQILKEHPVENTQLQNEKLYLYYLQNGRDMYVDQELDINRLSDYDVDHIVPQSFLKDDSIDNKVLTRSDKARGKSDNVPSEEVVKKMKNYWRQLLNAKLITQRKFDNLTKAERGGLSELDKAGFIKRQLVETRQITKHVAQILDSRMNTKYDENDKLIREVKVITLKSKLVSDFRKDFQFYKVREINNYHHAHDAYLNAVVGTALIKKYPKLESEFVYGDYKVYDVRKMIAKSEQEIGKATAKYFFYSNIMNFFKTEITLANGEIRKRPLIETNGETGEIVWDKGRDFATVRKVLSMPQVNIVKKTEVQTGGFSKESILPKRNSDKLIARKKDWDPKKYGGFDSPTVAYSVLVVAKVEKGKSKKLKSVKELLGITIMERSSFEKNPIDFLEAKGYKEVKKDLIIKLPKYSLFELENGRKRMLASAGELQKGNELALPSKYVNFLYLASHYEKLKGSPEDNEQKQLFVEQHKHYLDEIIEQISEFSKRVILADANLDKVLSAYNKHRDKPIREQAENIIHLFTLTNLGAPAAFKYFDTTIDRKRYTSTKEVLDATLIHQSITGLYETRIDLSQLGGDGGEAAAKPAPGGGGGTLQLDDEYRLYSPLVKPDQNIQFWLEQFPQAWAETAGMGLAKQVPPQVIQLKASATPVSVRQYPLSKEAQEGIRPHVQRLIQQGILVPVQSPWNTPLLPVRKPGTNDYRPVQDLREVNKRVQDIHPTVPNPYNLLCALPPQRSWYTVLDLKDAFFCLRLHPTSQPLFAFEWRDPGTGRTGQLTWTRLPQGFKNSPTIFNEALHRDLANFRIQHPQVTLLQYVDDLLLAGATKQDCLEGTKALLLELSDLGYRASAKKAQICRREVTYLGYSLRDGQRWLTEARKKTVVQIPAPTTAKQVREFLGTAGFCRLWIPGFATLAAPLYPLTKPKGEFSWAPEHQKAFDAIKKALLSAPALALPDVTKPFTLYVDERKGVARGVLTQTLGPWRRPVAYLSKKLDPVASGWPVCLKAIAAVAILVKDADKLTLGQNITVIAPHALENIVRQPPDRWMTNARMTHYQSLLLTERVTFAPPAALNPATLLPEETDEPVTHDCHQLLIEETGVRKDLTDIPLTGEVLTWFTDGSSYVVEGKRMAGAAVVDGTRTIWASSLPEGTSAQKAELMALTQALRLAEGKSINIYTDSRYAFATAHVHGAIYKQRGWLTSAGREIKNKEEILSLLEALHLPKRLAIIHCPGHQKAKDPISRGNQMADRVAKQAAQGVNLLAGKRTADGSEFEKRTADGSEFESPKKKAKVE

SEQ ID NO: 359 - protein, 2088 aa, synthetic construct; identical to SEQ ID NO: 175

SEQ ID NO: 360 - protein, 2087 aa, synthetic construct
MPAAKRVKLDGGDKKYSIGLDIGTNSVGWAVITDEYKVPSKKFKVLGNTDRHSIKKNLIGALLFDSGETAEATRLKRTARRRYTRRKNRICYLQEIFSNEMAKVDDSFFHRLEESFLVEEDKKHERHPIFGNIVDEVAYHEKYPTIYHLRKKLVDSTDKADLRLIYLALAHMIKFRGHFLIEGDLNPDNSDVDKLFIQLVQTYNQLFEENPINASGVDAKAILSARLSKSRRLENLIAQLPGEKKNGLFGNLIALSLGLTPNFKSNFDLAEDAKLQLSKDTYDDDLDNLLAQIGDQYADLFLAAKNLSDAILLSDILRVNTEITKAPLSASMIKRYDEHHQDLTLLKALVRQQLPEKYKEIFFDQSKNGYAGYIDGGASQEEFYKFIKPILEKMDGTEELLVKLNREDLLRKQRTFDNGSIPHQIHLGELHAILRRQEDFYPFLKDNREKIEKILTFRIPYYVGPLARGNSRFAWMTRKSEETITPWNFEEVVDKGASAQSFIERMTNFDKNLPNEKVLPKHSLLYEYFTVYNELTKVKYVTEGMRKPAFLSGEQKKAIVDLLFKTNRKVTVKQLKEDYFKKIECFDSVEISGVEDRFNASLGTYHDLLKIIKDKDFLDNEENEDILEDIVLTLTLFEDREMIEERLKTYAHLFDDKVMKQLKRRRYTGWGRLSRKLINGIRDKQSGKTILDFLKSDGFANRNFMQLIHDDSLTFKEDIQKAQVSGQGDSLHEHIANLAGSPAIKKGILQTVKVVDELVKVMGRHKPENIVIEMARENQTTQKGQKNSRERMKRIEEGIKELGSQILKEHPVENTQLQNEKLYLYYLQNGRDMYVDQELDINRLSDYDVDHIVPQSFLKDDSIDNKVLTRSDKARGKSDNVPSEEVVKKMKNYWRQLLNAKLITQRKFDNLTKAERGGLSELDKAGFIKRQLVETRQITKHVAQILDSRMNTKYDENDKLIREVKVITLKSKLVSDFRKDFQFYKVREINNYHHAHDAYLNAVVGTALIKKYPKLESEFVYGDYKVYDVRKMIAKSEQEIGKATAKYFFYSNIMNFFKTEITLANGEIRKRPLIETNGETGEIVWDKGRDFATVRKVLSMPQVNIVKKTEVQTGGFSKESILPKRNSDKLIARKKDWDPKKYGGFDSPTVAYSVLVVAKVEKGKSKKLKSVKELLGITIMERSSFEKNPIDFLEAKGYKEVKKDLIIKLPKYSLFELENGRKRMLASAGELQKGNELALPSKYVNFLYLASHYEKLKGSPEDNEQKQLFVEQHKHYLDEIIEQISEFSKRVILADANLDKVLSAYNKHRDKPIREQAENIIHLFTLTNLGAPAAFKYFDTTIDRKRYTSTKEVLDATLIHQSITGLYETRIDLSQLGGDGGEAAAKGSSGGTLQLDDEYRLYSPLVKPDQNIQFWLEQFPQAWAETAGMGLAKQVPPQVIQLKASATPVSVRQYPLSKEAQEGIRPHVQRLIQQGILVPVQSPWNTPLLPVRKPGTNDYRPVQDLREVNKRVQDIHPTVPNPYNLLCALPPQRSWYTVLDLKDAFFCLRLHPTSQPLFAFEWRDPGTGRTGQLTWTRLPQGFKNSPTIFNEALHRDLANFRIQHPQVTLLQYVDDLLLAGATKQDCLEGTKALLLELSDLGYRASAKKAQICRREVTYLGYSLRDGQRWLTEARKKTVVQIPAPTTAKQVREFLGTAGFCRLWIPGFATLAAPLYPLTKPKGEFSWAPEHQKAFDAIKKALLSAPALALPDVTKPFTLYVDERKGVARGVLTQTLGPWRRPVAYLSKKLDPVASGWPVCLKAIAAVAILVKDADKLTLGQNITVIAPHALENIVRQPPDRWMTNARMTHYQSLLLTERVTFAPPAALNPATLLPEETDEPVTHDCHQLLIEETGVRKDLTDIPLTGEVLTWFTDGSSYVVEGKRMAGAAVVDGTRTIWASSLPEGTSAQKAELMALTQALRLAEGKSINIYTDSRYAFATAHVHGAIYKQRGWLTSAGREIKNKEEILSLLEALHLPKRLAIIHCPGHQKAKDPISRGNQMADRVAKQAAQGVNLLAGKRTADGSEFEKRTADGSEFESPKKKAKVE

SEQ ID NO: 361 - protein, 2090 aa, synthetic construct
MPAAKRVKLDGGDKKYSIGLDIGTNSVGWAVITDEYKVPSKKFKVLGNTDRHSIKKNLIGALLFDSGETAEATRLKRTARRRYTRRKNRICYLQEIFSNEMAKVDDSFFHRLEESFLVEEDKKHERHPIFGNIVDEVAYHEKYPTIYHLRKKLVDSTDKADLRLIYLALAHMIKFRGHFLIEGDLNPDNSDVDKLFIQLVQTYNQLFEENPINASGVDAKAILSARLSKSRRLENLIAQLPGEKKNGLFGNLIALSLGLTPNFKSNFDLAEDAKLQLSKDTYDDDLDNLLAQIGDQYADLFLAAKNLSDAILLSDILRVNTEITKAPLSASMIKRYDEHHQDLTLLKALVRQQLPEKYKEIFFDQSKNGYAGYIDGGASQEEFYKFIKPILEKMDGTEELLVKLNREDLLRKQRTFDNGSIPHQIHLGELHAILRRQEDFYPFLKDNREKIEKILTFRIPYYVGPLARGNSRFAWMTRKSEETITPWNFEEVVDKGASAQSFIERMTNFDKNLPNEKVLPKHSLLYEYFTVYNELTKVKYVTEGMRKPAFLSGEQKKAIVDLLFKTNRKVTVKQLKEDYFKKIECFDSVEISGVEDRFNASLGTYHDLLKIIKDKDFLDNEENEDILEDIVLTLTLFEDREMIEERLKTYAHLFDDKVMKQLKRRRYTGWGRLSRKLINGIRDKQSGKTILDFLKSDGFANRNFMQLIHDDSLTFKEDIQKAQVSGQGDSLHEHIANLAGSPAIKKGILQTVKVVDELVKVMGRHKPENIVIEMARENQTTQKGQKNSRERMKRIEEGIKELGSQILKEHPVENTQLQNEKLYLYYLQNGRDMYVDQELDINRLSDYDVDHIVPQSFLKDDSIDNKVLTRSDKARGKSDNVPSEEVVKKMKNYWRQLLNAKLITQRKFDNLTKAERGGLSELDKAGFIKRQLVETRQITKHVAQILDSRMNTKYDENDKLIREVKVITLKSKLVSDFRKDFQFYKVREINNYHHAHDAYLNAVVGTALIKKYPKLESEFVYGDYKVYDVRKMIAKSEQEIGKATAKYFFYSNIMNFFKTEITLANGEIRKRPLIETNGETGEIVWDKGRDFATVRKVLSMPQVNIVKKTEVQTGGFSKESILPKRNSDKLIARKKDWDPKKYGGFDSPTVAYSVLVVAKVEKGKSKKLKSVKELLGITIMERSSFEKNPIDFLEAKGYKEVKKDLIIKLPKYSLFELENGRKRMLASAGELQKGNELALPSKYVNFLYLASHYEKLKGSPEDNEQKQLFVEQHKHYLDEIIEQISEFSKRVILADANLDKVLSAYNKHRDKPIREQAENIIHLFTLTNLGAPAAFKYFDTTIDRKRYTSTKEVLDATLIHQSITGLYETRIDLSQLGGDGGGSSEAAAKGGSGGTLQLDDEYRLYSPLVKPDQNIQFWLEQFPQAWAETAGMGLAKQVPPQVIQLKASATPVSVRQYPLSKEAQEGIRPHVQRLIQQGILVPVQSPWNTPLLPVRKPGTNDYRPVQDLREVNKRVQDIHPTVPNPYNLLCALPPQRSWYTVLDLKDAFFCLRLHPTSQPLFAFEWRDPGTGRTGQLTWTRLPQGFKNSPTIFNEALHRDLANFRIQHPQVTLLQYVDDLLLAGATKQDCLEGTKALLLELSDLGYRASAKKAQICRREVTYLGYSLRDGQRWLTEARKKTVVQIPAPTTAKQVREFLGTAGFCRLWIPGFATLAAPLYPLTKPKGEFSWAPEHQKAFDAIKKALLSAPALALPDVTKPFTLYVDERKGVARGVLTQTLGPWRRPVAYLSKKLDPVASGWPVCLKAIAAVAILVKDADKLTLGQNITVIAPHALENIVRQPPDRWMTNARMTHYQSLLLTERVTFAPPAALNPATLLPEETDEPVTHDCHQLLIEETGVRKDLTDIPLTGEVLTWFTDGSSYVVEGKRMAGAAVVDGTRTIWASSLPEGTSAQKAELMALTQALRLAEGKSINIYTDSRYAFATAHVHGAIYKQRGWLTSAGREIKNKEEILSLLEALHLPKRLAIIHCPGHQKAKDPISRGNQMADRVAKQAAQGVNLLAGKRTADGSEFEKRTADGSEFESPKKKAKVE

SEQ ID NO: 362 - protein, 2087 aa, synthetic construct; identical to SEQ ID NO: 114

SEQ ID NO: 363 - protein, 2090 aa, synthetic construct; identical to SEQ ID NO: 139

SEQ ID NO: 364 - protein, 2088 aa, synthetic construct; identical to SEQ ID NO: 181

SEQ ID NO: 365 - protein, 2090 aa, synthetic construct; identical to SEQ ID NO: 133

SEQ ID NO: 366 - protein, 2084 aa, synthetic construct; identical to SEQ ID NO: 163

SEQ ID NO: 367 - protein, 2084 aa, synthetic construct; identical to SEQ ID NO: 166

SEQ ID NO: 368 - protein, 2090 aa, synthetic construct; identical to SEQ ID NO: 170

SEQ ID NO: 369 - protein, 2085 aa, synthetic construct; identical to SEQ ID NO: 165

SEQ ID NO: 370 - protein, 2091 aa, synthetic construct; identical to SEQ ID NO: 153

SEQ ID NO: 371 - protein, 2088 aa, synthetic construct
MPAAKRVKLDGGDKKYSIGLDIGTNSVGWAVITDEYKVPSKKFKVLGNTDRHSIKKNLIGALLFDSGETAEATRLKRTARRRYTRRKNRICYLQEIFSNEMAKVDDSFFHRLEESFLVEEDKKHERHPIFGNIVDEVAYHEKYPTIYHLRKKLVDSTDKADLRLIYLALAHMIKFRGHFLIEGDLNPDNSDVDKLFIQLVQTYNQLFEENPINASGVDAKAILSARLSKSRRLENLIAQLPGEKKNGLFGNLIALSLGLTPNFKSNFDLAEDAKLQLSKDTYDDDLDNLLAQIGDQYADLFLAAKNLSDAILLSDILRVNTEITKAPLSASMIKRYDEHHQDLTLLKALVRQQLPEKYKEIFFDQSKNGYAGYIDGGASQEEFYKFIKPILEKMDGTEELLVKLNREDLLRKQRTFDNGSIPHQIHLGELHAILRRQEDFYPFLKDNREKIEKILTFRIPYYVGPLARGNSRFAWMTRKSEETITPWNFEEVVDKGASAQSFIERMTNFDKNLPNEKVLPKHSLLYEYFTVYNELTKVKYVTEGMRKPAFLSGEQKKAIVDLLFKTNRKVTVKQLKEDYFKKIECFDSVEISGVEDRFNASLGTYHDLLKIIKDKDFLDNEENEDILEDIVLTLTLFEDREMIEERLKTYAHLFDDKVMKQLKRRRYTGWGRLSRKLINGIRDKQSGKTILDFLKSDGFANRNFMQLIHDDSLTFKEDIQKAQVSGQGDSLHEHIANLAGSPAIKKGILQTVKVVDELVKVMGRHKPENIVIEMARENQTTQKGQKNSRERMKRIEEGIKELGSQILKEHPVENTQLQNEKLYLYYLQNGRDMYVDQELDINRLSDYDVDHIVPQSFLKDDSIDNKVLTRSDKARGKSDNVPSEEVVKKMKNYWRQLLNAKLITQRKFDNLTKAERGGLSELDKAGFIKRQLVETRQITKHVAQILDSRMNTKYDENDKLIREVKVITLKSKLVSDFRKDFQFYKVREINNYHHAHDAYLNAVVGTALIKKYPKLESEFVYGDYKVYDVRKMIAKSEQEIGKATAKYFFYSNIMNFFKTEITLANGEIRKRPLIETNGETGEIVWDKGRDFATVRKVLSMPQVNIVKKTEVQTGGFSKESILPKRNSDKLIARKKDWDPKKYGGFDSPTVAYSVLVVAKVEKGKSKKLKSVKELLGITIMERSSFEKNPIDFLEAKGYKEVKKDLIIKLPKYSLFELENGRKRMLASAGELQKGNELALPSKYVNFLYLASHYEKLKGSPEDNEQKQLFVEQHKHYLDEIIEQISEFSKRVILADANLDKVLSAYNKHRDKPIREQAENIIHLFTLTNLGAPAAFKYFDTTIDRKRYTSTKEVLDATLIHQSITGLYETRIDLSQLGGDGGPAPGGGGSSGGTLQLDDEYRLYSPLVKPDQNIQFWLEQFPQAWAETAGMGLAKQVPPQVIQLKASATPVSVRQYPLSKEAQEGIRPHVQRLIQQGILVPVQSPWNTPLLPVRKPGTNDYRPVQDLREVNKRVQDIHPTVPNPYNLLCALPPQRSWYTVLDLKDAFFCLRLHPTSQPLFAFEWRDPGTGRTGQLTWTRLPQGFKNSPTIFNEALHRDLANFRIQHPQVTLLQYVDDLLLAGATKQDCLEGTKALLLELSDLGYRASAKKAQICRREVTYLGYSLRDGQRWLTEARKKTVVQIPAPTTAKQVREFLGTAGFCRLWIPGFATLAAPLYPLTKPKGEFSWAPEHQKAFDAIKKALLSAPALALPDVTKPFTLYVDERKGVARGVLTQTLGPWRRPVAYLSKKLDPVASGWPVCLKAIAAVAILVKDADKLTLGQNITVIAPHALENIVRQPPDRWMTNARMTHYQSLLLTERVTFAPPAALNPATLLPEETDEPVTHDCHQLLIEETGVRKDLTDIPLTGEVLTWFTDGSSYVVEGKRMAGAAVVDGTRTIWASSLPEGTSAQKAELMALTQALRLAEGKSINIYTDSRYAFATAHVHGAIYKQRGWLTSAGREIKNKEEILSLLEALHLPKRLAIIHCPGHQKAKDPISRGNQMADRVAKQAAQGVNLLAGKRTADGSEFEKRTADGSEFESPKKKAKVE

SEQ ID NO: 372 - protein, 2090 aa, synthetic construct; identical to SEQ ID NO: 172

SEQ ID NO: 373 - protein, 2088 aa, synthetic construct
MPAAKRVKLDGGDKKYSIGLDIGTNSVGWAVITDEYKVPSKKFKVLGNTDRHSIKKNLIGALLFDSGETAEATRLKRTARRRYTRRKNRICYLQEIFSNEMAKVDDSFFHRLEESFLVEEDKKHERHPIFGNIVDEVAYHEKYPTIYHLRKKLVDSTDKADLRLIYLALAHMIKFRGHFLIEGDLNPDNSDVDKLFIQLVQTYNQLFEENPINASGVDAKAILSARLSKSRRLENLIAQLPGEKKNGLFGNLIALSLGLTPNFKSNFDLAEDAKLQLSKDTYDDDLDNLLAQIGDQYADLFLAAKNLSDAILLSDILRVNTEITKAPLSASMIKRYDEHHQDLTLLKALVRQQLPEKYKEIFFDQSKNGYAGYIDGGASQEEFYKFIKPILEKMDGTEELLVKLNREDLLRKQRTFDNGSIPHQIHLGELHAILRRQEDFYPFLKDNREKIEKILTFRIPYYVGPLARGNSRFAWMTRKSEETITPWNFEEVVDKGASAQSFIERMTNFDKNLPNEKVLPKHSLLYEYFTVYNELTKVKYVTEGMRKPAFLSGEQKKAIVDLLFKTNRKVTVKQLKEDYFKKIECFDSVEISGVEDRFNASLGTYHDLLKIIKDKDFLDNEENEDILEDIVLTLTLFEDREMIEERLKTYAHLFDDKVMKQLKRRRYTGWGRLSRKLINGIRDKQSGKTILDFLKSDGFANRNFMQLIHDDSLTFKEDIQKAQVSGQGDSLHEHIANLAGSPAIKKGILQTVKVVDELVKVMGRHKPENIVIEMARENQTTQKGQKNSRERMKRIEEGIKELGSQILKEHPVENTQLQNEKLYLYYLQNGRDMYVDQELDINRLSDYDVDHIVPQSFLKDDSIDNKVLTRSDKARGKSDNVPSEEVVKKMKNYWRQLLNAKLITQRKFDNLTKAERGGLSELDKAGFIKRQLVETRQITKHVAQILDSRMNTKYDENDKLIREVKVITLKSKLVSDFRKDFQFYKVREINNYHHAHDAYLNAVVGTALIKKYPKLESEFVYGDYKVYDVRKMIAKSEQEIGKATAKYFFYSNIMNFFKTEITLANGEIRKRPLIETNGETGEIVWDKGRDFATVRKVLSMPQVNIVKKTEVQTGGFSKESILPKRNSDKLIARKKDWDPKKYGGFDSPTVAYSVLVVAKVEKGKSKKLKSVKELLGITIMERSSFEKNPIDFLEAKGYKEVKKDLIIKLPKYSLFELENGRKRMLASAGELQKGNELALPSKYVNFLYLASHYEKLKGSPEDNEQKQLFVEQHKHYLDEIIEQISEFSKRVILADANLDKVLSAYNKHRDKPIREQAENIIHLFTLTNLGAPAAFKYFDTTIDRKRYTSTKEVLDATLIHQSITGLYETRIDLSQLGGDGGGGSGGGPAPGGTLQLDDEYRLYSPLVKPDQNIQFWLEQFPQAWAETAGMGLAKQVPPQVIQLKASATPVSVRQYPLSKEAQEGIRPHVQRLIQQGILVPVQSPWNTPLLPVRKPGTNDYRPVQDLREVNKRVQDIHPTVPNPYNLLCALPPQRSWYTVLDLKDAFFCLRLHPTSQPLFAFEWRDPGTGRTGQLTWTRLPQGFKNSPTIFNEALHRDLANFRIQHPQVTLLQYVDDLLLAGATKQDCLEGTKALLLELSDLGYRASAKKAQICRREVTYLGYSLRDGQRWLTEARKKTVVQIPAPTTAKQVREFLGTAGFCRLWIPGFATLAAPLYPLTKPKGEFSWAPEHQKAFDAIKKALLSAPALALPDVTKPFTLYVDERKGVARGVLTQTLGPWRRPVAYLSKKLDPVASGWPVCLKAIAAVAILVKDADKLTLGQNITVIAPHALENIVRQPPDRWMTNARMTHYQSLLLTERVTFAPPAALNPATLLPEETDEPVTHDCHQLLIEETGVRKDLTDIPLTGEVLTWFTDGSSYVVEGKRMAGAAVVDGTRTIWASSLPEGTSAQKAELMALTQALRLAEGKSINIYTDSRYAFATAHVHGAIYKQRGWLTSAGREIKNKEEILSLLEALHLPKRLAIIHCPGHQKAKDPISRGNQMADRVAKQAAQGVNLLAGKRTADGSEFEKRTADGSEFESPKKKAKVE

SEQ ID NO: 374 - protein, 2094 aa, synthetic construct; identical to SEQ ID NO: 118

SEQ ID NO: 375 - protein, 2087 aa, synthetic construct
MPAAKRVKLDGGDKKYSIGLDIGTNSVGWAVITDEYKVPSKKFKVLGNTDRHSIKKNLIGALLFDSGETAEATRLKRTARRRYTRRKNRICYLQEIFSNEMAKVDDSFFHRLEESFLVEEDKKHERHPIFGNIVDEVAYHEKYPTIYHLRKKLVDSTDKADLRLIYLALAHMIKFRGHFLIEGDLNPDNSDVDKLFIQLVQTYNQLFEENPINASGVDAKAILSARLSKSRRLENLIAQLPGEKKNGLFGNLIALSLGLTPNFKSNFDLAEDAKLQLSKDTYDDDLDNLLAQIGDQYADLFLAAKNLSDAILLSDILRVNTEITKAPLSASMIKRYDEHHQDLTLLKALVRQQLPEKYKEIFFDQSKNGYAGYIDGGASQEEFYKFIKPILEKMDGTEELLVKLNREDLLRKQRTFDNGSIPHQIHLGELHAILRRQEDFYPFLKDNREKIEKILTFRIPYYVGPLARGNSRFAWMTRKSEETITPWNFEEVVDKGASAQSFIERMTNFDKNLPNEKVLPKHSLLYEYFTVYNELTKVKYVTEGMRKPAFLSGEQKKAIVDLLFKTNRKVTVKQLKEDYFKKIECFDSVEISGVEDRFNASLGTYHDLLKIIKDKDFLDNEENEDILEDIVLTLTLFEDREMIEERLKTYAHLFDDKVMKQLKRRRYTGWGRLSRKLINGIRDKQSGKTILDFLKSDGFANRNFMQLIHDDSLTFKEDIQKAQVSGQGDSLHEHIANLAGSPAIKKGILQTVKVVDELVKVMGRHKPENIVIEMARENQTTQKGQKNSRERMKRIEEGIKELGSQILKEHPVENTQLQNEKLYLYYLQNGRDMYVDQELDINRLSDYDVDHIVPQSFLKDDSIDNKVLTRSDKARGKSDNVPSEEVVKKMKNYWRQLLNAKLITQRKFDNLTKAERGGLSELDKAGFIKRQLVETRQITKHVAQILDSRMNTKYDENDKLIREVKVITLKSKLVSDFRKDFQFYKVREINNYHHAHDAYLNAVVGTALIKKYPKLESEFVYGDYKVYDVRKMIAKSEQEIGKATAKYFFYSNIMNFFKTEITLANGEIRKRPLIETNGETGEIVWDKGRDFATVRKVLSMPQVNIVKKTEVQTGGFSKESILPKRNSDKLIARKKDWDPKKYGGFDSPTVAYSVLVVAKVEKGKSKKLKSVKELLGITIMERSSFEKNPIDFLEAKGYKEVKKDLIIKLPKYSLFELENGRKRMLASAGELQKGNELALPSKYVNFLYLASHYEKLKGSPEDNEQKQLFVEQHKHYLDEIIEQISEFSKRVILADANLDKVLSAYNKHRDKPIREQAENIIHLFTLTNLGAPAAFKYFDTTIDRKRYTSTKEVLDATLIHQSITGLYETRIDLSQLGGDGGPAPEAAAKGGTLQLDDEYRLYSPLVKPDQNIQFWLEQFPQAWAETAGMGLAKQVPPQVIQLKASATPVSVRQYPLSKEAQEGIRPHVQRLIQQGILVPVQSPWNTPLLPVRKPGTNDYRPVQDLREVNKRVQDIHPTVPNPYNLLCALPPQRSWYTVLDLKDAFFCLRLHPTSQPLFAFEWRDPGTGRTGQLTWTRLPQGFKNSPTIFNEALHRDLANFRIQHPQVTLLQYVDDLLLAGATKQDCLEGTKALLLELSDLGYRASAKKAQICRREVTYLGYSLRDGQRWLTEARKKTVVQIPAPTTAKQVREFLGTAGFCRLWIPGFATLAAPLYPLTKPKGEFSWAPEHQKAFDAIKKALLSAPALALPDVTKPFTLYVDERKGVARGVLTQTLGPWRRPVAYLSKKLDPVASGWPVCLKAIAAVAILVKDADKLTLGQNITVIAPHALENIVRQPPDRWMTNARMTHYQSLLLTERVTFAPPAALNPATLLPEETDEPVTHDCHQLLIEETGVRKDLTDIPLTGEVLTWFTDGSSYVVEGKRMAGAAVVDGTRTIWASSLPEGTSAQKAELMALTQALRLAEGKSINIYTDSRYAFATAHVHGAIYKQRGWLTSAGREIKNKEEILSLLEALHLPKRLAIIHCPGHQKAKDPISRGNQMADRVAKQAAQGVNLLAGKRTADGSEFEKRTADGSEFESPKKKAKVE

SEQ ID NO: 376 - protein, 2090 aa, synthetic construct; identical to SEQ ID NO: 154

SEQ ID NO: 377 - protein, 2091 aa, synthetic construct; identical to SEQ ID NO: 145

SEQ ID NO: 378 - protein, 2089 aa, synthetic construct
MPAAKRVKLDGGDKKYSIGLDIGTNSVGWAVITDEYKVPSKKFKVLGNTDRHSIKKNLIGALLFDSGETAEATRLKRTARRRYTRRKNRICYLQEIFSNEMAKVDDSFFHRLEESFLVEEDKKHERHPIFGNIVDEVAYHEKYPTIYHLRKKLVDSTDKADLRLIYLALAHMIKFRGHFLIEGDLNPDNSDVDKLFIQLVQTYNQLFEENPINASGVDAKAILSARLSKSRRLENLIAQLPGEKKNGLFGNLIALSLGLTPNFKSNFDLAEDAKLQLSKDTYDDDLDNLLAQIGDQYADLFLAAKNLSDAILLSDILRVNTEITKAPLSASMIKRYDEHHQDLTLLKALVRQQLPEKYKEIFFDQSKNGYAGYIDGGASQEEFYKFIKPILEKMDGTEELLVKLNREDLLRKQRTFDNGSIPHQIHLGELHAILRRQEDFYPFLKDNREKIEKILTFRIPYYVGPLARGNSRFAWMTRKSEETITPWNFEEVVDKGASAQSFIERMTNFDKNLPNEKVLPKHSLLYEYFTVYNELTKVKYVTEGMRKPAFLSGEQKKAIVDLLFKTNRKVTVKQLKEDYFKKIECFDSVEISGVEDRFNASLGTYHDLLKIIKDKDFLDNEENEDILEDIVLTLTLFEDREMIEERLKTYAHLFDDKVMKQLKRRRYTGWGRLSRKLINGIRDKQSGKTILDFLKSDGFANRNFMQLIHDDSLTFKEDIQKAQVSGQGDSLHEHIANLAGSPAIKKGILQTVKVVDELVKVMGRHKPENIVIEMARENQTTQKGQKNSRERMKRIEEGIKELGSQILKEHPVENTQLQNEKLYLYYLQNGRDMYVDQELDINRLSDYDVDHIVPQSFLKDDSIDNKVLTRSDKARGKSDNVPSEEVVKKMKNYWRQLLNAKLITQRKFDNLTKAERGGLSELDKAGFIKRQLVETRQITKHVAQILDSRMNTKYDENDKLIREVKVITLKSKLVSDFRKDFQFYKVREINNYHHAHDAYLNAVVGTALIKKYPKLESEFVYGDYKVYDVRKMIAKSEQEIGKATAKYFFYSNIMNFFKTEITLANGEIRKRPLIETNGETGEIVWDKGRDFATVRKVLSMPQVNIVKKTEVQTGGFSKESILPKRNSDKLIARKKDWDPKKYGGFDSPTVAYSVLVVAKVEKGKSKKLKSVKELLGITIMERSSFEKNPIDFLEAKGYKEVKKDLIIKLPKYSLFELENGRKRMLASAGELQKGNELALPSKYVNFLYLASHYEKLKGSPEDNEQKQLFVEQHKHYLDEIIEQISEFSKRVILADANLDKVLSAYNKHRDKPIREQAENIIHLFTLTNLGAPAAFKYFDTTIDRKRYTSTKEVLDATLIHQSITGLYETRIDLSQLGGDGGGGGGSGGGGSGGTLQLDDEYRLYSPLVKPDQNIQFWLEQFPQAWAETAGMGLAKQVPPQVIQLKASATPVSVRQYPLSKEAQEGIRPHVQRLIQQGILVPVQSPWNTPLLPVRKPGTNDYRPVQDLREVNKRVQDIHPTVPNPYNLLCALPPQRSWYTVLDLKDAFFCLRLHPTSQPLFAFEWRDPGTGRTGQLTWTRLPQGFKNSPTIFNEALHRDLANFRIQHPQVTLLQYVDDLLLAGATKQDCLEGTKALLLELSDLGYRASAKKAQICRREVTYLGYSLRDGQRWLTEARKKTVVQIPAPTTAKQVREFLGTAGFCRLWIPGFATLAAPLYPLTKPKGEFSWAPEHQKAFDAIKKALLSAPALALPDVTKPFTLYVDERKGVARGVLTQTLGPWRRPVAYLSKKLDPVASGWPVCLKAIAAVAILVKDADKLTLGQNITVIAPHALENIVRQPPDRWMTNARMTHYQSLLLTERVTFAPPAALNPATLLPEETDEPVTHDCHQLLIEETGVRKDLTDIPLTGEVLTWFTDGSSYVVEGKRMAGAAVVDGTRTIWASSLPEGTSAQKAELMALTQALRLAEGKSINIYTDSRYAFATAHVHGAIYKQRGWLTSAGREIKNKEEILSLLEALHLPKRLAIIHCPGHQKAKDPISRGNQMADRVAKQAAQGVNLLAGKRTADGSEFEKRTADGSEFESPKKKAKVE

SEQ ID NO: 379 - protein, 2088 aa, synthetic construct
MPAAKRVKLDGGDKKYSIGLDIGTNSVGWAVITDEYKVPSKKFKVLGNTDRHSIKKNLIGALLFDSGETAEATRLKRTARRRYTRRKNRICYLQEIFSNEMAKVDDSFFHRLEESFLVEEDKKHERHPIFGNIVDEVAYHEKYPTIYHLRKKLVDSTDKADLRLIYLALAHMIKFRGHFLIEGDLNPDNSDVDKLFIQLVQTYNQLFEENPINASGVDAKAILSARLSKSRRLENLIAQLPGEKKNGLFGNLIALSLGLTPNFKSNFDLAEDAKLQLSKDTYDDDLDNLLAQIGDQYADLFLAAKNLSDAILLSDILRVNTEITKAPLSASMIKRYDEHHQDLTLLKALVRQQLPEKYKEIFFDQSKNGYAGYIDGGASQEEFYKFIKPILEKMDGTEELLVKLNREDLLRKQRTFDNGSIPHQIHLGELHAILRRQEDFYPFLKDNREKIEKILTFRIPYYVGPLARGNSRFAWMTRKSEETITPWNFEEVVDKGASAQSFIERMTNFDKNLPNEKVLPKHSLLYEYFTVYNELTKVKYVTEGMRKPAFLSGEQKKAIVDLLFKTNRKVTVKQLKEDYFKKIECFDSVEISGVEDRFNASLGTYHDLLKIIKDKDFLDNEENEDILEDIVLTLTLFEDREMIEERLKTYAHLFDDKVMKQLKRRRYTGWGRLSRKLINGIRDKQSGKTILDFLKSDGFANRNFMQLIHDDSLTFKEDIQKAQVSGQGDSLHEHIANLAGSPAIKKGILQTVKVVDELVKVMGRHKPENIVIEMARENQTTQKGQKNSRERMKRIEEGIKELGSQILKEHPVENTQLQNEKLYLYYLQNGRDMYVDQELDINRLSDYDVDHIVPQSFLKDDSIDNKVLTRSDKARGKSDNVPSEEVVKKMKNYWRQLLNAKLITQRKFDNLTKAERGGLSELDKAGFIKRQLVETRQITKHVAQILDSRMNTKYDENDKLIREVKVITLKSKLVSDFRKDFQFYKVREINNYHHAHDAYLNAVVGTALIKKYPKLESEFVYGDYKVYDVRKMIAKSEQEIGKATAKYFFYSNIMNFFKTEITLANGEIRKRPLIETNGETGEIVWDKGRDFATVRKVLSMPQVNIVKKTEVQTGGFSKESILPKRNSDKLIARKKDWDPKKYGGFDSPTVAYSVLVVAKVEKGKSKKLKSVKELLGITIMERSSFEKNPIDFLEAKGYKEVKKDLIIKLPKYSLFELENGRKRMLASAGELQKGNELALPSKYVNFLYLASHYEKLKGSPEDNEQKQLFVEQHKHYLDEIIEQISEFSKRVILADANLDKVLSAYNKHRDKPIREQAENIIHLFTLTNLGAPAAFKYFDTTIDRKRYTSTKEVLDATLIHQSITGLYETRIDLSQLGGDGGGSSPAPGGGGGTLQLDDEYRLYSPLVKPDQNIQFWLEQFPQAWAETAGMGLAKQVPPQVIQLKASATPVSVRQYPLSKEAQEGIRPHVQRLIQQGILVPVQSPWNTPLLPVRKPGTNDYRPVQDLREVNKRVQDIHPTVPNPYNLLCALPPQRSWYTVLDLKDAFFCLRLHPTSQPLFAFEWRDPGTGRTGQLTWTRLPQGFKNSPTIFNEALHRDLANFRIQHPQVTLLQYVDDLLLAGATKQDCLEGTKALLLELSDLGYRASAKKAQICRREVTYLGYSLRDGQRWLTEARKKTVVQIPAPTTAKQVREFLGTAGFCRLWIPGFATLAAPLYPLTKPKGEFSWAPEHQKAFDAIKKALLSAPALALPDVTKPFTLYVDERKGVARGVLTQTLGPWRRPVAYLSKKLDPVASGWPVCLKAIAAVAILVKDADKLTLGQNITVIAPHALENIVRQPPDRWMTNARMTHYQSLLLTERVTFAPPAALNPATLLPEETDEPVTHDCHQLLIEETGVRKDLTDIPLTGEVLTWFTDGSSYVVEGKRMAGAAVVDGTRTIWASSLPEGTSAQKAELMALTQALRLAEGKSINIYTDSRYAFATAHVHGAIYKQRGWLTSAGREIKNKEEILSLLEALHLPKRLAIIHCPGHQKAKDPISRGNQMADRVAKQAAQGVNLLAGKRTADGSEFEKRTADGSEFESPKKKAKVE

SEQ ID NO: 380 - protein, 2087 aa, synthetic construct; identical to SEQ ID NO: 185

SEQ ID NO: 381 - protein, 2086 aa, synthetic construct; identical to SEQ ID NO: 152

SEQ ID NO: 382 - protein, 2088 aa, synthetic construct
MPAAKRVKLDGGDKKYSIGLDIGTNSVGWAVITDEYKVPSKKFKVLGNTDRHSIKKNLIGALLFDSGETAEATRLKRTARRRYTRRKNRICYLQEIFSNEMAKVDDSFFHRLEESFLVEEDKKHERHPIFGNIVDEVAYHEKYPTIYHLRKKLVDSTDKADLRLIYLALAHMIKFRGHFLIEGDLNPDNSDVDKLFIQLVQTYNQLFEENPINASGVDAKAILSARLSKSRRLENLIAQLPGEKKNGLFGNLIALSLGLTPNFKSNFDLAEDAKLQLSKDTYDDDLDNLLAQIGDQYADLFLAAKNLSDAILLSDILRVNTEITKAPLSASMIKRYDEHHQDLTLLKALVRQQLPEKYKEIFFDQSKNGYAGYIDGGASQEEFYKFIKPILEKMDGTEELLVKLNREDLLRKQRTFDNGSIPHQIHLGELHAILRRQEDFYPFLKDNREKIEKILTFRIPYYVGPLARGNSRFAWMTRKSEETITPWNFEEVVDKGASAQSFIERMTNFDKNLPNEKVLPKHSLLYEYFTVYNELTKVKYVTEGMRKPAFLSGEQKKAIVDLLFKTNRKVTVKQLKEDYFKKIECFDSVEISGVEDRFNASLGTYHDLLKIIKDKDFLDNEENEDILEDIVLTLTLFEDREMIEERLKTYAHLFDDKVMKQLKRRRYTGWGRLSRKLINGIRDKQSGKTILDFLKSDGFANRNFMQLIHDDSLTFKEDIQKAQVSGQGDSLHEHIANLAGSPAIKKGILQTVKVVDELVKVMGRHKPENIVIEMARENQTTQKGQKNSRERMKRIEEGIKELGSQILKEHPVENTQLQNEKLYLYYLQNGRDMYVDQELDINRLSDYDVDHIVPQSFLKDDSIDNKVLTRSDKARGKSDNVPSEEVVKKMKNYWRQLLNAKLITQRKFDNLTKAERGGLSELDKAGFIKRQLVETRQITKHVAQILDSRMNTKYDENDKLIREVKVITLKSKLVSDFRKDFQFYKVREINNYHHAHDAYLNAVVGTALIKKYPKLESEFVYGDYKVYDVRKMIAKSEQEIGKATAKYFFYSNIMNFFKTEITLANGEIRKRPLIETNGETGEIVWDKGRDFATVRKVLSMPQVNIVKKTEVQTGGFSKESILPKRNSDKLIARKKDWDPKKYGGFDSPTVAYSVLVVAKVEKGKSKKLKSVKELLGITIMERSSFEKNPIDFLEAKGYKEVKKDLIIKLPKYSLFELENGRKRMLASAGELQKGNELALPSKYVNFLYLASHYEKLKGSPEDNEQKQLFVEQHKHYLDEIIEQISEFSKRVILADANLDKVLSAYNKHRDKPIREQAENIIHLFTLTNLGAPAAFKYFDTTIDRKRYTSTKEVLDATLIHQSITGLYETRIDLSQLGGDGGPAPAPAPAPGGTLQLDDEYRLYSPLVKPDQNIQFWLEQFPQAWAETAGMGLAKQVPPQVIQLKASATPVSVRQYPLSKEAQEGIRPHVQRLIQQGILVPVQSPWNTPLLPVRKPGTNDYRPVQDLREVNKRVQDIHPTVPNPYNLLCALPPQRSWYTVLDLKDAFFCLRLHPTSQPLFAFEWRDPGTGRTGQLTWTRLPQGFKNSPTIFNEALHRDLANFRIQHPQVTLLQYVDDLLLAGATKQDCLEGTKALLLELSDLGYRASAKKAQICRREVTYLGYSLRDGQRWLTEARKKTVVQIPAPTTAKQVREFLGTAGFCRLWIPGFATLAAPLYPLTKPKGEFSWAPEHQKAFDAIKKALLSAPALALPDVTKPFTLYVDERKGVARGVLTQTLGPWRRPVAYLSKKLDPVASGWPVCLKAIAAVAILVKDADKLTLGQNITVIAPHALENIVRQPPDRWMTNARMTHYQSLLLTERVTFAPPAALNPATLLPEETDEPVTHDCHQLLIEETGVRKDLTDIPLTGEVLTWFTDGSSYVVEGKRMAGAAVVDGTRTIWASSLPEGTSAQKAELMALTQALRLAEGKSINIYTDSRYAFATAHVHGAIYKQRGWLTSAGREIKNKEEILSLLEALHLPKRLAIIHCPGHQKAKDPISRGNQMADRVAKQAAQGVNLLAGKRTADGSEFEKRTADGSEFESPKKKAKVE

SEQ ID NO: 383 - protein, 2085 aa, synthetic construct; identical to SEQ ID NO: 178

SEQ ID NO: 384 - protein, 2088 aa, synthetic construct; identical to SEQ ID NO: 144

SEQ ID NO: 385 - protein, 2090 aa, synthetic construct
MPAAKRVKLDGGDKKYSIGLDIGTNSVGWAVITDEYKVPSKKFKVLGNTDRHSIKKNLIGALLFDSGETAEATRLKRTARRRYTRRKNRICYLQEIFSNEMAKVDDSFFHRLEESFLVEEDKKHERHPIFGNIVDEVAYHEKYPTIYHLRKKLVDSTDKADLRLIYLALAHMIKFRGHFLIEGDLNPDNSDVDKLFIQLVQTYNQLFEENPINASGVDAKAILSARLSKSRRLENLIAQLPGEKKNGLFGNLIALSLGLTPNFKSNFDLAEDAKLQLSKDTYDDDLDNLLAQIGDQYADLFLAAKNLSDAILLSDILRVNTEITKAPLSASMIKRYDEHHQDLTLLKALVRQQLPEKYKEIFFDQSKNGYAGYIDGGASQEEFYKFIKPILEKMDGTEELLVKLNREDLLRKQRTFDNGSIPHQIHLGELHAILRRQEDFYPFLKDNREKIEKILTFRIPYYVGPLARGNSRFAWMTRKSEETITPWNFEEVVDKGASAQSFIERMTNFDKNLPNEKVLPKHSLLYEYFTVYNELTKVKYVTEGMRKPAFLSGEQKKAIVDLLFKTNRKVTVKQLKEDYFKKIECFDSVEISGVEDRFNASLGTYHDLLKIIKDKDFLDNEENEDILEDIVLTLTLFEDREMIEERLKTYAHLFDDKVMKQLKRRRYTGWGRLSRKLINGIRDKQSGKTILDFLKSDGFANRNFMQLIHDDSLTFKEDIQKAQVSGQGDSLHEHIANLAGSPAIKKGILQTVKVVDELVKVMGRHKPENIVIEMARENQTTQKGQKNSRERMKRIEEGIKELGSQILKEHPVENTQLQNEKLYLYYLQNGRDMYVDQELDINRLSDYDVDHIVPQSFLKDDSIDNKVLTRSDKARGKSDNVPSEEVVKKMKNYWRQLLNAKLITQRKFDNLTKAERGGLSELDKAGFIKRQLVETRQITKHVAQILDSRMNTKYDENDKLIREVKVITLKSKLVSDFRKDFQFYKVREINNYHHAHDAYLNAVVGTALIKKYPKLESEFVYGDYKVYDVRKMIAKSEQEIGKATAKYFFYSNIMNFFKTEITLANGEIRKRPLIETNGETGEIVWDKGRDFATVRKVLSMPQVNIVKKTEVQTGGFSKESILPKRNSDKLIARKKDWDPKKYGGFDSPTVAYSVLVVAKVEKGKSKKLKSVKELLGITIMERSSFEKNPIDFLEAKGYKEVKKDLIIKLPKYSLFELENGRKRMLASAGELQKGNELALPSKYVNFLYLASHYEKLKGSPEDNEQKQLFVEQHKHYLDEIIEQISEFSKRVILADANLDKVLSAYNKHRDKPIREQAENIIHLFTLTNLGAPAAFKYFDTTIDRKRYTSTKEVLDATLIHQSITGLYETRIDLSQLGGDGGPAPGSSEAAAKGGTLQLDDEYRLYSPLVKPDQNIQFWLEQFPQAWAETAGMGLAKQVPPQVIQLKASATPVSVRQYPLSKEAQEGIRPHVQRLIQQGILVPVQSPWNTPLLPVRKPGTNDYRPVQDLREVNKRVQDIHPTVPNPYNLLCALPPQRSWYTVLDLKDAFFCLRLHPTSQPLFAFEWRDPGTGRTGQLTWTRLPQGFKNSPTIFNEALHRDLANFRIQHPQVTLLQYVDDLLLAGATKQDCLEGTKALLLELSDLGYRASAKKAQICRREVTYLGYSLRDGQRWLTEARKKTVVQIPAPTTAKQVREFLGTAGFCRLWIPGFATLAAPLYPLTKPKGEFSWAPEHQKAFDAIKKALLSAPALALPDVTKPFTLYVDERKGVARGVLTQTLGPWRRPVAYLSKKLDPVASGWPVCLKAIAAVAILVKDADKLTLGQNITVIAPHALENIVRQPPDRWMTNARMTHYQSLLLTERVTFAPPAALNPATLLPEETDEPVTHDCHQLLIEETGVRKDLTDIPLTGEVLTWFTDGSSYVVEGKRMAGAAVVDGTRTIWASSLPEGTSAQKAELMALTQALRLAEGKSINIYTDSRYAFATAHVHGAIYKQRGWLTSAGREIKNKEEILSLLEALHLPKRLAIIHCPGHQKAKDPISRGNQMADRVAKQAAQGVNLLAGKRTADGSEFEKRTADGSEFESPKKKAKVE

SEQ ID NO: 386 - protein, 2085 aa, synthetic construct; identical to SEQ ID NO: 123

SEQ ID NO: 387 - protein, 2088 aa, synthetic construct; identical to SEQ ID NO: 155

SEQ ID NO: 388 - protein, 2088 aa, synthetic construct; identical to SEQ ID NO: 134

SEQ ID NO: 389 - protein, 2088 aa, synthetic construct; identical to SEQ ID NO: 171

SEQ ID NO: 390 - protein, 2090 aa, synthetic construct
MPAAKRVKLDGGDKKYSIGLDIGTNSVGWAVITDEYKVPSKKFKVLGNTDRHSIKKNLIGALLFDSGETAEATRLKRTARRRYTRRKNRICYLQEIFSNEMAKVDDSFFHRLEESFLVEEDKKHERHPIFGNIVDEVAYHEKYPTIYHLRKKLVDSTDKADLRLIYLALAHMIKFRGHFLIEGDLNPDNSDVDKLFIQLVQTYNQLFEENPINASGVDAKAILSARLSKSRRLENLIAQLPGEKKNGLFGNLIALSLGLTPNFKSNFDLAEDAKLQLSKDTYDDDLDNLLAQIGDQYADLFLAAKNLSDAILLSDILRVNTEITKAPLSASMIKRYDEHHQDLTLLKALVRQQLPEKYKEIFFDQSKNGYAGYIDGGASQEEFYKFIKPILEKMDGTEELLVKLNREDLLRKQRTFDNGSIPHQIHLGELHAILRRQEDFYPFLKDNREKIEKILTFRIPYYVGPLARGNSRFAWMTRKSEETITPWNFEEVVDKGASAQSFIERMTNFDKNLPNEKVLPKHSLLYEYFTVYNELTKVKYVTEGMRKPAFLSGEQKKAIVDLLFKTNRKVTVKQLKEDYFKKIECFDSVEISGVEDRFNASLGTYHDLLKIIKDKDFLDNEENEDILEDIVLTLTLFEDREMIEERLKTYAHLFDDKVMKQLKRRRYTGWGRLSRKLINGIRDKQSGKTILDFLKSDGFANRNFMQLIHDDSLTFKEDIQKAQVSGQGDSLHEHIANLAGSPAIKKGILQTVKVVDELVKVMGRHKPENIVIEMARENQTTQKGQKNSRERMKRIEEGIKELGSQILKEHPVENTQLQNEKLYLYYLQNGRDMYVDQELDINRLSDYDVDHIVPQSFLKDDSIDNKVLTRSDKARGKSDNVPSEEVVKKMKNYWRQLLNAKLITQRKFDNLTKAERGGLSELDKAGFIKRQLVETRQITKHVAQILDSRMNTKYDENDKLIREVKVITLKSKLVSDFRKDFQFYKVREINNYHHAHDAYLNAVVGTALIKKYPKLESEFVYGDYKVYDVRKMIAKSEQEIGKATAKYFFYSNIMNFFKTEITLANGEIRKRPLIETNGETGEIVWDKGRDFATVRKVLSMPQVNIVKKTEVQTGGFSKESILPKRNSDKLIARKKDWDPKKYGGFDSPTVAYSVLVVAKVEKGKSKKLKSVKELLGITIMERSSFEKNPIDFLEAKGYKEVKKDLIIKLPKYSLFELENGRKRMLASAGELQKGNELALPSKYVNFLYLASHYEKLKGSPEDNEQKQLFVEQHKHYLDEIIEQISEFSKRVILADANLDKVLSAYNKHRDKPIREQAENIIHLFTLTNLGAPAAFKYFDTTIDRKRYTSTKEVLDATLIHQSITGLYETRIDLSQLGGDGGEAAAKGSSPAPGGTLQLDDEYRLYSPLVKPDQNIQFWLEQFPQAWAETAGMGLAKQVPPQVIQLKASATPVSVRQYPLSKEAQEGIRPHVQRLIQQGILVPVQSPWNTPLLPVRKPGTNDYRPVQDLREVNKRVQDIHPTVPNPYNLLCALPPQRSWYTVLDLKDAFFCLRLHPTSQPLFAFEWRDPGTGRTGQLTWTRLPQGFKNSPTIFNEALHRDLANFRIQHPQVTLLQYVDDLLLAGATKQDCLEGTKALLLELSDLGYRASAKKAQICRREVTYLGYSLRDGQRWLTEARKKTVVQIPAPTTAKQVREFLGTAGFCRLWIPGFATLAAPLYPLTKPKGEFSWAPEHQKAFDAIKKALLSAPALALPDVTKPFTLYVDERKGVARGVLTQTLGPWRRPVAYLSKKLDPVASGWPVCLKAIAAVAILVKDADKLTLGQNITVIAPHALENIVRQPPDRWMTNARMTHYQSLLLTERVTFAPPAALNPATLLPEETDEPVTHDCHQLLIEETGVRKDLTDIPLTGEVLTWFTDGSSYVVEGKRMAGAAVVDGTRTIWASSLPEGTSAQKAELMALTQALRLAEGKSINIYTDSRYAFATAHVHGAIYKQRGWLTSAGREIKNKEEILSLLEALHLPKRLAIIHCPGHQKAKDPISRGNQMADRVAKQAAQGVNLLAGKRTADGSEFEKRTADGSEFESPKKKAKVE

SEQ ID NO: 391 - protein, 2094 aa, synthetic construct; identical to SEQ ID NO: 159

SEQ ID NO: 392 - protein, 2084 aa, synthetic construct; identical to SEQ ID NO: 147

SEQ ID NO: 393 - protein, 2085 aa, synthetic construct; identical to SEQ ID NO: 174

SEQ ID NO: 394 - protein, 2087 aa, synthetic construct
MPAAKRVKLDGGDKKYSIGLDIGTNSVGWAVITDEYKVPSKKFKVLGNTDRHSIKKNLIGALLFDSGETAEATRLKRTARRRYTRRKNRICYLQEIFSNEMAKVDDSFFHRLEESFLVEEDKKHERHPIFGNIVDEVAYHEKYPTIYHLRKKLVDSTDKADLRLIYLALAHMIKFRGHFLIEGDLNPDNSDVDKLFIQLVQTYNQLFEENPINASGVDAKAILSARLSKSRRLENLIAQLPGEKKNGLFGNLIALSLGLTPNFKSNFDLAEDAKLQLSKDTYDDDLDNLLAQIGDQYADLFLAAKNLSDAILLSDILRVNTEITKAPLSASMIKRYDEHHQDLTLLKALVRQQLPEKYKEIFFDQSKNGYAGYIDGGASQEEFYKFIKPILEKMDGTEELLVKLNREDLLRKQRTFDNGSIPHQIHLGELHAILRRQEDFYPFLKDNREKIEKILTFRIPYYVGPLARGNSRFAWMTRKSEETITPWNFEEVVDKGASAQSFIERMTNFDKNLPNEKVLPKHSLLYEYFTVYNELTKVKYVTEGMRKPAFLSGEQKKAIVDLLFKTNRKVTVKQLKEDYFKKIECFDSVEISGVEDRFNASLGTYHDLLKIIKDKDFLDNEENEDILEDIVLTLTLFEDREMIEERLKTYAHLFDDKVMKQLKRRRYTGWGRLSRKLINGIRDKQSGKTILDFLKSDGFANRNFMQLIHDDSLTFKEDIQKAQVSGQGDSLHEHIANLAGSPAIKKGILQTVKVVDELVKVMGRHKPENIVIEMARENQTTQKGQKNSRERMKRIEEGIKELGSQILKEHPVENTQLQNEKLYLYYLQNGRDMYVDQELDINRLSDYDVDHIVPQSFLKDDSIDNKVLTRSDKARGKSDNVPSEEVVKKMKNYWRQLLNAKLITQRKFDNLTKAERGGLSELDKAGFIKRQLVETRQITKHVAQILDSRMNTKYDENDKLIREVKVITLKSKLVSDFRKDFQFYKVREINNYHHAHDAYLNAVVGTALIKKYPKLESEFVYGDYKVYDVRKMIAKSEQEIGKATAKYFFYSNIMNFFKTEITLANGEIRKRPLIETNGETGEIVWDKGRDFATVRKVLSMPQVNIVKKTEVQTGGFSKESILPKRNSDKLIARKKDWDPKKYGGFDSPTVAYSVLVVAKVEKGKSKKLKSVKELLGITIMERSSFEKNPIDFLEAKGYKEVKKDLIIKLPKYSLFELENGRKRMLASAGELQKGNELALPSKYVNFLYLASHYEKLKGSPEDNEQKQLFVEQHKHYLDEIIEQISEFSKRVILADANLDKVLSAYNKHRDKPIREQAENIIHLFTLTNLGAPAAFKYFDTTIDRKRYTSTKEVLDATLIHQSITGLYETRIDLSQLGGDGGGGSEAAAKGGTLQLDDEYRLYSPLVKPDQNIQFWLEQFPQAWAETAGMGLAKQVPPQVIQLKASATPVSVRQYPLSKEAQEGIRPHVQRLIQQGILVPVQSPWNTPLLPVRKPGTNDYRPVQDLREVNKRVQDIHPTVPNPYNLLCALPPQRSWYTVLDLKDAFFCLRLHPTSQPLFAFEWRDPGTGRTGQLTWTRLPQGFKNSPTIFNEALHRDLANFRIQHPQVTLLQYVDDLLLAGATKQDCLEGTKALLLELSDLGYRASAKKAQICRREVTYLGYSLRDGQRWLTEARKKTVVQIPAPTTAKQVREFLGTAGFCRLWIPGFATLAAPLYPLTKPKGEFSWAPEHQKAFDAIKKALLSAPALALPDVTKPFTLYVDERKGVARGVLTQTLGPWRRPVAYLSKKLDPVASGWPVCLKAIAAVAILVKDADKLTLGQNITVIAPHALENIVRQPPDRWMTNARMTHYQSLLLTERVTFAPPAALNPATLLPEETDEPVTHDCHQLLIEETGVRKDLTDIPLTGEVLTWFTDGSSYVVEGKRMAGAAVVDGTRTIWASSLPEGTSAQKAELMALTQALRLAEGKSINIYTDSRYAFATAHVHGAIYKQRGWLTSAGREIKNKEEILSLLEALHLPKRLAIIHCPGHQKAKDPISRGNQMADRVAKQAAQGVNLLAGKRTADGSEFEKRTADGSEFESPKKKAKVE

SEQ ID NO: 395 - protein, 2088 aa, synthetic construct; identical to SEQ ID NO: 180

SEQ ID NO: 396 - protein, 2097 aa, synthetic construct; identical to SEQ ID NO: 113

SEQ ID NO: 397 - protein, 2085 aa, synthetic construct; identical to SEQ ID NO: 184

SEQ ID NO: 398 - protein, 2090 aa, synthetic construct; identical to SEQ ID NO: 119

SEQ ID NO: 399 - protein, 2089 aa, synthetic construct
MPAAKRVKLDGGDKKYSIGLDIGTNSVGWAVITDEYKVPSKKFKVLGNTDRHSIKKNLIGALLFDSGETAEATRLKRTARRRYTRRKNRICYLQEIFSNEMAKVDDSFFHRLEESFLVEEDKKHERHPIFGNIVDEVAYHEKYPTIYHLRKKLVDSTDKADLRLIYLALAHMIKFRGHFLIEGDLNPDNSDVDKLFIQLVQTYNQLFEENPINASGVDAKAILSARLSKSRRLENLIAQLPGEKKNGLFGNLIALSLGLTPNFKSNFDLAEDAKLQLSKDTYDDDLDNLLAQIGDQYADLFLAAKNLSDAILLSDILRVNTEITKAPLSASMIKRYDEHHQDLTLLKALVRQQLPEKYKEIFFDQSKNGYAGYIDGGASQEEFYKFIKPILEKMDGTEELLVKLNREDLLRKQRTFDNGSIPHQIHLGELHAILRRQEDFYPFLKDNREKIEKILTFRIPYYVGPLARGNSRFAWMTRKSEETITPWNFEEVVDKGASAQSFIERMTNFDKNLPNEKVLPKHSLLYEYFTVYNELTKVKYVTEGMRKPAFLSGEQKKAIVDLLFKTNRKVTVKQLKEDYFKKIECFDSVEISGVEDRFNASLGTYHDLLKIIKDKDFLDNEENEDILEDIVLTLTLFEDREMIEERLKTYAHLFDDKVMKQLKRRRYTGWGRLSRKLINGIRDKQSGKTILDFLKSDGFANRNFMQLIHDDSLTFKEDIQKAQVSGQGDSLHEHIANLAGSPAIKKGILQTVKVVDELVKVMGRHKPENIVIEMARENQTTQKGQKNSRERMKRIEEGIKELGSQILKEHPVENTQLQNEKLYLYYLQNGRDMYVDQELDINRLSDYDVDHIVPQSFLKDDSIDNKVLTRSDKARGKSDNVPSEEVVKKMKNYWRQLLNAKLITQRKFDNLTKAERGGLSELDKAGFIKRQLVETRQITKHVAQILDSRMNTKYDENDKLIREVKVITLKSKLVSDFRKDFQFYKVREINNYHHAHDAYLNAVVGTALIKKYPKLESEFVYGDYKVYDVRKMIAKSEQEIGKATAKYFFYSNIMNFFKTEITLANGEIRKRPLIETNGETGEIVWDKGRDFATVRKVLSMPQVNIVKKTEVQTGGFSKESILPKRNSDKLIARKKDWDPKKYGGFDSPTVAYSVLVVAKVEKGKSKKLKSVKELLGITIMERSSFEKNPIDFLEAKGYKEVKKDLIIKLPKYSLFELENGRKRMLASAGELQKGNELALPSKYVNFLYLASHYEKLKGSPEDNEQKQLFVEQHKHYLDEIIEQISEFSKRVILADANLDKVLSAYNKHRDKPIREQAENIIHLFTLTNLGAPAAFKYFDTTIDRKRYTSTKEVLDATLIHQSITGLYETRIDLSQLGGDGGEAAAKEAAAKGGTLQLDDEYRLYSPLVKPDQNIQFWLEQFPQAWAETAGMGLAKQVPPQVIQLKASATPVSVRQYPLSKEAQEGIRPHVQRLIQQGILVPVQSPWNTPLLPVRKPGTNDYRPVQDLREVNKRVQDIHPTVPNPYNLLCALPPQRSWYTVLDLKDAFFCLRLHPTSQPLFAFEWRDPGTGRTGQLTWTRLPQGFKNSPTIFNEALHRDLANFRIQHPQVTLLQYVDDLLLAGATKQDCLEGTKALLLELSDLGYRASAKKAQICRREVTYLGYSLRDGQRWLTEARKKTVVQIPAPTTAKQVREFLGTAGFCRLWIPGFATLAAPLYPLTKPKGEFSWAPEHQKAFDAIKKALLSAPALALPDVTKPFTLYVDERKGVARGVLTQTLGPWRRPVAYLSKKLDPVASGWPVCLKAIAAVAILVKDADKLTLGQNITVIAPHALENIVRQPPDRWMTNARMTHYQSLLLTERVTFAPPAALNPATLLPEETDEPVTHDCHQLLIEETGVRKDLTDIPLTGEVLTWFTDGSSYVVEGKRMAGAAVVDGTRTIWASSLPEGTSAQKAELMALTQALRLAEGKSINIYTDSRYAFATAHVHGAIYKQRGWLTSAGREIKNKEEILSLLEALHLPKRLAIIHCPGHQKAKDPISRGNQMADRVAKQAAQGVNLLAGKRTADGSEFEKRTADGSEFESPKKKAKVE

SEQ ID NO: 400 - protein, 2088 aa, synthetic construct; identical to SEQ ID NO: 129

SEQ ID NO: 401 - protein, 2088 aa, synthetic construct
MPAAKRVKLDGGDKKYSIGLDIGTNSVGWAVITDEYKVPSKKFKVLGNTDRHSIKKNLIGALLFDSGETAEATRLKRTARRRYTRRKNRICYLQEIFSNEMAKVDDSFFHRLEESFLVEEDKKHERHPIFGNIVDEVAYHEKYPTIYHLRKKLVDSTDKADLRLIYLALAHMIKFRGHFLIEGDLNPDNSDVDKLFIQLVQTYNQLFEENPINASGVDAKAILSARLSKSRRLENLIAQLPGEKKNGLFGNLIALSLGLTPNFKSNFDLAEDAKLQLSKDTYDDDLDNLLAQIGDQYADLFLAAKNLSDAILLSDILRVNTEITKAPLSASMIKRYDEHHQDLTLLKALVRQQLPEKYKEIFFDQSKNGYAGYIDGGASQEEFYKFIKPILEKMDGTEELLVKLNREDLLRKQRTFDNGSIPHQIHLGELHAILRRQEDFYPFLKDNREKIEKILTFRIPYYVGPLARGNSRFAWMTRKSEETITPWNFEEVVDKGASAQSFIERMTNFDKNLPNEKVLPKHSLLYEYFTVYNELTKVKYVTEGMRKPAFLSGEQKKAIVDLLFKTNRKVTVKQLKEDYFKKIECFDSVEISGVEDRFNASLGTYHDLLKIIKDKDFLDNEENEDILEDIVLTLTLFEDREMIEERLKTYAHLFDDKVMKQLKRRRYTGWGRLSRKLINGIRDKQSGKTILDFLKSDGFANRNFMQLIHDDSLTFKEDIQKAQVSGQGDSLHEHIANLAGSPAIKKGILQTVKVVDELVKVMGRHKPENIVIEMARENQTTQKGQKNSRERMKRIEEGIKELGSQILKEHPVENTQLQNEKLYLYYLQNGRDMYVDQELDINRLSDYDVDHIVPQSFLKDDSIDNKVLTRSDKARGKSDNVPSEEVVKKMKNYWRQLLNAKLITQRKFDNLTKAERGGLSELDKAGFIKRQLVETRQITKHVAQILDSRMNTKYDENDKLIREVKVITLKSKLVSDFRKDFQFYKVREINNYHHAHDAYLNAVVGTALIKKYPKLESEFVYGDYKVYDVRKMIAKSEQEIGKATAKYFFYSNIMNFFKTEITLANGEIRKRPLIETNGETGEIVWDKGRDFATVRKVLSMPQVNIVKKTEVQTGGFSKESILPKRNSDKLIARKKDWDPKKYGGFDSPTVAYSVLVVAKVEKGKSKKLKSVKELLGITIMERSSFEKNPIDFLEAKGYKEVKKDLIIKLPKYSLFELENGRKRMLASAGELQKGNELALPSKYVNFLYLASHYEKLKGSPEDNEQKQLFVEQHKHYLDEIIEQISEFSKRVILADANLDKVLSAYNKHRDKPIREQAENIIHLFTLTNLGAPAAFKYFDTTIDRKRYTSTKEVLDATLIHQSITGLYETRIDLSQLGGDGGGSSGGSPAPGGTLQLDDEYRLYSPLVKPDQNIQFWLEQFPQAWAETAGMGLAKQVPPQVIQLKASATPVSVRQYPLSKEAQEGIRPHVQRLIQQGILVPVQSPWNTPLLPVRKPGTNDYRPVQDLREVNKRVQDIHPTVPNPYNLLCALPPQRSWYTVLDLKDAFFCLRLHPTSQPLFAFEWRDPGTGRTGQLTWTRLPQGFKNSPTIFNEALHRDLANFRIQHPQVTLLQYVDDLLLAGATKQDCLEGTKALLLELSDLGYRASAKKAQICRREVTYLGYSLRDGQRWLTEARKKTVVQIPAPTTAKQVREFLGTAGFCRLWIPGFATLAAPLYPLTKPKGEFSWAPEHQKAFDAIKKALLSAPALALPDVTKPFTLYVDERKGVARGVLTQTLGPWRRPVAYLSKKLDPVASGWPVCLKAIAAVAILVKDADKLTLGQNITVIAPHALENIVRQPPDRWMTNARMTHYQSLLLTERVTFAPPAALNPATLLPEETDEPVTHDCHQLLIEETGVRKDLTDIPLTGEVLTWFTDGSSYVVEGKRMAGAAVVDGTRTIWASSLPEGTSAQKAELMALTQALRLAEGKSINIYTDSRYAFATAHVHGAIYKQRGWLTSAGREIKNKEEILSLLEALHLPKRLAIIHCPGHQKAKDPISRGNQMADRVAKQAAQGVNLLAGKRTADGSEFEKRTADGSEFESPKKKAKVE

SEQ ID NO: 402 - protein, 2088 aa, synthetic construct
MPAAKRVKLDGGDKKYSIGLDIGTNSVGWAVITDEYKVPSKKFKVLGNTDRHSIKKNLIGALLFDSGETAEATRLKRTARRRYTRRKNRICYLQEIFSNEMAKVDDSFFHRLEESFLVEEDKKHERHPIFGNIVDEVAYHEKYPTIYHLRKKLVDSTDKADLRLIYLALAHMIKFRGHFLIEGDLNPDNSDVDKLFIQLVQTYNQLFEENPINASGVDAKAILSARLSKSRRLENLIAQLPGEKKNGLFGNLIALSLGLTPNFKSNFDLAEDAKLQLSKDTYDDDLDNLLAQIGDQYADLFLAAKNLSDAILLSDILRVNTEITKAPLSASMIKRYDEHHQDLTLLKALVRQQLPEKYKEIFFDQSKNGYAGYIDGGASQEEFYKFIKPILEKMDGTEELLVKLNREDLLRKQRTFDNGSIPHQIHLGELHAILRRQEDFYPFLKDNREKIEKILTFRIPYYVGPLARGNSRFAWMTRKSEETITPWNFEEVVDKGASAQSFIERMTNFDKNLPNEKVLPKHSLLYEYFTVYNELTKVKYVTEGMRKPAFLSGEQKKAIVDLLFKTNRKVTVKQLKEDYFKKIECFDSVEISGVEDRFNASLGTYHDLLKIIKDKDFLDNEENEDILEDIVLTLTLFEDREMIEERLKTYAHLFDDKVMKQLKRRRYTGWGRLSRKLINGIRDKQSGKTILDFLKSDGFANRNFMQLIHDDSLTFKEDIQKAQVSGQGDSLHEHIANLAGSPAIKKGILQTVKVVDELVKVMGRHKPENIVIEMARENQTTQKGQKNSRERMKRIEEGIKELGSQILKEHPVENTQLQNEKLYLYYLQNGRDMYVDQELDINRLSDYDVDHIVPQSFLKDDSIDNKVLTRSDKARGKSDNVPSEEVVKKMKNYWRQLLNAKLITQRKFDNLTKAERGGLSELDKAGFIKRQLVETRQITKHVAQILDSRMNTKYDENDKLIREVKVITLKSKLVSDFRKDFQFYKVREINNYHHAHDAYLNAVVGTALIKKYPKLESEFVYGDYKVYDVRKMIAKSEQEIGKATAKYFFYSNIMNFFKTEITLANGEIRKRPLIETNGETGEIVWDKGRDFATVRKVLSMPQVNIVKKTEVQTGGFSKESILPKRNSDKLIARKKDWDPKKYGGFDSPTVAYSVLVVAKVEKGKSKKLKSVKELLGITIMERSSFEKNPIDFLEAKGYKEVKKDLIIKLPKYSLFELENGRKRMLASAGELQKGNELALPSKYVNFLYLASHYEKLKGSPEDNEQKQLFVEQHKHYLDEIIEQISEFSKRVILADANLDKVLSAYNKHRDKPIREQAENIIHLFTLTNLGAPAAFKYFDTTIDRKRYTSTKEVLDATLIHQSITGLYETRIDLSQLGGDGGGGGGGSPAPGGTLQLDDEYRLYSPLVKPDQNIQFWLEQFPQAWAETAGMGLAKQVPPQVIQLKASATPVSVRQYPLSKEAQEGIRPHVQRLIQQGILVPVQSPWNTPLLPVRKPGTNDYRPVQDLREVNKRVQDIHPTVPNPYNLLCALPPQRSWYTVLDLKDAFFCLRLHPTSQPLFAFEWRDPGTGRTGQLTWTRLPQGFKNSPTIFNEALHRDLANFRIQHPQVTLLQYVDDLLLAGATKQDCLEGTKALLLELSDLGYRASAKKAQICRREVTYLGYSLRDGQRWLTEARKKTVVQIPAPTTAKQVREFLGTAGFCRLWIPGFATLAAPLYPLTKPKGEFSWAPEHQKAFDAIKKALLSAPALALPDVTKPFTLYVDERKGVARGVLTQTLGPWRRPVAYLSKKLDPVASGWPVCLKAIAAVAILVKDADKLTLGQNITVIAPHALENIVRQPPDRWMTNARMTHYQSLLLTERVTFAPPAALNPATLLPEETDEPVTHDCHQLLIEETGVRKDLTDIPLTGEVLTWFTDGSSYVVEGKRMAGAAVVDGTRTIWASSLPEGTSAQKAELMALTQALRLAEGKSINIYTDSRYAFATAHVHGAIYKQRGWLTSAGREIKNKEEILSLLEALHLPKRLAIIHCPGHQKAKDPISRGNQMADRVAKQAAQGVNLLAGKRTADGSEFEKRTADGSEFESPKKKAKVE

SEQ ID NO: 403 - protein, 2088 aa, synthetic construct; identical to SEQ ID NO: 130

SEQ ID NO: 404 - protein, 2094 aa, synthetic construct; identical to SEQ ID NO: 161

SEQ ID NO: 405 - protein, 2085 aa, synthetic construct
MPAAKRVKLDGGDKKYSIGLDIGTNSVGWAVITDEYKVPSKKFKVLGNTDRHSIKKNLIGALLFDSGETAEATRLKRTARRRYTRRKNRICYLQEIFSNEMAKVDDSFFHRLEESFLVEEDKKHERHPIFGNIVDEVAYHEKYPTIYHLRKKLVDSTDKADLRLIYLALAHMIKFRGHFLIEGDLNPDNSDVDKLFIQLVQTYNQLFEENPINASGVDAKAILSARLSKSRRLENLIAQLPGEKKNGLFGNLIALSLGLTPNFKSNFDLAEDAKLQLSKDTYDDDLDNLLAQIGDQYADLFLAAKNLSDAILLSDILRVNTEITKAPLSASMIKRYDEHHQDLTLLKALVRQQLPEKYKEIFFDQSKNGYAGYIDGGASQEEFYKFIKPILEKMDGTEELLVKLNREDLLRKQRTFDNGSIPHQIHLGELHAILRRQEDFYPFLKDNREKIEKILTFRIPYYVGPLARGNSRFAWMTRKSEETITPWNFEEVVDKGASAQSFIERMTNFDKNLPNEKVLPKHSLLYEYFTVYNELTKVKYVTEGMRKPAFLSGEQKKAIVDLLFKTNRKVTVKQLKEDYFKKIECFDSVEISGVEDRFNASLGTYHDLLKIIKDKDFLDNEENEDILEDIVLTLTLFEDREMIEERLKTYAHLFDDKVMKQLKRRRYTGWGRLSRKLINGIRDKQSGKTILDFLKSDGFANRNFMQLIHDDSLTFKEDIQKAQVSGQGDSLHEHIANLAGSPAIKKGILQTVKVVDELVKVMGRHKPENIVIEMARENQTTQKGQKNSRERMKRIEEGIKELGSQILKEHPVENTQLQNEKLYLYYLQNGRDMYVDQELDINRLSDYDVDHIVPQSFLKDDSIDNKVLTRSDKARGKSDNVPSEEVVKKMKNYWRQLLNAKLITQRKFDNLTKAERGGLSELDKAGFIKRQLVETRQITKHVAQILDSRMNTKYDENDKLIREVKVITLKSKLVSDFRKDFQFYKVREINNYHHAHDAYLNAVVGTALIKKYPKLESEFVYGDYKVYDVRKMIAKSEQEIGKATAKYFFYSNIMNFFKTEITLANGEIRKRPLIETNGETGEIVWDKGRDFATVRKVLSMPQVNIVKKTEVQTGGFSKESILPKRNSDKLIARKKDWDPKKYGGFDSPTVAYSVLVVAKVEKGKSKKLKSVKELLGITIMERSSFEKNPIDFLEAKGYKEVKKDLIIKLPKYSLFELENGRKRMLASAGELQKGNELALPSKYVNFLYLASHYEKLKGSPEDNEQKQLFVEQHKHYLDEIIEQISEFSKRVILADANLDKVLSAYNKHRDKPIREQAENIIHLFTLTNLGAPAAFKYFDTTIDRKRYTSTKEVLDATLIHQSITGLYETRIDLSQLGGDGGGGGGSSGGTLQLDDEYRLYSPLVKPDQNIQFWLEQFPQAWAETAGMGLAKQVPPQVIQLKASATPVSVRQYPLSKEAQEGIRPHVQRLIQQGILVPVQSPWNTPLLPVRKPGTNDYRPVQDLREVNKRVQDIHPTVPNPYNLLCALPPQRSWYTVLDLKDAFFCLRLHPTSQPLFAFEWRDPGTGRTGQLTWTRLPQGFKNSPTIFNEALHRDLANFRIQHPQVTLLQYVDDLLLAGATKQDCLEGTKALLLELSDLGYRASAKKAQICRREVTYLGYSLRDGQRWLTEARKKTVVQIPAPTTAKQVREFLGTAGFCRLWIPGFATLAAPLYPLTKPKGEFSWAPEHQKAFDAIKKALLSAPALALPDVTKPFTLYVDERKGVARGVLTQTLGPWRRPVAYLSKKLDPVASGWPVCLKAIAAVAILVKDADKLTLGQNITVIAPHALENIVRQPPDRWMTNARMTHYQSLLLTERVTFAPPAALNPATLLPEETDEPVTHDCHQLLIEETGVRKDLTDIPLTGEVLTWFTDGSSYVVEGKRMAGAAVVDGTRTIWASSLPEGTSAQKAELMALTQALRLAEGKSINIYTDSRYAFATAHVHGAIYKQRGWLTSAGREIKNKEEILSLLEALHLPKRLAIIHCPGHQKAKDPISRGNQMADRVAKQAAQGVNLLAGKRTADGSEFEKRTADGSEFESPKKKAKVE

SEQ ID NO: 406 - protein, 2088 aa, synthetic construct; identical to SEQ ID NO: 182

SEQ ID NO: 407 - protein, 2211 aa, synthetic construct
MPAAKRVKLDGGDKKYSIGLDIGTNSVGWAVITDEYKVPSKKFKVLGNTDRHSIKKNLIGALLFDSGETAEATRLKRTARRRYTRRKNRICYLQEIFSNEMAKVDDSFFHRLEESFLVEEDKKHERHPIFGNIVDEVAYHEKYPTIYHLRKKLVDSTDKADLRLIYLALAHMIKFRGHFLIEGDLNPDNSDVDKLFIQLVQTYNQLFEENPINASGVDAKAILSARLSKSRRLENLIAQLPGEKKNGLFGNLIALSLGLTPNFKSNFDLAEDAKLQLSKDTYDDDLDNLLAQIGDQYADLFLAAKNLSDAILLSDILRVNTEITKAPLSASMIKRYDEHHQDLTLLKALVRQQLPEKYKEIFFDQSKNGYAGYIDGGASQEEFYKFIKPILEKMDGTEELLVKLNREDLLRKQRTFDNGSIPHQIHLGELHAILRRQEDFYPFLKDNREKIEKILTFRIPYYVGPLARGNSRFAWMTRKSEETITPWNFEEVVDKGASAQSFIERMTNFDKNLPNEKVLPKHSLLYEYFTVYNELTKVKYVTEGMRKPAFLSGEQKKAIVDLLFKTNRKVTVKQLKEDYFKKIECFDSVEISGVEDRFNASLGTYHDLLKIIKDKDFLDNEENEDILEDIVLTLTLFEDREMIEERLKTYAHLFDDKVMKQLKRRRYTGWGRLSRKLINGIRDKQSGKTILDFLKSDGFANRNFMQLIHDDSLTFKEDIQKAQVSGQGDSLHEHIANLAGSPAIKKGILQTVKVVDELVKVMGRHKPENIVIEMARENQTTQKGQKNSRERMKRIEEGIKELGSQILKEHPVENTQLQNEKLYLYYLQNGRDMYVDQELDINRLSDYDVDHIVPQSFLKDDSIDNKVLTRSDKARGKSDNVPSEEVVKKMKNYWRQLLNAKLITQRKFDNLTKAERGGLSELDKAGFIKRQLVETRQITKHVAQILDSRMNTKYDENDKLIREVKVITLKSKLVSDFRKDFQFYKVREINNYHHAHDAYLNAVVGTALIKKYPKLESEFVYGDYKVYDVRKMIAKSEQEIGKATAKYFFYSNIMNFFKTEITLANGEIRKRPLIETNGETGEIVWDKGRDFATVRKVLSMPQVNIVKKTEVQTGGFSKESILPKRNSDKLIARKKDWDPKKYGGFDSPTVAYSVLVVAKVEKGKSKKLKSVKELLGITIMERSSFEKNPIDFLEAKGYKEVKKDLIIKLPKYSLFELENGRKRMLASAGELQKGNELALPSKYVNFLYLASHYEKLKGSPEDNEQKQLFVEQHKHYLDEIIEQISEFSKRVILADANLDKVLSAYNKHRDKPIREQAENIIHLFTLTNLGAPAAFKYFDTTIDRKRYTSTKEVLDATLIHQSITGLYETRIDLSQLGGDGGAEAAAKEAAAKEAAAKEAAAKALEAEAAAKEAAAKEAAAKEAAAKAGGMDPLQLLQPLEAEIKGTKLKAHWNSGATITCVPEAFLEDERPIQTMLIKTIHGEKQQDVYYLTFKVQGRKVEAEVLASPYDYILLNPSDVPWLMKKPLQLTVLVPLHEYQERLLQQTALPKEQKELLQKLFLKYDALWQHWENQVGHRRIKPHNIATGTLAPRPQKQYPINPKAKPSIQIVIDDLLKQGVLIQQNSTMNTPVYPVPKPDGKWRMVLDYREVNKTIPLIAAQNQHSAGILSSIYRGKYKTTLDLTNGFWAHPITPESYWLTAFTWQGKQYCWTRLPQGFLNSPALFTADVVDLLKEIPNVQAYVDDIYISHDDPQEHLEQLEKIFSILLNAGYVVSLKKSEIAQREVEFLGFNITKEGRGLTDTFKQKLLNITPPKDLKQLQSILGLLNFARNFIPNYSELVKPLYTIVANANGKFISWTEDNSNQLQHIISVLNQADNLEERNPETRLIIKVNSSPSAGYIRYYNEGSKRPIMYVNYIFSKAEAKFTQTEKLLTTMHKGLIKAMDLAMGQEILVYSPIVSMTKIQRTPLPERKALPVRWITWMTYLEDPRIQFHYDKSLPELQQIPNVTEDVIAKTKHPSEFAMVFYTDGSAIKHPDVNKSHSAGMGIAQVQFIPEYKIVHQWSIPLGDHTAQLAEIAAVEFACKKALKISGPVLIVTDSFYVAESANKELPYWKSNGFLNNKKKPLRHVSKWKSIAECLQLKPDIIIMHEKGHQQPMTTLHTEGNNLADKLATQGSYVVHAGKRTADGSEFEKRTADGSEFESPKKKAKVE

SEQ ID NO: 408 - protein, 2198 aa, synthetic construct
MPAAKRVKLDGGDKKYSIGLDIGTNSVGWAVITDEYKVPSKKFKVLGNTDRHSIKKNLIGALLFDSGETAEATRLKRTARRRYTRRKNRICYLQEIFSNEMAKVDDSFFHRLEESFLVEEDKKHERHPIFGNIVDEVAYHEKYPTIYHLRKKLVDSTDKADLRLIYLALAHMIKFRGHFLIEGDLNPDNSDVDKLFIQLVQTYNQLFEENPINASGVDAKAILSARLSKSRRLENLIAQLPGEKKNGLFGNLIALSLGLTPNFKSNFDLAEDAKLQLSKDTYDDDLDNLLAQIGDQYADLFLAAKNLSDAILLSDILRVNTEITKAPLSASMIKRYDEHHQDLTLLKALVRQQLPEKYKEIFFDQSKNGYAGYIDGGASQEEFYKFIKPILEKMDGTEELLVKLNREDLLRKQRTFDNGSIPHQIHLGELHAILRRQEDFYPFLKDNREKIEKILTFRIPYYVGPLARGNSRFAWMTRKSEETITPWNFEEVVDKGASAQSFIERMTNFDKNLPNEKVLPKHSLLYEYFTVYNELTKVKYVTEGMRKPAFLSGEQKKAIVDLLFKTNRKVTVKQLKEDYFKKIECFDSVEISGVEDRFNASLGTYHDLLKIIKDKDFLDNEENEDILEDIVLTLTLFEDREMIEERLKTYAHLFDDKVMKQLKRRRYTGWGRLSRKLINGIRDKQSGKTILDFLKSDGFANRNFMQLIHDDSLTFKEDIQKAQVSGQGDSLHEHIANLAGSPAIKKGILQTVKVVDELVKVMGRHKPENIVIEMARENQTTQKGQKNSRERMKRIEEGIKELGSQILKEHPVENTQLQNEKLYLYYLQNGRDMYVDQELDINRLSDYDVDHIVPQSFLKDDSIDNKVLTRSDKARGKSDNVPSEEVVKKMKNYWRQLLNAKLITQRKFDNLTKAERGGLSELDKAGFIKRQLVETRQITKHVAQILDSRMNTKYDENDKLIREVKVITLKSKLVSDFRKDFQFYKVREINNYHHAHDAYLNAVVGTALIKKYPKLESEFVYGDYKVYDVRKMIAKSEQEIGKATAKYFFYSNIMNFFKTEITLANGEIRKRPLIETNGETGEIVWDKGRDFATVRKVLSMPQVNIVKKTEVQTGGFSKESILPKRNSDKLIARKKDWDPKKYGGFDSPTVAYSVLVVAKVEKGKSKKLKSVKELLGITIMERSSFEKNPIDFLEAKGYKEVKKDLIIKLPKYSLFELENGRKRMLASAGELQKGNELALPSKYVNFLYLASHYEKLKGSPEDNEQKQLFVEQHKHYLDEIIEQISEFSKRVILADANLDKVLSAYNKHRDKPIREQAENIIHLFTLTNLGAPAAFKYFDTTIDRKRYTSTKEVLDATLIHQSITGLYETRIDLSQLGGDGGSGGSSGGSSGSETPGTSESATPESSGGSSGGSSGGMDPLQLLQPLEAEIKGTKLKAHWNSGATITCVPEAFLEDERPIQTMLIKTIHGEKQQDVYYLTFKVQGRKVEAEVLASPYDYILLNPSDVPWLMKKPLQLTVLVPLHEYQERLLQQTALPKEQKELLQKLFLKYDALWQHWENQVGHRRIKPHNIATGTLAPRPQKQYPINPKAKPSIQIVIDDLLKQGVLIQQNSTMNTPVYPVPKPDGKWRMVLDYREVNKTIPLIAAQNQHSAGILSSIYRGKYKTTLDLTNGFWAHPITPESYWLTAFTWQGKQYCWTRLPQGFLNSPALFTADVVDLLKEIPNVQAYVDDIYISHDDPQEHLEQLEKIFSILLNAGYVVSLKKSEIAQREVEFLGFNITKEGRGLTDTFKQKLLNITPPKDLKQLQSILGLLNFARNFIPNYSELVKPLYTIVANANGKFISWTEDNSNQLQHIISVLNQADNLEERNPETRLIIKVNSSPSAGYIRYYNEGSKRPIMYVNYIFSKAEAKFTQTEKLLTTMHKGLIKAMDLAMGQEILVYSPIVSMTKIQRTPLPERKALPVRWITWMTYLEDPRIQFHYDKSLPELQQIPNVTEDVIAKTKHPSEFAMVFYTDGSAIKHPDVNKSHSAGMGIAQVQFIPEYKIVHQWSIPLGDHTAQLAEIAAVEFACKKALKISGPVLIVTDSFYVAESANKELPYWKSNGFLNNKKKPLRHVSKWKSIAECLQLKPDIIIMHEKGHQQPMTTLHTEGNNLADKLATQGSYVVHAGKRTADGSEFEKRTADGSEFESPKKKAKVE

SEQ ID NO: 409 - protein, 2176 aa, synthetic construct
MPAAKRVKLDGGDKKYSIGLDIGTNSVGWAVITDEYKVPSKKFKVLGNTDRHSIKKNLIGALLFDSGETAEATRLKRTARRRYTRRKNRICYLQEIFSNEMAKVDDSFFHRLEESFLVEEDKKHERHPIFGNIVDEVAYHEKYPTIYHLRKKLVDSTDKADLRLIYLALAHMIKFRGHFLIEGDLNPDNSDVDKLFIQLVQTYNQLFEENPINASGVDAKAILSARLSKSRRLENLIAQLPGEKKNGLFGNLIALSLGLTPNFKSNFDLAEDAKLQLSKDTYDDDLDNLLAQIGDQYADLFLAAKNLSDAILLSDILRVNTEITKAPLSASMIKRYDEHHQDLTLLKALVRQQLPEKYKEIFFDQSKNGYAGYIDGGASQEEFYKFIKPILEKMDGTEELLVKLNREDLLRKQRTFDNGSIPHQIHLGELHAILRRQEDFYPFLKDNREKIEKILTFRIPYYVGPLARGNSRFAWMTRKSEETITPWNFEEVVDKGASAQSFIERMTNFDKNLPNEKVLPKHSLLYEYFTVYNELTKVKYVTEGMRKPAFLSGEQKKAIVDLLFKTNRKVTVKQLKEDYFKKIECFDSVEISGVEDRFNASLGTYHDLLKIIKDKDFLDNEENEDILEDIVLTLTLFEDREMIEERLKTYAHLFDDKVMKQLKRRRYTGWGRLSRKLINGIRDKQSGKTILDFLKSDGFANRNFMQLIHDDSLTFKEDIQKAQVSGQGDSLHEHIANLAGSPAIKKGILQTVKVVDELVKVMGRHKPENIVIEMARENQTTQKGQKNSRERMKRIEEGIKELGSQILKEHPVENTQLQNEKLYLYYLQNGRDMYVDQELDINRLSDYDVDHIVPQSFLKDDSIDNKVLTRSDKARGKSDNVPSEEVVKKMKNYWRQLLNAKLITQRKFDNLTKAERGGLSELDKAGFIKRQLVETRQITKHVAQILDSRMNTKYDENDKLIREVKVITLKSKLVSDFRKDFQFYKVREINNYHHAHDAYLNAVVGTALIKKYPKLESEFVYGDYKVYDVRKMIAKSEQEIGKATAKYFFYSNIMNFFKTEITLANGEIRKRPLIETNGETGEIVWDKGRDFATVRKVLSMPQVNIVKKTEVQTGGFSKESILPKRNSDKLIARKKDWDPKKYGGFDSPTVAYSVLVVAKVEKGKSKKLKSVKELLGITIMERSSFEKNPIDFLEAKGYKEVKKDLIIKLPKYSLFELENGRKRMLASAGELQKGNELALPSKYVNFLYLASHYEKLKGSPEDNEQKQLFVEQHKHYLDEIIEQISEFSKRVILADANLDKVLSAYNKHRDKPIREQAENIIHLFTLTNLGAPAAFKYFDTTIDRKRYTSTKEVLDATLIHQSITGLYETRIDLSQLGGDGGGSSEAAAKPAPGGMDPLQLLQPLEAEIKGTKLKAHWNSGATITCVPEAFLEDERPIQTMLIKTIHGEKQQDVYYLTFKVQGRKVEAEVLASPYDYILLNPSDVPWLMKKPLQLTVLVPLHEYQERLLQQTALPKEQKELLQKLFLKYDALWQHWENQVGHRRIKPHNIATGTLAPRPQKQYPINPKAKPSIQIVIDDLLKQGVLIQQNSTMNTPVYPVPKPDGKWRMVLDYREVNKTIPLIAAQNQHSAGILSSIYRGKYKTTLDLTNGFWAHPITPESYWLTAFTWQGKQYCWTRLPQGFLNSPALFTADVVDLLKEIPNVQAYVDDIYISHDDPQEHLEQLEKIFSILLNAGYVVSLKKSEIAQREVEFLGFNITKEGRGLTDTFKQKLLNITPPKDLKQLQSILGLLNFARNFIPNYSELVKPLYTIVANANGKFISWTEDNSNQLQHIISVLNQADNLEERNPETRLIIKVNSSPSAGYIRYYNEGSKRPIMYVNYIFSKAEAKFTQTEKLLTTMHKGLIKAMDLAMGQEILVYSPIVSMTKIQRTPLPERKALPVRWITWMTYLEDPRIQFHYDKSLPELQQIPNVTEDVIAKTKHPSEFAMVFYTDGSAIKHPDVNKSHSAGMGIAQVQFIPEYKIVHQWSIPLGDHTAQLAEIAAVEFACKKALKISGPVLIVTDSFYVAESANKELPYWKSNGFLNNKKKPLRHVSKWKSIAECLQLKPDIIIMHEKGHQQPMTTLHTEGNNLADKLATQGSYVVHAGKRTADGSEFEKRTADGSEFESPKKKAKVE

SEQ ID NO: 410 - protein, 2181 aa, synthetic construct
MPAAKRVKLDGGDKKYSIGLDIGTNSVGWAVITDEYKVPSKKFKVLGNTDRHSIKKNLIGALLFDSGETAEATRLKRTARRRYTRRKNRICYLQEIFSNEMAKVDDSFFHRLEESFLVEEDKKHERHPIFGNIVDEVAYHEKYPTIYHLRKKLVDSTDKADLRLIYLALAHMIKFRGHFLIEGDLNPDNSDVDKLFIQLVQTYNQLFEENPINASGVDAKAILSARLSKSRRLENLIAQLPGEKKNGLFGNLIALSLGLTPNFKSNFDLAEDAKLQLSKDTYDDDLDNLLAQIGDQYADLFLAAKNLSDAILLSDILRVNTEITKAPLSASMIKRYDEHHQDLTLLKALVRQQLPEKYKEIFFDQSKNGYAGYIDGGASQEEFYKFIKPILEKMDGTEELLVKLNREDLLRKQRTFDNGSIPHQIHLGELHAILRRQEDFYPFLKDNREKIEKILTFRIPYYVGPLARGNSRFAWMTRKSEETITPWNFEEVVDKGASAQSFIERMTNFDKNLPNEKVLPKHSLLYEYFTVYNELTKVKYVTEGMRKPAFLSGEQKKAIVDLLFKTNRKVTVKQLKEDYFKKIECFDSVEISGVEDRFNASLGTYHDLLKIIKDKDFLDNEENEDILEDIVLTLTLFEDREMIEERLKTYAHLFDDKVMKQLKRRRYTGWGRLSRKLINGIRDKQSGKTILDFLKSDGFANRNFMQLIHDDSLTFKEDIQKAQVSGQGDSLHEHIANLAGSPAIKKGILQTVKVVDELVKVMGRHKPENIVIEMARENQTTQKGQKNSRERMKRIEEGIKELGSQILKEHPVENTQLQNEKLYLYYLQNGRDMYVDQELDINRLSDYDVDHIVPQSFLKDDSIDNKVLTRSDKARGKSDNVPSEEVVKKMKNYWRQLLNAKLITQRKFDNLTKAERGGLSELDKAGFIKRQLVETRQITKHVAQILDSRMNTKYDENDKLIREVKVITLKSKLVSDFRKDFQFYKVREINNYHHAHDAYLNAVVGTALIKKYPKLESEFVYGDYKVYDVRKMIAKSEQEIGKATAKYFFYSNIMNFFKTEITLANGEIRKRPLIETNGETGEIVWDKGRDFATVRKVLSMPQVNIVKKTEVQTGGFSKESILPKRNSDKLIARKKDWDPKKYGGFDSPTVAYSVLVVAKVEKGKSKKLKSVKELLGITIMERSSFEKNPIDFLEAKGYKEVKKDLIIKLPKYSLFELENGRKRMLASAGELQKGNELALPSKYVNFLYLASHYEKLKGSPEDNEQKQLFVEQHKHYLDEIIEQISEFSKRVILADANLDKVLSAYNKHRDKPIREQAENIIHLFTLTNLGAPAAFKYFDTTIDRKRYTSTKEVLDATLIHQSITGLYETRIDLSQLGGDGGSGSETPGTSESATPESGGMDPLQLLQPLEAEIKGTKLKAHWNSGATITCVPEAFLEDERPIQTMLIKTIHGEKQQDVYYLTFKVQGRKVEAEVLASPYDYILLNPSDVPWLMKKPLQLTVLVPLHEYQERLLQQTALPKEQKELLQKLFLKYDALWQHWENQVGHRRIKPHNIATGTLAPRPQKQYPINPKAKPSIQIVIDDLLKQGVLIQQNSTMNTPVYPVPKPDGKWRMVLDYREVNKTIPLIAAQNQHSAGILSSIYRGKYKTTLDLTNGFWAHPITPESYWLTAFTWQGKQYCWTRLPQGFLNSPALFTADVVDLLKEIPNVQAYVDDIYISHDDPQEHLEQLEKIFSILLNAGYVVSLKKSEIAQREVEFLGFNITKEGRGLTDTFKQKLLNITPPKDLKQLQSILGLLNFARNFIPNYSELVKPLYTIVANANGKFISWTEDNSNQLQHIISVLNQADNLEERNPETRLIIKVNSSPSAGYIRYYNEGSKRPIMYVNYIFSKAEAKFTQTEKLLTTMHKGLIKAMDLAMGQEILVYSPIVSMTKIQRTPLPERKALPVRWITWMTYLEDPRIQFHYDKSLPELQQIPNVTEDVIAKTKHPSEFAMVFYTDGSAIKHPDVNKSHSAGMGIAQVQFIPEYKIVHQWSIPLGDHTAQLAEIAAVEFACKKALKISGPVLIVTDSFYVAESANKELPYWKSNGFLNNKKKPLRHVSKWKSIAECLQLKPDIIIMHEKGHQQPMTTLHTEGNNLADKLATQGSYVVHAGKRTADGSEFEKRTADGSEFESPKKKAKVE

SEQ ID NO: 411 - protein, 2178 aa, synthetic construct
MPAAKRVKLDGGDKKYSIGLDIGTNSVGWAVITDEYKVPSKKFKVLGNTDRHSIKKNLIGALLFDSGETAEATRLKRTARRRYTRRKNRICYLQEIFSNEMAKVDDSFFHRLEESFLVEEDKKHERHPIFGNIVDEVAYHEKYPTIYHLRKKLVDSTDKADLRLIYLALAHMIKFRGHFLIEGDLNPDNSDVDKLFIQLVQTYNQLFEENPINASGVDAKAILSARLSKSRRLENLIAQLPGEKKNGLFGNLIALSLGLTPNFKSNFDLAEDAKLQLSKDTYDDDLDNLLAQIGDQYADLFLAAKNLSDAILLSDILRVNTEITKAPLSASMIKRYDEHHQDLTLLKALVRQQLPEKYKEIFFDQSKNGYAGYIDGGASQEEFYKFIKPILEKMDGTEELLVKLNREDLLRKQRTFDNGSIPHQIHLGELHAILRRQEDFYPFLKDNREKIEKILTFRIPYYVGPLARGNSRFAWMTRKSEETITPWNFEEVVDKGASAQSFIERMTNFDKNLPNEKVLPKHSLLYEYFTVYNELTKVKYVTEGMRKPAFLSGEQKKAIVDLLFKTNRKVTVKQLKEDYFKKIECFDSVEISGVEDRFNASLGTYHDLLKIIKDKDFLDNEENEDILEDIVLTLTLFEDREMIEERLKTYAHLFDDKVMKQLKRRRYTGWGRLSRKLINGIRDKQSGKTILDFLKSDGFANRNFMQLIHDDSLTFKEDIQKAQVSGQGDSLHEHIANLAGSPAIKKGILQTVKVVDELVKVMGRHKPENIVIEMARENQTTQKGQKNSRERMKRIEEGIKELGSQILKEHPVENTQLQNEKLYLYYLQNGRDMYVDQELDINRLSDYDVDHIVPQSFLKDDSIDNKVLTRSDKARGKSDNVPSEEVVKKMKNYWRQLLNAKLITQRKFDNLTKAERGGLSELDKAGFIKRQLVETRQITKHVAQILDSRMNTKYDENDKLIREVKVITLKSKLVSDFRKDFQFYKVREINNYHHAHDAYLNAVVGTALIKKYPKLESEFVYGDYKVYDVRKMIAKSEQEIGKATAKYFFYSNIMNFFKTEITLANGEIRKRPLIETNGETGEIVWDKGRDFATVRKVLSMPQVNIVKKTEVQTGGFSKESILPKRNSDKLIARKKDWDPKKYGGFDSPTVAYSVLVVAKVEKGKSKKLKSVKELLGITIMERSSFEKNPIDFLEAKGYKEVKKDLIIKLPKYSLFELENGRKRMLASAGELQKGNELALPSKYVNFLYLASHYEKLKGSPEDNEQKQLFVEQHKHYLDEIIEQISEFSKRVILADANLDKVLSAYNKHRDKPIREQAENIIHLFTLTNLGAPAAFKYFDTTIDRKRYTSTKEVLDATLIHQSITGLYETRIDLSQLGGDGGPAPAPAPAPAPAPGGMDPLQLLQPLEAEIKGTKLKAHWNSGATITCVPEAFLEDERPIQTMLIKTIHGEKQQDVYYLTFKVQGRKVEAEVLASPYDYILLNPSDVPWLMKKPLQLTVLVPLHEYQERLLQQTALPKEQKELLQKLFLKYDALWQHWENQVGHRRIKPHNIATGTLAPRPQKQYPINPKAKPSIQIVIDDLLKQGVLIQQNSTMNTPVYPVPKPDGKWRMVLDYREVNKTIPLIAAQNQHSAGILSSIYRGKYKTTLDLTNGFWAHPITPESYWLTAFTWQGKQYCWTRLPQGFLNSPALFTADVVDLLKEIPNVQAYVDDIYISHDDPQEHLEQLEKIFSILLNAGYVVSLKKSEIAQREVEFLGFNITKEGRGLTDTFKQKLLNITPPKDLKQLQSILGLLNFARNFIPNYSELVKPLYTIVANANGKFISWTEDNSNQLQHIISVLNQADNLEERNPETRLIIKVNSSPSAGYIRYYNEGSKRPIMYVNYIFSKAEAKFTQTEKLLTTMHKGLIKAMDLAMGQEILVYSPIVSMTKIQRTPLPERKALPVRWITWMTYLEDPRIQFHYDKSLPELQQIPNVTEDVIAKTKHPSEFAMVFYTDGSAIKHPDVNKSHSAGMGIAQVQFIPEYKIVHQWSIPLGDHTAQLAEIAAVEFACKKALKISGPVLIVTDSFYVAESANKELPYWKSNGFLNNKKKPLRHVSKWKSIAECLQLKPDIIIMHEKGHQQPMTTLHTEGNNLADKLATQGSYVVHAGKRTADGSEFEKRTADGSEFESPKKKAKVE

SEQ ID NO: 412 - protein, 2176 aa, synthetic construct
MPAAKRVKLDGGDKKYSIGLDIGTNSVGWAVITDEYKVPSKKFKVLGNTDRHSIKKNLIGALLFDSGETAEATRLKRTARRRYTRRKNRICYLQEIFSNEMAKVDDSFFHRLEESFLVEEDKKHERHPIFGNIVDEVAYHEKYPTIYHLRKKLVDSTDKADLRLIYLALAHMIKFRGHFLIEGDLNPDNSDVDKLFIQLVQTYNQLFEENPINASGVDAKAILSARLSKSRRLENLIAQLPGEKKNGLFGNLIALSLGLTPNFKSNFDLAEDAKLQLSKDTYDDDLDNLLAQIGDQYADLFLAAKNLSDAILLSDILRVNTEITKAPLSASMIKRYDEHHQDLTLLKALVRQQLPEKYKEIFFDQSKNGYAGYIDGGASQEEFYKFIKPILEKMDGTEELLVKLNREDLLRKQRTFDNGSIPHQIHLGELHAILRRQEDFYPFLKDNREKIEKILTFRIPYYVGPLARGNSRFAWMTRKSEETITPWNFEEVVDKGASAQSFIERMTNFDKNLPNEKVLPKHSLLYEYFTVYNELTKVKYVTEGMRKPAFLSGEQKKAIVDLLFKTNRKVTVKQLKEDYFKKIECFDSVEISGVEDRFNASLGTYHDLLKIIKDKDFLDNEENEDILEDIVLTLTLFEDREMIEERLKTYAHLFDDKVMKQLKRRRYTGWGRLSRKLINGIRDKQSGKTILDFLKSDGFANRNFMQLIHDDSLTFKEDIQKAQVSGQGDSLHEHIANLAGSPAIKKGILQTVKVVDELVKVMGRHKPENIVIEMARENQTTQKGQKNSRERMKRIEEGIKELGSQILKEHPVENTQLQNEKLYLYYLQNGRDMYVDQELDINRLSDYDVDHIVPQSFLKDDSIDNKVLTRSDKARGKSDNVPSEEVVKKMKNYWRQLLNAKLITQRKFDNLTKAERGGLSELDKAGFIKRQLVETRQITKHVAQILDSRMNTKYDENDKLIREVKVITLKSKLVSDFRKDFQFYKVREINNYHHAHDAYLNAVVGTALIKKYPKLESEFVYGDYKVYDVRKMIAKSEQEIGKATAKYFFYSNIMNFFKTEITLANGEIRKRPLIETNGETGEIVWDKGRDFATVRKVLSMPQVNIVKKTEVQTGGFSKESILPKRNSDKLIARKKDWDPKKYGGFDSPTVAYSVLVVAKVEKGKSKKLKSVKELLGITIMERSSFEKNPIDFLEAKGYKEVKKDLIIKLPKYSLFELENGRKRMLASAGELQKGNELALPSKYVNFLYLASHYEKLKGSPEDNEQKQLFVEQHKHYLDEIIEQISEFSKRVILADANLDKVLSAYNKHRDKPIREQAENIIHLFTLTNLGAPAAFKYFDTTIDRKRYTSTKEVLDATLIHQSITGLYETRIDLSQLGGDGGPAPEAAAKGSSGGMDPLQLLQPLEAEIKGTKLKAHWNSGATITCVPEAFLEDERPIQTMLIKTIHGEKQQDVYYLTFKVQGRKVEAEVLASPYDYILLNPSDVPWLMKKPLQLTVLVPLHEYQERLLQQTALPKEQKELLQKLFLKYDALWQHWENQVGHRRIKPHNIATGTLAPRPQKQYPINPKAKPSIQIVIDDLLKQGVLIQQNSTMNTPVYPVPKPDGKWRMVLDYREVNKTIPLIAAQNQHSAGILSSIYRGKYKTTLDLTNGFWAHPITPESYWLTAFTWQGKQYCWTRLPQGFLNSPALFTADVVDLLKEIPNVQAYVDDIYISHDDPQEHLEQLEKIFSILLNAGYVVSLKKSEIAQREVEFLGFNITKEGRGLTDTFKQKLLNITPPKDLKQLQSILGLLNFARNFIPNYSELVKPLYTIVANANGKFISWTEDNSNQLQHIISVLNQADNLEERNPETRLIIKVNSSPSAGYIRYYNEGSKRPIMYVNYIFSKAEAKFTQTEKLLTTMHKGLIKAMDLAMGQEILVYSPIVSMTKIQRTPLPERKALPVRWITWMTYLEDPRIQFHYDKSLPELQQIPNVTEDVIAKTKHPSEFAMVFYTDGSAIKHPDVNKSHSAGMGIAQVQFIPEYKIVHQWSIPLGDHTAQLAEIAAVEFACKKALKISGPVLIVTDSFYVAESANKELPYWKSNGFLNNKKKPLRHVSKWKSIAECLQLKPDIIIMHEKGHQQPMTTLHTEGNNLADKLATQGSYVVHAGKRTADGSEFEKRTADGSEFESPKKKAKVE

SEQ ID NO: 413 - protein, 2180 aa, synthetic construct
MPAAKRVKLDGGDKKYSIGLDIGTNSVGWAVITDEYKVPSKKFKVLGNTDRHSIKKNLIGALLFDSGETAEATRLKRTARRRYTRRKNRICYLQEIFSNEMAKVDDSFFHRLEESFLVEEDKKHERHPIFGNIVDEVAYHEKYPTIYHLRKKLVDSTDKADLRLIYLALAHMIKFRGHFLIEGDLNPDNSDVDKLFIQLVQTYNQLFEENPINASGVDAKAILSARLSKSRRLENLIAQLPGEKKNGLFGNLIALSLGLTPNFKSNFDLAEDAKLQLSKDTYDDDLDNLLAQIGDQYADLFLAAKNLSDAILLSDILRVNTEITKAPLSASMIKRYDEHHQDLTLLKALVRQQLPEKYKEIFFDQSKNGYAGYIDGGASQEEFYKFIKPILEKMDGTEELLVKLNREDLLRKQRTFDNGSIPHQIHLGELHAILRRQEDFYPFLKDNREKIEKILTFRIPYYVGPLARGNSRFAWMTRKSEETITPWNFEEVVDKGASAQSFIERMTNFDKNLPNEKVLPKHSLLYEYFTVYNELTKVKYVTEGMRKPAFLSGEQKKAIVDLLFKTNRKVTVKQLKEDYFKKIECFDSVEISGVEDRFNASLGTYHDLLKIIKDKDFLDNEENEDILEDIVLTLTLFEDREMIEERLKTYAHLFDDKVMKQLKRRRYTGWGRLSRKLINGIRDKQSGKTILDFLKSDGFANRNFMQLIHDDSLTFKEDIQKAQVSGQGDSLHEHIANLAGSPAIKKGILQTVKVVDELVKVMGRHKPENIVIEMARENQTTQKGQKNSRERMKRIEEGIKELGSQILKEHPVENTQLQNEKLYLYYLQNGRDMYVDQELDINRLSDYDVDHIVPQSFLKDDSIDNKVLTRSDKARGKSDNVPSEEVVKKMKNYWRQLLNAKLITQRKFDNLTKAERGGLSELDKAGFIKRQLVETRQITKHVAQILDSRMNTKYDENDKLIREVKVITLKSKLVSDFRKDFQFYKVREINNYHHAHDAYLNAVVGTALIKKYPKLESEFVYGDYKVYDVRKMIAKSEQEIGKATAKYFFYSNIMNFFKTEITLANGEIRKRPLIETNGETGEIVWDKGRDFATVRKVLSMPQVNIVKKTEVQTGGFSKESILPKRNSDKLIARKKDWDPKKYGGFDSPTVAYSVLVVAKVEKGKSKKLKSVKELLGITIMERSSFEKNPIDFLEAKGYKEVKKDLIIKLPKYSLFELENGRKRMLASAGELQKGNELALPSKYVNFLYLASHYEKLKGSPEDNEQKQLFVEQHKHYLDEIIEQISEFSKRVILADANLDKVLSAYNKHRDKPIREQAENIIHLFTLTNLGAPAAFKYFDTTIDRKRYTSTKEVLDATLIHQSITGLYETRIDLSQLGGDGGEAAAKEAAAKEAAAKGGMDPLQLLQPLEAEIKGTKLKAHWNSGATITCVPEAFLEDERPIQTMLIKTIHGEKQQDVYYLTFKVQGRKVEAEVLASPYDYILLNPSDVPWLMKKPLQLTVLVPLHEYQERLLQQTALPKEQKELLQKLFLKYDALWQHWENQVGHRRIKPHNIATGTLAPRPQKQYPINPKAKPSIQIVIDDLLKQGVLIQQNSTMNTPVYPVPKPDGKWRMVLDYREVNKTIPLIAAQNQHSAGILSSIYRGKYKTTLDLTNGFWAHPITPESYWLTAFTWQGKQYCWTRLPQGFLNSPALFTADVVDLLKEIPNVQAYVDDIYISHDDPQEHLEQLEKIFSILLNAGYVVSLKKSEIAQREVEFLGFNITKEGRGLTDTFKQKLLNITPPKDLKQLQSILGLLNFARNFIPNYSELVKPLYTIVANANGKFISWTEDNSNQLQHIISVLNQADNLEERNPETRLIIKVNSSPSAGYIRYYNEGSKRPIMYVNYIFSKAEAKFTQTEKLLTTMHKGLIKAMDLAMGQEILVYSPIVSMTKIQRTPLPERKALPVRWITWMTYLEDPRIQFHYDKSLPELQQIPNVTEDVIAKTKHPSEFAMVFYTDGSAIKHPDVNKSHSAGMGIAQVQFIPEYKIVHQWSIPLGDHTAQLAEIAAVEFACKKALKISGPVLIVTDSFYVAESANKELPYWKSNGFLNNKKKPLRHVSKWKSIAECLQLKPDIIIMHEKGHQQPMTTLHTEGNNLADKLATQGSYVVHAGKRTADGSEFEKRTADGSEFESPKKKAKVE

SEQ ID NO: 414 - protein, 2176 aa, synthetic construct
MPAAKRVKLDGGDKKYSIGLDIGTNSVGWAVITDEYKVPSKKFKVLGNTDRHSIKKNLIGALLFDSGETAEATRLKRTARRRYTRRKNRICYLQEIFSNEMAKVDDSFFHRLEESFLVEEDKKHERHPIFGNIVDEVAYHEKYPTIYHLRKKLVDSTDKADLRLIYLALAHMIKFRGHFLIEGDLNPDNSDVDKLFIQLVQTYNQLFEENPINASGVDAKAILSARLSKSRRLENLIAQLPGEKKNGLFGNLIALSLGLTPNFKSNFDLAEDAKLQLSKDTYDDDLDNLLAQIGDQYADLFLAAKNLSDAILLSDILRVNTEITKAPLSASMIKRYDEHHQDLTLLKALVRQQLPEKYKEIFFDQSKNGYAGYIDGGASQEEFYKFIKPILEKMDGTEELLVKLNREDLLRKQRTFDNGSIPHQIHLGELHAILRRQEDFYPFLKDNREKIEKILTFRIPYYVGPLARGNSRFAWMTRKSEETITPWNFEEVVDKGASAQSFIERMTNFDKNLPNEKVLPKHSLLYEYFTVYNELTKVKYVTEGMRKPAFLSGEQKKAIVDLLFKTNRKVTVKQLKEDYFKKIECFDSVEISGVEDRFNASLGTYHDLLKIIKDKDFLDNEENEDILEDIVLTLTLFEDREMIEERLKTYAHLFDDKVMKQLKRRRYTGWGRLSRKLINGIRDKQSGKTILDFLKSDGFANRNFMQLIHDDSLTFKEDIQKAQVSGQGDSLHEHIANLAGSPAIKKGILQTVKVVDELVKVMGRHKPENIVIEMARENQTTQKGQKNSRERMKRIEEGIKELGSQILKEHPVENTQLQNEKLYLYYLQNGRDMYVDQELDINRLSDYDVDHIVPQSFLKDDSIDNKVLTRSDKARGKSDNVPSEEVVKKMKNYWRQLLNAKLITQRKFDNLTKAERGGLSELDKAGFIKRQLVETRQITKHVAQILDSRMNTKYDENDKLIREVKVITLKSKLVSDFRKDFQFYKVREINNYHHAHDAYLNAVVGTALIKKYPKLESEFVYGDYKVYDVRKMIAKSEQEIGKATAKYFFYSNIMNFFKTEITLANGEIRKRPLIETNGETGEIVWDKGRDFATVRKVLSMPQVNIVKKTEVQTGGFSKESILPKRNSDKLIARKKDWDPKKYGGFDSPTVAYSVLVVAKVEKGKSKKLKSVKELLGITIMERSSFEKNPIDFLEAKGYKEVKKDLIIKLPKYSLFELENGRKRMLASAGELQKGNELALPSKYVNFLYLASHYEKLKGSPEDNEQKQLFVEQHKHYLDEIIEQISEFSKRVILADANLDKVLSAYNKHRDKPIREQAENIIHLFTLTNLGAPAAFKYFDTTIDRKRYTSTKEVLDATLIHQSITGLYETRIDLSQLGGDGGEAAAKGSSPAPGGMDPLQLLQPLEAEIKGTKLKAHWNSGATITCVPEAFLEDERPIQTMLIKTIHGEKQQDVYYLTFKVQGRKVEAEVLASPYDYILLNPSDVPWLMKKPLQLTVLVPLHEYQERLLQQTALPKEQKELLQKLFLKYDALWQHWENQVGHRRIKPHNIATGTLAPRPQKQYPINPKAKPSIQIVIDDLLKQGVLIQQNSTMNTPVYPVPKPDGKWRMVLDYREVNKTIPLIAAQNQHSAGILSSIYRGKYKTTLDLTNGFWAHPITPESYWLTAFTWQGKQYCWTRLPQGFLNSPALFTADVVDLLKEIPNVQAYVDDIYISHDDPQEHLEQLEKIFSILLNAGYVVSLKKSEIAQREVEFLGFNITKEGRGLTDTFKQKLLNITPPKDLKQLQSILGLLNFARNFIPNYSELVKPLYTIVANANGKFISWTEDNSNQLQHIISVLNQADNLEERNPETRLIIKVNSSPSAGYIRYYNEGSKRPIMYVNYIFSKAEAKFTQTEKLLTTMHKGLIKAMDLAMGQEILVYSPIVSMTKIQRTPLPERKALPVRWITWMTYLEDPRIQFHYDKSLPELQQIPNVTEDVIAKTKHPSEFAMVFYTDGSAIKHPDVNKSHSAGMGIAQVQFIPEYKIVHQWSIPLGDHTAQLAEIAAVEFACKKALKISGPVLIVTDSFYVAESANKELPYWKSNGFLNNKKKPLRHVSKWKSIAECLQLKPDIIIMHEKGHQQPMTTLHTEGNNLADKLATQGSYVVHAGKRTADGSEFEKRTADGSEFESPKKKAKVE

SEQ ID NO: 415 - protein, 2174 aa, synthetic construct
MPAAKRVKLDGGDKKYSIGLDIGTNSVGWAVITDEYKVPSKKFKVLGNTDRHSIKKNLIGALLFDSGETAEATRLKRTARRRYTRRKNRICYLQEIFSNEMAKVDDSFFHRLEESFLVEEDKKHERHPIFGNIVDEVAYHEKYPTIYHLRKKLVDSTDKADLRLIYLALAHMIKFRGHFLIEGDLNPDNSDVDKLFIQLVQTYNQLFEENPINASGVDAKAILSARLSKSRRLENLIAQLPGEKKNGLFGNLIALSLGLTPNFKSNFDLAEDAKLQLSKDTYDDDLDNLLAQIGDQYADLFLAAKNLSDAILLSDILRVNTEITKAPLSASMIKRYDEHHQDLTLLKALVRQQLPEKYKEIFFDQSKNGYAGYIDGGASQEEFYKFIKPILEKMDGTEELLVKLNREDLLRKQRTFDNGSIPHQIHLGELHAILRRQEDFYPFLKDNREKIEKILTFRIPYYVGPLARGNSRFAWMTRKSEETITPWNFEEVVDKGASAQSFIERMTNFDKNLPNEKVLPKHSLLYEYFTVYNELTKVKYVTEGMRKPAFLSGEQKKAIVDLLFKTNRKVTVKQLKEDYFKKIECFDSVEISGVEDRFNASLGTYHDLLKIIKDKDFLDNEENEDILEDIVLTLTLFEDREMIEERLKTYAHLFDDKVMKQLKRRRYTGWGRLSRKLINGIRDKQSGKTILDFLKSDGFANRNFMQLIHDDSLTFKEDIQKAQVSGQGDSLHEHIANLAGSPAIKKGILQTVKVVDELVKVMGRHKPENIVIEMARENQTTQKGQKNSRERMKRIEEGIKELGSQILKEHPVENTQLQNEKLYLYYLQNGRDMYVDQELDINRLSDYDVDHIVPQSFLKDDSIDNKVLTRSDKARGKSDNVPSEEVVKKMKNYWRQLLNAKLITQRKFDNLTKAERGGLSELDKAGFIKRQLVETRQITKHVAQILDSRMNTKYDENDKLIREVKVITLKSKLVSDFRKDFQFYKVREINNYHHAHDAYLNAVVGTALIKKYPKLESEFVYGDYKVYDVRKMIAKSEQEIGKATAKYFFYSNIMNFFKTEITLANGEIRKRPLIETNGETGEIVWDKGRDFATVRKVLSMPQVNIVKKTEVQTGGFSKESILPKRNSDKLIARKKDWDPKKYGGFDSPTVAYSVLVVAKVEKGKSKKLKSVKELLGITIMERSSFEKNPIDFLEAKGYKEVKKDLIIKLPKYSLFELENGRKRMLASAGELQKGNELALPSKYVNFLYLASHYEKLKGSPEDNEQKQLFVEQHKHYLDEIIEQISEFSKRVILADANLDKVLSAYNKHRDKPIREQAENIIHLFTLTNLGAPAAFKYFDTTIDRKRYTSTKEVLDATLIHQSITGLYETRIDLSQLGGDGGGGGPAPGSSGGMDPLQLLQPLEAEIKGTKLKAHWNSGATITCVPEAFLEDERPIQTMLIKTIHGEKQQDVYYLTFKVQGRKVEAEVLASPYDYILLNPSDVPWLMKKPLQLTVLVPLHEYQERLLQQTALPKEQKELLQKLFLKYDALWQHWENQVGHRRIKPHNIATGTLAPRPQKQYPINPKAKPSIQIVIDDLLKQGVLIQQNSTMNTPVYPVPKPDGKWRMVLDYREVNKTIPLIAAQNQHSAGILSSIYRGKYKTTLDLTNGFWAHPITPESYWLTAFTWQGKQYCWTRLPQGFLNSPALFTADVVDLLKEIPNVQAYVDDIYISHDDPQEHLEQLEKIFSILLNAGYVVSLKKSEIAQREVEFLGFNITKEGRGLTDTFKQKLLNITPPKDLKQLQSILGLLNFARNFIPNYSELVKPLYTIVANANGKFISWTEDNSNQLQHIISVLNQADNLEERNPETRLIIKVNSSPSAGYIRYYNEGSKRPIMYVNYIFSKAEAKFTQTEKLLTTMHKGLIKAMDLAMGQEILVYSPIVSMTKIQRTPLPERKALPVRWITWMTYLEDPRIQFHYDKSLPELQQIPNVTEDVIAKTKHPSEFAMVFYTDGSAIKHPDVNKSHSAGMGIAQVQFIPEYKIVHQWSIPLGDHTAQLAEIAAVEFACKKALKISGPVLIVTDSFYVAESANKELPYWKSNGFLNNKKKPLRHVSKWKSIAECLQLKPDIIIMHEKGHQQPMTTLHTEGNNLADKLATQGSYVVHAGKRTADGSEFEKRTADGSEFESPKKKAKVE

SEQ ID NO: 416 - protein, 2173 aa, synthetic construct
MPAAKRVKLDGGDKKYSIGLDIGTNSVGWAVITDEYKVPSKKFKVLGNTDRHSIKKNLIGALLFDSGETAEATRLKRTARRRYTRRKNRICYLQEIFSNEMAKVDDSFFHRLEESFLVEEDKKHERHPIFGNIVDEVAYHEKYPTIYHLRKKLVDSTDKADLRLIYLALAHMIKFRGHFLIEGDLNPDNSDVDKLFIQLVQTYNQLFEENPINASGVDAKAILSARLSKSRRLENLIAQLPGEKKNGLFGNLIALSLGLTPNFKSNFDLAEDAKLQLSKDTYDDDLDNLLAQIGDQYADLFLAAKNLSDAILLSDILRVNTEITKAPLSASMIKRYDEHHQDLTLLKALVRQQLPEKYKEIFFDQSKNGYAGYIDGGASQEEFYKFIKPILEKMDGTEELLVKLNREDLLRKQRTFDNGSIPHQIHLGELHAILRRQEDFYPFLKDNREKIEKILTFRIPYYVGPLARGNSRFAWMTRKSEETITPWNFEEVVDKGASAQSFIERMTNFDKNLPNEKVLPKHSLLYEYFTVYNELTKVKYVTEGMRKPAFLSGEQKKAIVDLLFKTNRKVTVKQLKEDYFKKIECFDSVEISGVEDRFNASLGTYHDLLKIIKDKDFLDNEENEDILEDIVLTLTLFEDREMIEERLKTYAHLFDDKVMKQLKRRRYTGWGRLSRKLINGIRDKQSGKTILDFLKSDGFANRNFMQLIHDDSLTFKEDIQKAQVSGQGDSLHEHIANLAGSPAIKKGILQTVKVVDELVKVMGRHKPENIVIEMARENQTTQKGQKNSRERMKRIEEGIKELGSQILKEHPVENTQLQNEKLYLYYLQNGRDMYVDQELDINRLSDYDVDHIVPQSFLKDDSIDNKVLTRSDKARGKSDNVPSEEVVKKMKNYWRQLLNAKLITQRKFDNLTKAERGGLSELDKAGFIKRQLVETRQITKHVAQILDSRMNTKYDENDKLIREVKVITLKSKLVSDFRKDFQFYKVREINNYHHAHDAYLNAVVGTALIKKYPKLESEFVYGDYKVYDVRKMIAKSEQEIGKATAKYFFYSNIMNFFKTEITLANGEIRKRPLIETNGETGEIVWDKGRDFATVRKVLSMPQVNIVKKTEVQTGGFSKESILPKRNSDKLIARKKDWDPKKYGGFDSPTVAYSVLVVAKVEKGKSKKLKSVKELLGITIMERSSFEKNPIDFLEAKGYKEVKKDLIIKLPKYSLFELENGRKRMLASAGELQKGNELALPSKYVNFLYLASHYEKLKGSPEDNEQKQLFVEQHKHYLDEIIEQISEFSKRVILADANLDKVLSAYNKHRDKPIREQAENIIHLFTLTNLGAPAAFKYFDTTIDRKRYTSTKEVLDATLIHQSITGLYETRIDLSQLGGDGGGGGEAAAKGGMDPLQLLQPLEAEIKGTKLKAHWNSGATITCVPEAFLEDERPIQTMLIKTIHGEKQQDVYYLTFKVQGRKVEAEVLASPYDYILLNPSDVPWLMKKPLQLTVLVPLHEYQERLLQQTALPKEQKELLQKLFLKYDALWQHWENQVGHRRIKPHNIATGTLAPRPQKQYPINPKAKPSIQIVIDDLLKQGVLIQQNSTMNTPVYPVPKPDGKWRMVLDYREVNKTIPLIAAQNQHSAGILSSIYRGKYKTTLDLTNGFWAHPITPESYWLTAFTWQGKQYCWTRLPQGFLNSPALFTADVVDLLKEIPNVQAYVDDIYISHDDPQEHLEQLEKIFSILLNAGYVVSLKKSEIAQREVEFLGFNITKEGRGLTDTFKQKLLNITPPKDLKQLQSILGLLNFARNFIPNYSELVKPLYTIVANANGKFISWTEDNSNQLQHIISVLNQADNLEERNPETRLIIKVNSSPSAGYIRYYNEGSKRPIMYVNYIFSKAEAKFTQTEKLLTTMHKGLIKAMDLAMGQEILVYSPIVSMTKIQRTPLPERKALPVRWITWMTYLEDPRIQFHYDKSLPELQQIPNVTEDVIAKTKHPSEFAMVFYTDGSAIKHPDVNKSHSAGMGIAQVQFIPEYKIVHQWSIPLGDHTAQLAEIAAVEFACKKALKISGPVLIVTDSFYVAESANKELPYWKSNGFLNNKKKPLRHVSKWKSIAECLQLKPDIIIMHEKGHQQPMTTLHTEGNNLADKLATQGSYVVHAGKRTADGSEFEKRTADGSEFESPKKKAKVE

SEQ ID NO: 417 - protein, 2176 aa, synthetic construct
MPAAKRVKLDGGDKKYSIGLDIGTNSVGWAVITDEYKVPSKKFKVLGNTDRHSIKKNLIGALLFDSGETAEATRLKRTARRRYTRRKNRICYLQEIFSNEMAKVDDSFFHRLEESFLVEEDKKHERHPIFGNIVDEVAYHEKYPTIYHLRKKLVDSTDKADLRLIYLALAHMIKFRGHFLIEGDLNPDNSDVDKLFIQLVQTYNQLFEENPINASGVDAKAILSARLSKSRRLENLIAQLPGEKKNGLFGNLIALSLGLTPNFKSNFDLAEDAKLQLSKDTYDDDLDNLLAQIGDQYADLFLAAKNLSDAILLSDILRVNTEITKAPLSASMIKRYDEHHQDLTLLKALVRQQLPEKYKEIFFDQSKNGYAGYIDGGASQEEFYKFIKPILEKMDGTEELLVKLNREDLLRKQRTFDNGSIPHQIHLGELHAILRRQEDFYPFLKDNREKIEKILTFRIPYYVGPLARGNSRFAWMTRKSEETITPWNFEEVVDKGASAQSFIERMTNFDKNLPNEKVLPKHSLLYEYFTVYNELTKVKYVTEGMRKPAFLSGEQKKAIVDLLFKTNRKVTVKQLKEDYFKKIECFDSVEISGVEDRFNASLGTYHDLLKIIKDKDFLDNEENEDILEDIVLTLTLFEDREMIEERLKTYAHLFDDKVMKQLKRRRYTGWGRLSRKLINGIRDKQSGKTILDFLKSDGFANRNFMQLIHDDSLTFKEDIQKAQVSGQGDSLHEHIANLAGSPAIKKGILQTVKVVDELVKVMGRHKPENIVIEMARENQTTQKGQKNSRERMKRIEEGIKELGSQILKEHPVENTQLQNEKLYLYYLQNGRDMYVDQELDINRLSDYDVDHIVPQSFLKDDSIDNKVLTRSDKARGKSDNVPSEEVVKKMKNYWRQLLNAKLITQRKFDNLTKAERGGLSELDKAGFIKRQLVETRQITKHVAQILDSRMNTKYDENDKLIREVKVITLKSKLVSDFRKDFQFYKVREINNYHHAHDAYLNAVVGTALIKKYPKLESEFVYGDYKVYDVRKMIAKSEQEIGKATAKYFFYSNIMNFFKTEITLANGEIRKRPLIETNGETGEIVWDKGRDFATVRKVLSMPQVNIVKKTEVQTGGFSKESILPKRNSDKLIARKKDWDPKKYGGFDSPTVAYSVLVVAKVEKGKSKKLKSVKELLGITIMERSSFEKNPIDFLEAKGYKEVKKDLIIKLPKYSLFELENGRKRMLASAGELQKGNELALPSKYVNFLYLASHYEKLKGSPEDNEQKQLFVEQHKHYLDEIIEQISEFSKRVILADANLDKVLSAYNKHRDKPIREQAENIIHLFTLTNLGAPAAFKYFDTTIDRKRYTSTKEVLDATLIHQSITGLYETRIDLSQLGGDGGGGSEAAAKPAPGGMDPLQLLQPLEAEIKGTKLKAHWNSGATITCVPEAFLEDERPIQTMLIKTIHGEKQQDVYYLTFKVQGRKVEAEVLASPYDYILLNPSDVPWLMKKPLQLTVLVPLHEYQERLLQQTALPKEQKELLQKLFLKYDALWQHWENQVGHRRIKPHNIATGTLAPRPQKQYPINPKAKPSIQIVIDDLLKQGVLIQQNSTMNTPVYPVPKPDGKWRMVLDYREVNKTIPLIAAQNQHSAGILSSIYRGKYKTTLDLTNGFWAHPITPESYWLTAFTWQGKQYCWTRLPQGFLNSPALFTADVVDLLKEIPNVQAYVDDIYISHDDPQEHLEQLEKIFSILLNAGYVVSLKKSEIAQREVEFLGFNITKEGRGLTDTFKQKLLNITPPKDLKQLQSILGLLNFARNFIPNYSELVKPLYTIVANANGKFISWTEDNSNQLQHIISVLNQADNLEERNPETRLIIKVNSSPSAGYIRYYNEGSKRPIMYVNYIFSKAEAKFTQTEKLLTTMHKGLIKAMDLAMGQEILVYSPIVSMTKIQRTPLPERKALPVRWITWMTYLEDPRIQFHYDKSLPELQQIPNVTEDVIAKTKHPSEFAMVFYTDGSAIKHPDVNKSHSAGMGIAQVQFIPEYKIVHQWSIPLGDHTAQLAEIAAVEFACKKALKISGPVLIVTDSFYVAESANKELPYWKSNGFLNNKKKPLRHVSKWKSIAECLQLKPDIIIMHEKGHQQPMTTLHTEGNNLADKLATQGSYVVHAGKRTADGSEFEKRTADGSEFESPKKKAKVE

SEQ ID NO: 418 - protein, 2177 aa, synthetic construct
MPAAKRVKLDGGDKKYSIGLDIGTNSVGWAVITDEYKVPSKKFKVLGNTDRHSIKKNLIGALLFDSGETAEATRLKRTARRRYTRRKNRICYLQEIFSNEMAKVDDSFFHRLEESFLVEEDKKHERHPIFGNIVDEVAYHEKYPTIYHLRKKLVDSTDKADLRLIYLALAHMIKFRGHFLIEGDLNPDNSDVDKLFIQLVQTYNQLFEENPINASGVDAKAILSARLSKSRRLENLIAQLPGEKKNGLFGNLIALSLGLTPNFKSNFDLAEDAKLQLSKDTYDDDLDNLLAQIGDQYADLFLAAKNLSDAILLSDILRVNTEITKAPLSASMIKRYDEHHQDLTLLKALVRQQLPEKYKEIFFDQSKNGYAGYIDGGASQEEFYKFIKPILEKMDGTEELLVKLNREDLLRKQRTFDNGSIPHQIHLGELHAILRRQEDFYPFLKDNREKIEKILTFRIPYYVGPLARGNSRFAWMTRKSEETITPWNFEEVVDKGASAQSFIERMTNFDKNLPNEKVLPKHSLLYEYFTVYNELTKVKYVTEGMRKPAFLSGEQKKAIVDLLFKTNRKVTVKQLKEDYFKKIECFDSVEISGVEDRFNASLGTYHDLLKIIKDKDFLDNEENEDILEDIVLTLTLFEDREMIEERLKTYAHLFDDKVMKQLKRRRYTGWGRLSRKLINGIRDKQSGKTILDFLKSDGFANRNFMQLIHDDSLTFKEDIQKAQVSGQGDSLHEHIANLAGSPAIKKGILQTVKVVDELVKVMGRHKPENIVIEMARENQTTQKGQKNSRERMKRIEEGIKELGSQILKEHPVENTQLQNEKLYLYYLQNGRDMYVDQELDINRLSDYDVDHIVPQSFLKDDSIDNKVLTRSDKARGKSDNVPSEEVVKKMKNYWRQLLNAKLITQRKFDNLTKAERGGLSELDKAGFIKRQLVETRQITKHVAQILDSRMNTKYDENDKLIREVKVITLKSKLVSDFRKDFQFYKVREINNYHHAHDAYLNAVVGTALIKKYPKLESEFVYGDYKVYDVRKMIAKSEQEIGKATAKYFFYSNIMNFFKTEITLANGEIRKRPLIETNGETGEIVWDKGRDFATVRKVLSMPQVNIVKKTEVQTGGFSKESILPKRNSDKLIARKKDWDPKKYGGFDSPTVAYSVLVVAKVEKGKSKKLKSVKELLGITIMERSSFEKNPIDFLEAKGYKEVKKDLIIKLPKYSLFELENGRKRMLASAGELQKGNELALPSKYVNFLYLASHYEKLKGSPEDNEQKQLFVEQHKHYLDEIIEQISEFSKRVILADANLDKVLSAYNKHRDKPIREQAENIIHLFTLTNLGAPAAFKYFDTTIDRKRYTSTKEVLDATLIHQSITGLYETRIDLSQLGGDGGGSSGSSGSSGSSGGMDPLQLLQPLEAEIKGTKLKAHWNSGATITCVPEAFLEDERPIQTMLIKTIHGEKQQDVYYLTFKVQGRKVEAEVLASPYDYILLNPSDVPWLMKKPLQLTVLVPLHEYQERLLQQTALPKEQKELLQKLFLKYDALWQHWENQVGHRRIKPHNIATGTLAPRPQKQYPINPKAKPSIQIVIDDLLKQGVLIQQNSTMNTPVYPVPKPDGKWRMVLDYREVNKTIPLIAAQNQHSAGILSSIYRGKYKTTLDLTNGFWAHPITPESYWLTAFTWQGKQYCWTRLPQGFLNSPALFTADVVDLLKEIPNVQAYVDDIYISHDDPQEHLEQLEKIFSILLNAGYVVSLKKSEIAQREVEFLGFNITKEGRGLTDTFKQKLLNITPPKDLKQLQSILGLLNFARNFIPNYSELVKPLYTIVANANGKFISWTEDNSNQLQHIISVLNQADNLEERNPETRLIIKVNSSPSAGYIRYYNEGSKRPIMYVNYIFSKAEAKFTQTEKLLTTMHKGLIKAMDLAMGQEILVYSPIVSMTKIQRTPLPERKALPVRWITWMTYLEDPRIQFHYDKSLPELQQIPNVTEDVIAKTKHPSEFAMVFYTDGSAIKHPDVNKSHSAGMGIAQVQFIPEYKIVHQWSIPLGDHTAQLAEIAAVEFACKKALKISGPVLIVTDSFYVAESANKELPYWKSNGFLNNKKKPLRHVSKWKSIAECLQLKPDIIIMHEKGHQQPMTTLHTEGNNLADKLATQGSYVVHAGKRTADGSEFEKRTADGSEFESPKKKAKVE

SEQ ID NO: 419 - protein, 2174 aa, synthetic construct
MPAAKRVKLDGGDKKYSIGLDIGTNSVGWAVITDEYKVPSKKFKVLGNTDRHSIKKNLIGALLFDSGETAEATRLKRTARRRYTRRKNRICYLQEIFSNEMAKVDDSFFHRLEESFLVEEDKKHERHPIFGNIVDEVAYHEKYPTIYHLRKKLVDSTDKADLRLIYLALAHMIKFRGHFLIEGDLNPDNSDVDKLFIQLVQTYNQLFEENPINASGVDAKAILSARLSKSRRLENLIAQLPGEKKNGLFGNLIALSLGLTPNFKSNFDLAEDAKLQLSKDTYDDDLDNLLAQIGDQYADLFLAAKNLSDAILLSDILRVNTEITKAPLSASMIKRYDEHHQDLTLLKALVRQQLPEKYKEIFFDQSKNGYAGYIDGGASQEEFYKFIKPILEKMDGTEELLVKLNREDLLRKQRTFDNGSIPHQIHLGELHAILRRQEDFYPFLKDNREKIEKILTFRIPYYVGPLARGNSRFAWMTRKSEETITPWNFEEVVDKGASAQSFIERMTNFDKNLPNEKVLPKHSLLYEYFTVYNELTKVKYVTEGMRKPAFLSGEQKKAIVDLLFKTNRKVTVKQLKEDYFKKIECFDSVEISGVEDRFNASLGTYHDLLKIIKDKDFLDNEENEDILEDIVLTLTLFEDREMIEERLKTYAHLFDDKVMKQLKRRRYTGWGRLSRKLINGIRDKQSGKTILDFLKSDGFANRNFMQLIHDDSLTFKEDIQKAQVSGQGDSLHEHIANLAGSPAIKKGILQTVKVVDELVKVMGRHKPENIVIEMARENQTTQKGQKNSRERMKRIEEGIKELGSQILKEHPVENTQLQNEKLYLYYLQNGRDMYVDQELDINRLSDYDVDHIVPQSFLKDDSIDNKVLTRSDKARGKSDNVPSEEVVKKMKNYWRQLLNAKLITQRKFDNLTKAERGGLSELDKAGFIKRQLVETRQITKHVAQILDSRMNTKYDENDKLIREVKVITLKSKLVSDFRKDFQFYKVREINNYHHAHDAYLNAVVGTALIKKYPKLESEFVYGDYKVYDVRKMIAKSEQEIGKATAKYFFYSNIMNFFKTEITLANGEIRKRPLIETNGETGEIVWDKGRDFATVRKVLSMPQVNIVKKTEVQTGGFSKESILPKRNSDKLIARKKDWDPKKYGGFDSPTVAYSVLVVAKVEKGKSKKLKSVKELLGITIMERSSFEKNPIDFLEAKGYKEVKKDLIIKLPKYSLFELENGRKRMLASAGELQKGNELALPSKYVNFLYLASHYEKLKGSPEDNEQKQLFVEQHKHYLDEIIEQISEFSKRVILADANLDKVLSAYNKHRDKPIREQAENIIHLFTLTNLGAPAAFKYFDTTIDRKRYTSTKEVLDATLIHQSITGLYETRIDLSQLGGDGGGGGGSSPAPGGMDPLQLLQPLEAEIKGTKLKAHWNSGATITCVPEAFLEDERPIQTMLIKTIHGEKQQDVYYLTFKVQGRKVEAEVLASPYDYILLNPSDVPWLMKKPLQLTVLVPLHEYQERLLQQTALPKEQKELLQKLFLKYDALWQHWENQVGHRRIKPHNIATGTLAPRPQKQYPINPKAKPSIQIVIDDLLKQGVLIQQNSTMNTPVYPVPKPDGKWRMVLDYREVNKTIPLIAAQNQHSAGILSSIYRGKYKTTLDLTNGFWAHPITPESYWLTAFTWQGKQYCWTRLPQGFLNSPALFTADVVDLLKEIPNVQAYVDDIYISHDDPQEHLEQLEKIFSILLNAGYVVSLKKSEIAQREVEFLGFNITKEGRGLTDTFKQKLLNITPPKDLKQLQSILGLLNFARNFIPNYSELVKPLYTIVANANGKFISWTEDNSNQLQHIISVLNQADNLEERNPETRLIIKVNSSPSAGYIRYYNEGSKRPIMYVNYIFSKAEAKFTQTEKLLTTMHKGLIKAMDLAMGQEILVYSPIVSMTKIQRTPLPERKALPVRWITWMTYLEDPRIQFHYDKSLPELQQIPNVTEDVIAKTKHPSEFAMVFYTDGSAIKHPDVNKSHSAGMGIAQVQFIPEYKIVHQWSIPLGDHTAQLAEIAAVEFACKKALKISGPVLIVTDSFYVAESANKELPYWKSNGFLNNKKKPLRHVSKWKSIAECLQLKPDIIIMHEKGHQQPMTTLHTEGNNLADKLATQGSYVVHAGKRTADGSEFEKRTADGSEFESPKKKAKVE

SEQ ID NO: 420 - protein, 2176 aa, synthetic construct
MPAAKRVKLDGGDKKYSIGLDIGTNSVGWAVITDEYKVPSKKFKVLGNTDRHSIKKNLIGALLFDSGETAEATRLKRTARRRYTRRKNRICYLQEIFSNEMAKVDDSFFHRLEESFLVEEDKKHERHPIFGNIVDEVAYHEKYPTIYHLRKKLVDSTDKADLRLIYLALAHMIKFRGHFLIEGDLNPDNSDVDKLFIQLVQTYNQLFEENPINASGVDAKAILSARLSKSRRLENLIAQLPGEKKNGLFGNLIALSLGLTPNFKSNFDLAEDAKLQLSKDTYDDDLDNLLAQIGDQYADLFLAAKNLSDAILLSDILRVNTEITKAPLSASMIKRYDEHHQDLTLLKALVRQQLPEKYKEIFFDQSKNGYAGYIDGGASQEEFYKFIKPILEKMDGTEELLVKLNREDLLRKQRTFDNGSIPHQIHLGELHAILRRQEDFYPFLKDNREKIEKILTFRIPYYVGPLARGNSRFAWMTRKSEETITPWNFEEVVDKGASAQSFIERMTNFDKNLPNEKVLPKHSLLYEYFTVYNELTKVKYVTEGMRKPAFLSGEQKKAIVDLLFKTNRKVTVKQLKEDYFKKIECFDSVEISGVEDRFNASLGTYHDLLKIIKDKDFLDNEENEDILEDIVLTLTLFEDREMIEERLKTYAHLFDDKVMKQLKRRRYTGWGRLSRKLINGIRDKQSGKTILDFLKSDGFANRNFMQLIHDDSLTFKEDIQKAQVSGQGDSLHEHIANLAGSPAIKKGILQTVKVVDELVKVMGRHKPENIVIEMARENQTTQKGQKNSRERMKRIEEGIKELGSQILKEHPVENTQLQNEKLYLYYLQNGRDMYVDQELDINRLSDYDVDHIVPQSFLKDDSIDNKVLTRSDKARGKSDNVPSEEVVKKMKNYWRQLLNAKLITQRKFDNLTKAERGGLSELDKAGFIKRQLVETRQITKHVAQILDSRMNTKYDENDKLIREVKVITLKSKLVSDFRKDFQFYKVREINNYHHAHDAYLNAVVGTALIKKYPKLESEFVYGDYKVYDVRKMIAKSEQEIGKATAKYFFYSNIMNFFKTEITLANGEIRKRPLIETNGETGEIVWDKGRDFATVRKVLSMPQVNIVKKTEVQTGGFSKESILPKRNSDKLIARKKDWDPKKYGGFDSPTVAYSVLVVAKVEKGKSKKLKSVKELLGITIMERSSFEKNPIDFLEAKGYKEVKKDLIIKLPKYSLFELENGRKRMLASAGELQKGNELALPSKYVNFLYLASHYEKLKGSPEDNEQKQLFVEQHKHYLDEIIEQISEFSKRVILADANLDKVLSAYNKHRDKPIREQAENIIHLFTLTNLGAPAAFKYFDTTIDRKRYTSTKEVLDATLIHQSITGLYETRIDLSQLGGDGGGGGGSSEAAAKGGMDPLQLLQPLEAEIKGTKLKAHWNSGATITCVPEAFLEDERPIQTMLIKTIHGEKQQDVYYLTFKVQGRKVEAEVLASPYDYILLNPSDVPWLMKKPLQLTVLVPLHEYQERLLQQTALPKEQKELLQKLFLKYDALWQHWENQVGHRRIKPHNIATGTLAPRPQKQYPINPKAKPSIQIVIDDLLKQGVLIQQNSTMNTPVYPVPKPDGKWRMVLDYREVNKTIPLIAAQNQHSAGILSSIYRGKYKTTLDLTNGFWAHPITPESYWLTAFTWQGKQYCWTRLPQGFLNSPALFTADVVDLLKEIPNVQAYVDDIYISHDDPQEHLEQLEKIFSILLNAGYVVSLKKSEIAQREVEFLGFNITKEGRGLTDTFKQKLLNITPPKDLKQLQSILGLLNFARNFIPNYSELVKPLYTIVANANGKFISWTEDNSNQLQHIISVLNQADNLEERNPETRLIIKVNSSPSAGYIRYYNEGSKRPIMYVNYIFSKAEAKFTQTEKLLTTMHKGLIKAMDLAMGQEILVYSPIVSMTKIQRTPLPERKALPVRWITWMTYLEDPRIQFHYDKSLPELQQIPNVTEDVIAKTKHPSEFAMVFYTDGSAIKHPDVNKSHSAGMGIAQVQFIPEYKIVHQWSIPLGDHTAQLAEIAAVEFACKKALKISGPVLIVTDSFYVAESANKELPYWKSNGFLNNKKKPLRHVSKWKSIAECLQLKPDIIIMHEKGHQQPMTTLHTEGNNLADKLATQGSYVVHAGKRTADGSEFEKRTADGSEFESPKKKAKVE

SEQ ID NO: 421 - protein, 2180 aa, synthetic construct
MPAAKRVKLDGGDKKYSIGLDIGTNSVGWAVITDEYKVPSKKFKVLGNTDRHSIKKNLIGALLFDSGETAEATRLKRTARRRYTRRKNRICYLQEIFSNEMAKVDDSFFHRLEESFLVEEDKKHERHPIFGNIVDEVAYHEKYPTIYHLRKKLVDSTDKADLRLIYLALAHMIKFRGHFLIEGDLNPDNSDVDKLFIQLVQTYNQLFEENPINASGVDAKAILSARLSKSRRLENLIAQLPGEKKNGLFGNLIALSLGLTPNFKSNFDLAEDAKLQLSKDTYDDDLDNLLAQIGDQYADLFLAAKNLSDAILLSDILRVNTEITKAPLSASMIKRYDEHHQDLTLLKALVRQQLPEKYKEIFFDQSKNGYAGYIDGGASQEEFYKFIKPILEKMDGTEELLVKLNREDLLRKQRTFDNGSIPHQIHLGELHAILRRQEDFYPFLKDNREKIEKILTFRIPYYVGPLARGNSRFAWMTRKSEETITPWNFEEVVDKGASAQSFIERMTNFDKNLPNEKVLPKHSLLYEYFTVYNELTKVKYVTEGMRKPAFLSGEQKKAIVDLLFKTNRKVTVKQLKEDYFKKIECFDSVEISGVEDRFNASLGTYHDLLKIIKDKDFLDNEENEDILEDIVLTLTLFEDREMIEERLKTYAHLFDDKVMKQLKRRRYTGWGRLSRKLINGIRDKQSGKTILDFLKSDGFANRNFMQLIHDDSLTFKEDIQKAQVSGQGDSLHEHIANLAGSPAIKKGILQTVKVVDELVKVMGRHKPENIVIEMARENQTTQKGQKNSRERMKRIEEGIKELGSQILKEHPVENTQLQNEKLYLYYLQNGRDMYVDQELDINRLSDYDVDHIVPQSFLKDDSIDNKVLTRSDKARGKSDNVPSEEVVKKMKNYWRQLLNAKLITQRKFDNLTKAERGGLSELDKAGFIKRQLVETRQITKHVAQILDSRMNTKYDENDKLIREVKVITLKSKLVSDFRKDFQFYKVREINNYHHAHDAYLNAVVGTALIKKYPKLESEFVYGDYKVYDVRKMIAKSEQEIGKATAKYFFYSNIMNFFKTEITLANGEIRKRPLIETNGETGEIVWDKGRDFATVRKVLSMPQVNIVKKTEVQTGGFSKESILPKRNSDKLIARKKDWDPKKYGGFDSPTVAYSVLVVAKVEKGKSKKLKSVKELLGITIMERSSFEKNPIDFLEAKGYKEVKKDLIIKLPKYSLFELENGRKRMLASAGELQKGNELALPSKYVNFLYLASHYEKLKGSPEDNEQKQLFVEQHKHYLDEIIEQISEFSKRVILADANLDKVLSAYNKHRDKPIREQAENIIHLFTLTNLGAPAAFKYFDTTIDRKRYTSTKEVLDATLIHQSITGLYETRIDLSQLGGDGGGGGGSEAAAKGGGGSGGMDPLQLLQPLEAEIKGTKLKAHWNSGATITCVPEAFLEDERPIQTMLIKTIHGEKQQDVYYLTFKVQGRKVEAEVLASPYDYILLNPSDVPWLMKKPLQLTVLVPLHEYQERLLQQTALPKEQKELLQKLFLKYDALWQHWENQVGHRRIKPHNIATGTLAPRPQKQYPINPKAKPSIQIVIDDLLKQGVLIQQNSTMNTPVYPVPKPDGKWRMVLDYREVNKTIPLIAAQNQHSAGILSSIYRGKYKTTLDLTNGFWAHPITPESYWLTAFTWQGKQYCWTRLPQGFLNSPALFTADVVDLLKEIPNVQAYVDDIYISHDDPQEHLEQLEKIFSILLNAGYVVSLKKSEIAQREVEFLGFNITKEGRGLTDTFKQKLLNITPPKDLKQLQSILGLLNFARNFIPNYSELVKPLYTIVANANGKFISWTEDNSNQLQHIISVLNQADNLEERNPETRLIIKVNSSPSAGYIRYYNEGSKRPIMYVNYIFSKAEAKFTQTEKLLTTMHKGLIKAMDLAMGQEILVYSPIVSMTKIQRTPLPERKALPVRWITWMTYLEDPRIQFHYDKSLPELQQIPNVTEDVIAKTKHPSEFAMVFYTDGSAIKHPDVNKSHSAGMGIAQVQFIPEYKIVHQWSIPLGDHTAQLAEIAAVEFACKKALKISGPVLIVTDSFYVAESANKELPYWKSNGFLNNKKKPLRHVSKWKSIAECLQLKPDIIIMHEKGHQQPMTTLHTEGNNLADKLATQGSYVVHAGKRTADGSEFEKRTADGSEFESPKKKAKVE

SEQ ID NO: 422 - protein, 2176 aa, synthetic construct
MPAAKRVKLDGGDKKYSIGLDIGTNSVGWAVITDEYKVPSKKFKVLGNTDRHSIKKNLIGALLFDSGETAEATRLKRTARRRYTRRKNRICYLQEIFSNEMAKVDDSFFHRLEESFLVEEDKKHERHPIFGNIVDEVAYHEKYPTIYHLRKKLVDSTDKADLRLIYLALAHMIKFRGHFLIEGDLNPDNSDVDKLFIQLVQTYNQLFEENPINASGVDAKAILSARLSKSRRLENLIAQLPGEKKNGLFGNLIALSLGLTPNFKSNFDLAEDAKLQLSKDTYDDDLDNLLAQIGDQYADLFLAAKNLSDAILLSDILRVNTEITKAPLSASMIKRYDEHHQDLTLLKALVRQQLPEKYKEIFFDQSKNGYAGYIDGGASQEEFYKFIKPILEKMDGTEELLVKLNREDLLRKQRTFDNGSIPHQIHLGELHAILRRQEDFYPFLKDNREKIEKILTFRIPYYVGPLARGNSRFAWMTRKSEETITPWNFEEVVDKGASAQSFIERMTNFDKNLPNEKVLPKHSLLYEYFTVYNELTKVKYVTEGMRKPAFLSGEQKKAIVDLLFKTNRKVTVKQLKEDYFKKIECFDSVEISGVEDRFNASLGTYHDLLKIIKDKDFLDNEENEDILEDIVLTLTLFEDREMIEERLKTYAHLFDDKVMKQLKRRRYTGWGRLSRKLINGIRDKQSGKTILDFLKSDGFANRNFMQLIHDDSLTFKEDIQKAQVSGQGDSLHEHIANLAGSPAIKKGILQTVKVVDELVKVMGRHKPENIVIEMARENQTTQKGQKNSRERMKRIEEGIKELGSQILKEHPVENTQLQNEKLYLYYLQNGRDMYVDQELDINRLSDYDVDHIVPQSFLKDDSIDNKVLTRSDKARGKSDNVPSEEVVKKMKNYWRQLLNAKLITQRKFDNLTKAERGGLSELDKAGFIKRQLVETRQITKHVAQILDSRMNTKYDENDKLIREVKVITLKSKLVSDFRKDFQFYKVREINNYHHAHDAYLNAVVGTALIKKYPKLESEFVYGDYKVYDVRKMIAKSEQEIGKATAKYFFYSNIMNFFKTEITLANGEIRKRPLIETNGETGEIVWDKGRDFATVRKVLSMPQVNIVKKTEVQTGGFSKESILPKRNSDKLIARKKDWDPKKYGGFDSPTVAYSVLVVAKVEKGKSKKLKSVKELLGITIMERSSFEKNPIDFLEAKGYKEVKKDLIIKLPKYSLFELENGRKRMLASAGELQKGNELALPSKYVNFLYLASHYEKLKGSPEDNEQKQLFVEQHKHYLDEIIEQISEFSKRVILADANLDKVLSAYNKHRDKPIREQAENIIHLFTLTNLGAPAAFKYFDTTIDRKRYTSTKEVLDATLIHQSITGLYETRIDLSQLGGDGGGGGEAAAKGGSGGMDPLQLLQPLEAEIKGTKLKAHWNSGATITCVPEAFLEDERPIQTMLIKTIHGEKQQDVYYLTFKVQGRKVEAEVLASPYDYILLNPSDVPWLMKKPLQLTVLVPLHEYQERLLQQTALPKEQKELLQKLFLKYDALWQHWENQVGHRRIKPHNIATGTLAPRPQKQYPINPKAKPSIQIVIDDLLKQGVLIQQNSTMNTPVYPVPKPDGKWRMVLDYREVNKTIPLIAAQNQHSAGILSSIYRGKYKTTLDLTNGFWAHPITPESYWLTAFTWQGKQYCWTRLPQGFLNSPALFTADVVDLLKEIPNVQAYVDDIYISHDDPQEHLEQLEKIFSILLNAGYVVSLKKSEIAQREVEFLGFNITKEGRGLTDTFKQKLLNITPPKDLKQLQSILGLLNFARNFIPNYSELVKPLYTIVANANGKFISWTEDNSNQLQHIISVLNQADNLEERNPETRLIIKVNSSPSAGYIRYYNEGSKRPIMYVNYIFSKAEAKFTQTEKLLTTMHKGLIKAMDLAMGQEILVYSPIVSMTKIQRTPLPERKALPVRWITWMTYLEDPRIQFHYDKSLPELQQIPNVTEDVIAKTKHPSEFAMVFYTDGSAIKHPDVNKSHSAGMGIAQVQFIPEYKIVHQWSIPLGDHTAQLAEIAAVEFACKKALKISGPVLIVTDSFYVAESANKELPYWKSNGFLNNKKKPLRHVSKWKSIAECLQLKPDIIIMHEKGHQQPMTTLHTEGNNLADKLATQGSYVVHAGKRTADGSEFEKRTADGSEFESPKKKAKVE

SEQ ID NO: 423 - protein, 2171 aa, synthetic construct
MPAAKRVKLDGGDKKYSIGLDIGTNSVGWAVITDEYKVPSKKFKVLGNTDRHSIKKNLIGALLFDSGETAEATRLKRTARRRYTRRKNRICYLQEIFSNEMAKVDDSFFHRLEESFLVEEDKKHERHPIFGNIVDEVAYHEKYPTIYHLRKKLVDSTDKADLRLIYLALAHMIKFRGHFLIEGDLNPDNSDVDKLFIQLVQTYNQLFEENPINASGVDAKAILSARLSKSRRLENLIAQLPGEKKNGLFGNLIALSLGLTPNFKSNFDLAEDAKLQLSKDTYDDDLDNLLAQIGDQYADLFLAAKNLSDAILLSDILRVNTEITKAPLSASMIKRYDEHHQDLTLLKALVRQQLPEKYKEIFFDQSKNGYAGYIDGGASQEEFYKFIKPILEKMDGTEELLVKLNREDLLRKQRTFDNGSIPHQIHLGELHAILRRQEDFYPFLKDNREKIEKILTFRIPYYVGPLARGNSRFAWMTRKSEETITPWNFEEVVDKGASAQSFIERMTNFDKNLPNEKVLPKHSLLYEYFTVYNELTKVKYVTEGMRKPAFLSGEQKKAIVDLLFKTNRKVTVKQLKEDYFKKIECFDSVEISGVEDRFNASLGTYHDLLKIIKDKDFLDNEENEDILEDIVLTLTLFEDREMIEERLKTYAHLFDDKVMKQLKRRRYTGWGRLSRKLINGIRDKQSGKTILDFLKSDGFANRNFMQLIHDDSLTFKEDIQKAQVSGQGDSLHEHIANLAGSPAIKKGILQTVKVVDELVKVMGRHKPENIVIEMARENQTTQKGQKNSRERMKRIEEGIKELGSQILKEHPVENTQLQNEKLYLYYLQNGRDMYVDQELDINRLSDYDVDHIVPQSFLKDDSIDNKVLTRSDKARGKSDNVPSEEVVKKMKNYWRQLLNAKLITQRKFDNLTKAERGGLSELDKAGFIKRQLVETRQITKHVAQILDSRMNTKYDENDKLIREVKVITLKSKLVSDFRKDFQFYKVREINNYHHAHDAYLNAVVGTALIKKYPKLESEFVYGDYKVYDVRKMIAKSEQEIGKATAKYFFYSNIMNFFKTEITLANGEIRKRPLIETNGETGEIVWDKGRDFATVRKVLSMPQVNIVKKTEVQTGGFSKESILPKRNSDKLIARKKDWDPKKYGGFDSPTVAYSVLVVAKVEKGKSKKLKSVKELLGITIMERSSFEKNPIDFLEAKGYKEVKKDLIIKLPKYSLFELENGRKRMLASAGELQKGNELALPSKYVNFLYLASHYEKLKGSPEDNEQKQLFVEQHKHYLDEIIEQISEFSKRVILADANLDKVLSAYNKHRDKPIREQAENIIHLFTLTNLGAPAAFKYFDTTIDRKRYTSTKEVLDATLIHQSITGLYETRIDLSQLGGDGGGSSGSSGGMDPLQLLQPLEAEIKGTKLKAHWNSGATITCVPEAFLEDERPIQTMLIKTIHGEKQQDVYYLTFKVQGRKVEAEVLASPYDYILLNPSDVPWLMKKPLQLTVLVPLHEYQERLLQQTALPKEQKELLQKLFLKYDALWQHWENQVGHRRIKPHNIATGTLAPRPQKQYPINPKAKPSIQIVIDDLLKQGVLIQQNSTMNTPVYPVPKPDGKWRMVLDYREVNKTIPLIAAQNQHSAGILSSIYRGKYKTTLDLTNGFWAHPITPESYWLTAFTWQGKQYCWTRLPQGFLNSPALFTADVVDLLKEIPNVQAYVDDIYISHDDPQEHLEQLEKIFSILLNAGYVVSLKKSEIAQREVEFLGFNITKEGRGLTDTFKQKLLNITPPKDLKQLQSILGLLNFARNFIPNYSELVKPLYTIVANANGKFISWTEDNSNQLQHIISVLNQADNLEERNPETRLIIKVNSSPSAGYIRYYNEGSKRPIMYVNYIFSKAEAKFTQTEKLLTTMHKGLIKAMDLAMGQEILVYSPIVSMTKIQRTPLPERKALPVRWITWMTYLEDPRIQFHYDKSLPELQQIPNVTEDVIAKTKHPSEFAMVFYTDGSAIKHPDVNKSHSAGMGIAQVQFIPEYKIVHQWSIPLGDHTAQLAEIAAVEFACKKALKISGPVLIVTDSFYVAESANKELPYWKSNGFLNNKKKPLRHVSKWKSIAECLQLKPDIIIMHEKGHQQPMTTLHTEGNNLADKLATQGSYVVHAGKRTADGSEFEKRTADGSEFESPKKKAKVE

SEQ ID NO: 424 - protein, 2176 aa, synthetic construct
MPAAKRVKLDGGDKKYSIGLDIGTNSVGWAVITDEYKVPSKKFKVLGNTDRHSIKKNLIGALLFDSGETAEATRLKRTARRRYTRRKNRICYLQEIFSNEMAKVDDSFFHRLEESFLVEEDKKHERHPIFGNIVDEVAYHEKYPTIYHLRKKLVDSTDKADLRLIYLALAHMIKFRGHFLIEGDLNPDNSDVDKLFIQLVQTYNQLFEENPINASGVDAKAILSARLSKSRRLENLIAQLPGEKKNGLFGNLIALSLGLTPNFKSNFDLAEDAKLQLSKDTYDDDLDNLLAQIGDQYADLFLAAKNLSDAILLSDILRVNTEITKAPLSASMIKRYDEHHQDLTLLKALVRQQLPEKYKEIFFDQSKNGYAGYIDGGASQEEFYKFIKPILEKMDGTEELLVKLNREDLLRKQRTFDNGSIPHQIHLGELHAILRRQEDFYPFLKDNREKIEKILTFRIPYYVGPLARGNSRFAWMTRKSEETITPWNFEEVVDKGASAQSFIERMTNFDKNLPNEKVLPKHSLLYEYFTVYNELTKVKYVTEGMRKPAFLSGEQKKAIVDLLFKTNRKVTVKQLKEDYFKKIECFDSVEISGVEDRFNASLGTYHDLLKIIKDKDFLDNEENEDILEDIVLTLTLFEDREMIEERLKTYAHLFDDKVMKQLKRRRYTGWGRLSRKLINGIRDKQSGKTILDFLKSDGFANRNFMQLIHDDSLTFKEDIQKAQVSGQGDSLHEHIANLAGSPAIKKGILQTVKVVDELVKVMGRHKPENIVIEMARENQTTQKGQKNSRERMKRIEEGIKELGSQILKEHPVENTQLQNEKLYLYYLQNGRDMYVDQELDINRLSDYDVDHIVPQSFLKDDSIDNKVLTRSDKARGKSDNVPSEEVVKKMKNYWRQLLNAKLITQRKFDNLTKAERGGLSELDKAGFIKRQLVETRQITKHVAQILDSRMNTKYDENDKLIREVKVITLKSKLVSDFRKDFQFYKVREINNYHHAHDAYLNAVVGTALIKKYPKLESEFVYGDYKVYDVRKMIAKSEQEIGKATAKYFFYSNIMNFFKTEITLANGEIRKRPLIETNGETGEIVWDKGRDFATVRKVLSMPQVNIVKKTEVQTGGFSKESILPKRNSDKLIARKKDWDPKKYGGFDSPTVAYSVLVVAKVEKGKSKKLKSVKELLGITIMERSSFEKNPIDFLEAKGYKEVKKDLIIKLPKYSLFELENGRKRMLASAGELQKGNELALPSKYVNFLYLASHYEKLKGSPEDNEQKQLFVEQHKHYLDEIIEQISEFSKRVILADANLDKVLSAYNKHRDKPIREQAENIIHLFTLTNLGAPAAFKYFDTTIDRKRYTSTKEVLDATLIHQSITGLYETRIDLSQLGGDGGPAPGGGEAAAKGGMDPLQLLQPLEAEIKGTKLKAHWNSGATITCVPEAFLEDERPIQTMLIKTIHGEKQQDVYYLTFKVQGRKVEAEVLASPYDYILLNPSDVPWLMKKPLQLTVLVPLHEYQERLLQQTALPKEQKELLQKLFLKYDALWQHWENQVGHRRIKPHNIATGTLAPRPQKQYPINPKAKPSIQIVIDDLLKQGVLIQQNSTMNTPVYPVPKPDGKWRMVLDYREVNKTIPLIAAQNQHSAGILSSIYRGKYKTTLDLTNGFWAHPITPESYWLTAFTWQGKQYCWTRLPQGFLNSPALFTADVVDLLKEIPNVQAYVDDIYISHDDPQEHLEQLEKIFSILLNAGYVVSLKKSEIAQREVEFLGFNITKEGRGLTDTFKQKLLNITPPKDLKQLQSILGLLNFARNFIPNYSELVKPLYTIVANANGKFISWTEDNSNQLQHIISVLNQADNLEERNPETRLIIKVNSSPSAGYIRYYNEGSKRPIMYVNYIFSKAEAKFTQTEKLLTTMHKGLIKAMDLAMGQEILVYSPIVSMTKIQRTPLPERKALPVRWITWMTYLEDPRIQFHYDKSLPELQQIPNVTEDVIAKTKHPSEFAMVFYTDGSAIKHPDVNKSHSAGMGIAQVQFIPEYKIVHQWSIPLGDHTAQLAEIAAVEFACKKALKISGPVLIVTDSFYVAESANKELPYWKSNGFLNNKKKPLRHVSKWKSIAECLQLKPDIIIMHEKGHQQPMTTLHTEGNNLADKLATQGSYVVHAGKRTADGSEFEKRTADGSEFESPKKKAKVE

SEQ ID NO: 425 - protein, 2174 aa, synthetic construct
MPAAKRVKLDGGDKKYSIGLDIGTNSVGWAVITDEYKVPSKKFKVLGNTDRHSIKKNLIGALLFDSGETAEATRLKRTARRRYTRRKNRICYLQEIFSNEMAKVDDSFFHRLEESFLVEEDKKHERHPIFGNIVDEVAYHEKYPTIYHLRKKLVDSTDKADLRLIYLALAHMIKFRGHFLIEGDLNPDNSDVDKLFIQLVQTYNQLFEENPINASGVDAKAILSARLSKSRRLENLIAQLPGEKKNGLFGNLIALSLGLTPNFKSNFDLAEDAKLQLSKDTYDDDLDNLLAQIGDQYADLFLAAKNLSDAILLSDILRVNTEITKAPLSASMIKRYDEHHQDLTLLKALVRQQLPEKYKEIFFDQSKNGYAGYIDGGASQEEFYKFIKPILEKMDGTEELLVKLNREDLLRKQRTFDNGSIPHQIHLGELHAILRRQEDFYPFLKDNREKIEKILTFRIPYYVGPLARGNSRFAWMTRKSEETITPWNFEEVVDKGASAQSFIERMTNFDKNLPNEKVLPKHSLLYEYFTVYNELTKVKYVTEGMRKPAFLSGEQKKAIVDLLFKTNRKVTVKQLKEDYFKKIECFDSVEISGVEDRFNASLGTYHDLLKIIKDKDFLDNEENEDILEDIVLTLTLFEDREMIEERLKTYAHLFDDKVMKQLKRRRYTGWGRLSRKLINGIRDKQSGKTILDFLKSDGFANRNFMQLIHDDSLTFKEDIQKAQVSGQGDSLHEHIANLAGSPAIKKGILQTVKVVDELVKVMGRHKPENIVIEMARENQTTQKGQKNSRERMKRIEEGIKELGSQILKEHPVENTQLQNEKLYLYYLQNGRDMYVDQELDINRLSDYDVDHIVPQSFLKDDSIDNKVLTRSDKARGKSDNVPSEEVVKKMKNYWRQLLNAKLITQRKFDNLTKAERGGLSELDKAGFIKRQLVETRQITKHVAQILDSRMNTKYDENDKLIREVKVITLKSKLVSDFRKDFQFYKVREINNYHHAHDAYLNAVVGTALIKKYPKLESEFVYGDYKVYDVRKMIAKSEQEIGKATAKYFFYSNIMNFFKTEITLANGEIRKRPLIETNGETGEIVWDKGRDFATVRKVLSMPQVNIVKKTEVQTGGFSKESILPKRNSDKLIARKKDWDPKKYGGFDSPTVAYSVLVVAKVEKGKSKKLKSVKELLGITIMERSSFEKNPIDFLEAKGYKEVKKDLIIKLPKYSLFELENGRKRMLASAGELQKGNELALPSKYVNFLYLASHYEKLKGSPEDNEQKQLFVEQHKHYLDEIIEQISEFSKRVILADANLDKVLSAYNKHRDKPIREQAENIIHLFTLTNLGAPAAFKYFDTTIDRKRYTSTKEVLDATLIHQSITGLYETRIDLSQLGGDGGGGSGGSGGSGGMDPLQLLQPLEAEIKGTKLKAHWNSGATITCVPEAFLEDERPIQTMLIKTIHGEKQQDVYYLTFKVQGRKVEAEVLASPYDYILLNPSDVPWLMKKPLQLTVLVPLHEYQERLLQQTALPKEQKELLQKLFLKYDALWQHWENQVGHRRIKPHNIATGTLAPRPQKQYPINPKAKPSIQIVIDDLLKQGVLIQQNSTMNTPVYPVPKPDGKWRMVLDYREVNKTIPLIAAQNQHSAGILSSIYRGKYKTTLDLTNGFWAHPITPESYWLTAFTWQGKQYCWTRLPQGFLNSPALFTADVVDLLKEIPNVQAYVDDIYISHDDPQEHLEQLEKIFSILLNAGYVVSLKKSEIAQREVEFLGFNITKEGRGLTDTFKQKLLNITPPKDLKQLQSILGLLNFARNFIPNYSELVKPLYTIVANANGKFISWTEDNSNQLQHIISVLNQADNLEERNPETRLIIKVNSSPSAGYIRYYNEGSKRPIMYVNYIFSKAEAKFTQTEKLLTTMHKGLIKAMDLAMGQEILVYSPIVSMTKIQRTPLPERKALPVRWITWMTYLEDPRIQFHYDKSLPELQQIPNVTEDVIAKTKHPSEFAMVFYTDGSAIKHPDVNKSHSAGMGIAQVQFIPEYKIVHQWSIPLGDHTAQLAEIAAVEFACKKALKISGPVLIVTDSFYVAESANKELPYWKSNGFLNNKKKPLRHVSKWKSIAECLQLKPDIIIMHEKGHQQPMTTLHTEGNNLADKLATQGSYVVHAGKRTADGSEFEKRTADGSEFESPKKKAKVE

SEQ ID NO: 426 - protein, 2094 aa, synthetic construct
MPAAKRVKLDGGDKKYSIGLDIGTNSVGWAVITDEYKVPSKKFKVLGNTDRHSIKKNLIGALLFDSGETAEATRLKRTARRRYTRRKNRICYLQEIFSNEMAKVDDSFFHRLEESFLVEEDKKHERHPIFGNIVDEVAYHEKYPTIYHLRKKLVDSTDKADLRLIYLALAHMIKFRGHFLIEGDLNPDNSDVDKLFIQLVQTYNQLFEENPINASGVDAKAILSARLSKSRRLENLIAQLPGEKKNGLFGNLIALSLGLTPNFKSNFDLAEDAKLQLSKDTYDDDLDNLLAQIGDQYADLFLAAKNLSDAILLSDILRVNTEITKAPLSASMIKRYDEHHQDLTLLKALVRQQLPEKYKEIFFDQSKNGYAGYIDGGASQEEFYKFIKPILEKMDGTEELLVKLNREDLLRKQRTFDNGSIPHQIHLGELHAILRRQEDFYPFLKDNREKIEKILTFRIPYYVGPLARGNSRFAWMTRKSEETITPWNFEEVVDKGASAQSFIERMTNFDKNLPNEKVLPKHSLLYEYFTVYNELTKVKYVTEGMRKPAFLSGEQKKAIVDLLFKTNRKVTVKQLKEDYFKKIECFDSVEISGVEDRFNASLGTYHDLLKIIKDKDFLDNEENEDILEDIVLTLTLFEDREMIEERLKTYAHLFDDKVMKQLKRRRYTGWGRLSRKLINGIRDKQSGKTILDFLKSDGFANRNFMQLIHDDSLTFKEDIQKAQVSGQGDSLHEHIANLAGSPAIKKGILQTVKVVDELVKVMGRHKPENIVIEMARENQTTQKGQKNSRERMKRIEEGIKELGSQILKEHPVENTQLQNEKLYLYYLQNGRDMYVDQELDINRLSDYDVDHIVPQSFLKDDSIDNKVLTRSDKARGKSDNVPSEEVVKKMKNYWRQLLNAKLITQRKFDNLTKAERGGLSELDKAGFIKRQLVETRQITKHVAQILDSRMNTKYDENDKLIREVKVITLKSKLVSDFRKDFQFYKVREINNYHHAHDAYLNAVVGTALIKKYPKLESEFVYGDYKVYDVRKMIAKSEQEIGKATAKYFFYSNIMNFFKTEITLANGEIRKRPLIETNGETGEIVWDKGRDFATVRKVLSMPQVNIVKKTEVQTGGFSKESILPKRNSDKLIARKKDWDPKKYGGFDSPTVAYSVLVVAKVEKGKSKKLKSVKELLGITIMERSSFEKNPIDFLEAKGYKEVKKDLIIKLPKYSLFELENGRKRMLASAGELQKGNELALPSKYVNFLYLASHYEKLKGSPEDNEQKQLFVEQHKHYLDEIIEQISEFSKRVILADANLDKVLSAYNKHRDKPIREQAENIIHLFTLTNLGAPAAFKYFDTTIDRKRYTSTKEVLDATLIHQSITGLYETRIDLSQLGGDGGGSSGSSGSSGSSGSSGSSGGVPWLMKKPLQLTVLVPLHEYQERLLQQTALPKEQKELLQKLFLKYDALWQHWENQVGHRRIKPHNIATGTLAPRPQKQYPINPKAKPSIQIVIDDLLKQGVLIQQNSTMNTPVYPVPKPDGKWRMVLDYREVNKTIPLIAAQNQHSAGILSSIYRGKYKTTLDLTNGFWAHPITPESYWLTAFTWQGKQYCWTRLPQGFLNSPALFTADVVDLLKEIPNVQAYVDDIYISHDDPQEHLEQLEKIFSILLNAGYVVSLKKSEIAQREVEFLGFNITKEGRGLTDTFKQKLLNITPPKDLKQLQSILGLLNFARNFIPNYSELVKPLYTIVANANGKFISWTEDNSNQLQHIISVLNQADNLEERNPETRLIIKVNSSPSAGYIRYYNEGSKRPIMYVNYIFSKAEAKFTQTEKLLTTMHKGLIKAMDLAMGQEILVYSPIVSMTKIQRTPLPERKALPVRWITWMTYLEDPRIQFHYDKSLPELQQIPNVTEDVIAKTKHPSEFAMVFYTDGSAIKHPDVNKSHSAGMGIAQVQFIPEYKIVHQWSIPLGDHTAQLAEIAAVEFACKKALKISGPVLIVTDSFYVAESANKELPYWKSNGFLNNKKKPLRHVSKWKSIAECLQLKPDIIIMHEKGHQQPMTTLHTEGNNLADKLATQGSYVVHAGKRTADGSEFEKRTADGSEFESPKKKAKVE

SEQ ID NO: 427 - protein, 2087 aa, synthetic construct
MPAAKRVKLDGGDKKYSIGLDIGTNSVGWAVITDEYKVPSKKFKVLGNTDRHSIKKNLIGALLFDSGETAEATRLKRTARRRYTRRKNRICYLQEIFSNEMAKVDDSFFHRLEESFLVEEDKKHERHPIFGNIVDEVAYHEKYPTIYHLRKKLVDSTDKADLRLIYLALAHMIKFRGHFLIEGDLNPDNSDVDKLFIQLVQTYNQLFEENPINASGVDAKAILSARLSKSRRLENLIAQLPGEKKNGLFGNLIALSLGLTPNFKSNFDLAEDAKLQLSKDTYDDDLDNLLAQIGDQYADLFLAAKNLSDAILLSDILRVNTEITKAPLSASMIKRYDEHHQDLTLLKALVRQQLPEKYKEIFFDQSKNGYAGYIDGGASQEEFYKFIKPILEKMDGTEELLVKLNREDLLRKQRTFDNGSIPHQIHLGELHAILRRQEDFYPFLKDNREKIEKILTFRIPYYVGPLARGNSRFAWMTRKSEETITPWNFEEVVDKGASAQSFIERMTNFDKNLPNEKVLPKHSLLYEYFTVYNELTKVKYVTEGMRKPAFLSGEQKKAIVDLLFKTNRKVTVKQLKEDYFKKIECFDSVEISGVEDRFNASLGTYHDLLKIIKDKDFLDNEENEDILEDIVLTLTLFEDREMIEERLKTYAHLFDDKVMKQLKRRRYTGWGRLSRKLINGIRDKQSGKTILDFLKSDGFANRNFMQLIHDDSLTFKEDIQKAQVSGQGDSLHEHIANLAGSPAIKKGILQTVKVVDELVKVMGRHKPENIVIEMARENQTTQKGQKNSRERMKRIEEGIKELGSQILKEHPVENTQLQNEKLYLYYLQNGRDMYVDQELDINRLSDYDVDHIVPQSFLKDDSIDNKVLTRSDKARGKSDNVPSEEVVKKMKNYWRQLLNAKLITQRKFDNLTKAERGGLSELDKAGFIKRQLVETRQITKHVAQILDSRMNTKYDENDKLIREVKVITLKSKLVSDFRKDFQFYKVREINNYHHAHDAYLNAVVGTALIKKYPKLESEFVYGDYKVYDVRKMIAKSEQEIGKATAKYFFYSNIMNFFKTEITLANGEIRKRPLIETNGETGEIVWDKGRDFATVRKVLSMPQVNIVKKTEVQTGGFSKESILPKRNSDKLIARKKDWDPKKYGGFDSPTVAYSVLVVAKVEKGKSKKLKSVKELLGITIMERSSFEKNPIDFLEAKGYKEVKKDLIIKLPKYSLFELENGRKRMLASAGELQKGNELALPSKYVNFLYLASHYEKLKGSPEDNEQKQLFVEQHKHYLDEIIEQISEFSKRVILADANLDKVLSAYNKHRDKPIREQAENIIHLFTLTNLGAPAAFKYFDTTIDRKRYTSTKEVLDATLIHQSITGLYETRIDLSQLGGDGGPAPEAAAKGSSGGVPWLMKKPLQLTVLVPLHEYQERLLQQTALPKEQKELLQKLFLKYDALWQHWENQVGHRRIKPHNIATGTLAPRPQKQYPINPKAKPSIQIVIDDLLKQGVLIQQNSTMNTPVYPVPKPDGKWRMVLDYREVNKTIPLIAAQNQHSAGILSSIYRGKYKTTLDLTNGFWAHPITPESYWLTAFTWQGKQYCWTRLPQGFLNSPALFTADVVDLLKEIPNVQAYVDDIYISHDDPQEHLEQLEKIFSILLNAGYVVSLKKSEIAQREVEFLGFNITKEGRGLTDTFKQKLLNITPPKDLKQLQSILGLLNFARNFIPNYSELVKPLYTIVANANGKFISWTEDNSNQLQHIISVLNQADNLEERNPETRLIIKVNSSPSAGYIRYYNEGSKRPIMYVNYIFSKAEAKFTQTEKLLTTMHKGLIKAMDLAMGQEILVYSPIVSMTKIQRTPLPERKALPVRWITWMTYLEDPRIQFHYDKSLPELQQIPNVTEDVIAKTKHPSEFAMVFYTDGSAIKHPDVNKSHSAGMGIAQVQFIPEYKIVHQWSIPLGDHTAQLAEIAAVEFACKKALKISGPVLIVTDSFYVAESANKELPYWKSNGFLNNKKKPLRHVSKWKSIAECLQLKPDIIIMHEKGHQQPMTTLHTEGNNLADKLATQGSYVVHAGKRTADGSEFEKRTADGSEFESPKKKAKVE

SEQ ID NO: 428 - protein, 2091 aa, synthetic construct
MPAAKRVKLDGGDKKYSIGLDIGTNSVGWAVITDEYKVPSKKFKVLGNTDRHSIKKNLIGALLFDSGETAEATRLKRTARRRYTRRKNRICYLQEIFSNEMAKVDDSFFHRLEESFLVEEDKKHERHPIFGNIVDEVAYHEKYPTIYHLRKKLVDSTDKADLRLIYLALAHMIKFRGHFLIEGDLNPDNSDVDKLFIQLVQTYNQLFEENPINASGVDAKAILSARLSKSRRLENLIAQLPGEKKNGLFGNLIALSLGLTPNFKSNFDLAEDAKLQLSKDTYDDDLDNLLAQIGDQYADLFLAAKNLSDAILLSDILRVNTEITKAPLSASMIKRYDEHHQDLTLLKALVRQQLPEKYKEIFFDQSKNGYAGYIDGGASQEEFYKFIKPILEKMDGTEELLVKLNREDLLRKQRTFDNGSIPHQIHLGELHAILRRQEDFYPFLKDNREKIEKILTFRIPYYVGPLARGNSRFAWMTRKSEETITPWNFEEVVDKGASAQSFIERMTNFDKNLPNEKVLPKHSLLYEYFTVYNELTKVKYVTEGMRKPAFLSGEQKKAIVDLLFKTNRKVTVKQLKEDYFKKIECFDSVEISGVEDRFNASLGTYHDLLKIIKDKDFLDNEENEDILEDIVLTLTLFEDREMIEERLKTYAHLFDDKVMKQLKRRRYTGWGRLSRKLINGIRDKQSGKTILDFLKSDGFANRNFMQLIHDDSLTFKEDIQKAQVSGQGDSLHEHIANLAGSPAIKKGILQTVKVVDELVKVMGRHKPENIVIEMARENQTTQKGQKNSRERMKRIEEGIKELGSQILKEHPVENTQLQNEKLYLYYLQNGRDMYVDQELDINRLSDYDVDHIVPQSFLKDDSIDNKVLTRSDKARGKSDNVPSEEVVKKMKNYWRQLLNAKLITQRKFDNLTKAERGGLSELDKAGFIKRQLVETRQITKHVAQILDSRMNTKYDENDKLIREVKVITLKSKLVSDFRKDFQFYKVREINNYHHAHDAYLNAVVGTALIKKYPKLESEFVYGDYKVYDVRKMIAKSEQEIGKATAKYFFYSNIMNFFKTEITLANGEIRKRPLIETNGETGEIVWDKGRDFATVRKVLSMPQVNIVKKTEVQTGGFSKESILPKRNSDKLIARKKDWDPKKYGGFDSPTVAYSVLVVAKVEKGKSKKLKSVKELLGITIMERSSFEKNPIDFLEAKGYKEVKKDLIIKLPKYSLFELENGRKRMLASAGELQKGNELALPSKYVNFLYLASHYEKLKGSPEDNEQKQLFVEQHKHYLDEIIEQISEFSKRVILADANLDKVLSAYNKHRDKPIREQAENIIHLFTLTNLGAPAAFKYFDTTIDRKRYTSTKEVLDATLIHQSITGLYETRIDLSQLGGDGGGSSGSSGSSGSSGSSGGVPWLMKKPLQLTVLVPLHEYQERLLQQTALPKEQKELLQKLFLKYDALWQHWENQVGHRRIKPHNIATGTLAPRPQKQYPINPKAKPSIQIVIDDLLKQGVLIQQNSTMNTPVYPVPKPDGKWRMVLDYREVNKTIPLIAAQNQHSAGILSSIYRGKYKTTLDLTNGFWAHPITPESYWLTAFTWQGKQYCWTRLPQGFLNSPALFTADVVDLLKEIPNVQAYVDDIYISHDDPQEHLEQLEKIFSILLNAGYVVSLKKSEIAQREVEFLGFNITKEGRGLTDTFKQKLLNITPPKDLKQLQSILGLLNFARNFIPNYSELVKPLYTIVANANGKFISWTEDNSNQLQHIISVLNQADNLEERNPETRLIIKVNSSPSAGYIRYYNEGSKRPIMYVNYIFSKAEAKFTQTEKLLTTMHKGLIKAMDLAMGQEILVYSPIVSMTKIQRTPLPERKALPVRWITWMTYLEDPRIQFHYDKSLPELQQIPNVTEDVIAKTKHPSEFAMVFYTDGSAIKHPDVNKSHSAGMGIAQVQFIPEYKIVHQWSIPLGDHTAQLAEIAAVEFACKKALKISGPVLIVTDSFYVAESANKELPYWKSNGFLNNKKKPLRHVSKWKSIAECLQLKPDIIIMHEKGHQQPMTTLHTEGNNLADKLATQGSYVVHAGKRTADGSEFEKRTADGSEFESPKKKAKVE

SEQ ID NO: 429 - protein, 2084 aa, synthetic construct
MPAAKRVKLDGGDKKYSIGLDIGTNSVGWAVITDEYKVPSKKFKVLGNTDRHSIKKNLIGALLFDSGETAEATRLKRTARRRYTRRKNRICYLQEIFSNEMAKVDDSFFHRLEESFLVEEDKKHERHPIFGNIVDEVAYHEKYPTIYHLRKKLVDSTDKADLRLIYLALAHMIKFRGHFLIEGDLNPDNSDVDKLFIQLVQTYNQLFEENPINASGVDAKAILSARLSKSRRLENLIAQLPGEKKNGLFGNLIALSLGLTPNFKSNFDLAEDAKLQLSKDTYDDDLDNLLAQIGDQYADLFLAAKNLSDAILLSDILRVNTEITKAPLSASMIKRYDEHHQDLTLLKALVRQQLPEKYKEIFFDQSKNGYAGYIDGGASQEEFYKFIKPILEKMDGTEELLVKLNREDLLRKQRTFDNGSIPHQIHLGELHAILRRQEDFYPFLKDNREKIEKILTFRIPYYVGPLARGNSRFAWMTRKSEETITPWNFEEVVDKGASAQSFIERMTNFDKNLPNEKVLPKHSLLYEYFTVYNELTKVKYVTEGMRKPAFLSGEQKKAIVDLLFKTNRKVTVKQLKEDYFKKIECFDSVEISGVEDRFNASLGTYHDLLKIIKDKDFLDNEENEDILEDIVLTLTLFEDREMIEERLKTYAHLFDDKVMKQLKRRRYTGWGRLSRKLINGIRDKQSGKTILDFLKSDGFANRNFMQLIHDDSLTFKEDIQKAQVSGQGDSLHEHIANLAGSPAIKKGILQTVKVVDELVKVMGRHKPENIVIEMARENQTTQKGQKNSRERMKRIEEGIKELGSQILKEHPVENTQLQNEKLYLYYLQNGRDMYVDQELDINRLSDYDVDHIVPQSFLKDDSIDNKVLTRSDKARGKSDNVPSEEVVKKMKNYWRQLLNAKLITQRKFDNLTKAERGGLSELDKAGFIKRQLVETRQITKHVAQILDSRMNTKYDENDKLIREVKVITLKSKLVSDFRKDFQFYKVREINNYHHAHDAYLNAVVGTALIKKYPKLESEFVYGDYKVYDVRKMIAKSEQEIGKATAKYFFYSNIMNFFKTEITLANGEIRKRPLIETNGETGEIVWDKGRDFATVRKVLSMPQVNIVKKTEVQTGGFSKESILPKRNSDKLIARKKDWDPKKYGGFDSPTVAYSVLVVAKVEKGKSKKLKSVKELLGITIMERSSFEKNPIDFLEAKGYKEVKKDLIIKLPKYSLFELENGRKRMLASAGELQKGNELALPSKYVNFLYLASHYEKLKGSPEDNEQKQLFVEQHKHYLDEIIEQISEFSKRVILADANLDKVLSAYNKHRDKPIREQAENIIHLFTLTNLGAPAAFKYFDTTIDRKRYTSTKEVLDATLIHQSITGLYETRIDLSQLGGDGGGGGGGGGGGGVPWLMKKPLQLTVLVPLHEYQERLLQQTALPKEQKELLQKLFLKYDALWQHWENQVGHRRIKPHNIATGTLAPRPQKQYPINPKAKPSIQIVIDDLLKQGVLIQQNSTMNTPVYPVPKPDGKWRMVLDYREVNKTIPLIAAQNQHSAGILSSIYRGKYKTTLDLTNGFWAHPITPESYWLTAFTWQGKQYCWTRLPQGFLNSPALFTADVVDLLKEIPNVQAYVDDIYISHDDPQEHLEQLEKIFSILLNAGYVVSLKKSEIAQREVEFLGFNITKEGRGLTDTFKQKLLNITPPKDLKQLQSILGLLNFARNFIPNYSELVKPLYTIVANANGKFISWTEDNSNQLQHIISVLNQADNLEERNPETRLIIKVNSSPSAGYIRYYNEGSKRPIMYVNYIFSKAEAKFTQTEKLLTTMHKGLIKAMDLAMGQEILVYSPIVSMTKIQRTPLPERKALPVRWITWMTYLEDPRIQFHYDKSLPELQQIPNVTEDVIAKTKHPSEFAMVFYTDGSAIKHPDVNKSHSAGMGIAQVQFIPEYKIVHQWSIPLGDHTAQLAEIAAVEFACKKALKISGPVLIVTDSFYVAESANKELPYWKSNGFLNNKKKPLRHVSKWKSIAECLQLKPDIIIMHEKGHQQPMTTLHTEGNNLADKLATQGSYVVHAGKRTADGSEFEKRTADGSEFESPKKKAKVE

SEQ ID NO: 430 - protein, 2084 aa, synthetic construct
MPAAKRVKLDGGDKKYSIGLDIGTNSVGWAVITDEYKVPSKKFKVLGNTDRHSIKKNLIGALLFDSGETAEATRLKRTARRRYTRRKNRICYLQEIFSNEMAKVDDSFFHRLEESFLVEEDKKHERHPIFGNIVDEVAYHEKYPTIYHLRKKLVDSTDKADLRLIYLALAHMIKFRGHFLIEGDLNPDNSDVDKLFIQLVQTYNQLFEENPINASGVDAKAILSARLSKSRRLENLIAQLPGEKKNGLFGNLIALSLGLTPNFKSNFDLAEDAKLQLSKDTYDDDLDNLLAQIGDQYADLFLAAKNLSDAILLSDILRVNTEITKAPLSASMIKRYDEHHQDLTLLKALVRQQLPEKYKEIFFDQSKNGYAGYIDGGASQEEFYKFIKPILEKMDGTEELLVKLNREDLLRKQRTFDNGSIPHQIHLGELHAILRRQEDFYPFLKDNREKIEKILTFRIPYYVGPLARGNSRFAWMTRKSEETITPWNFEEVVDKGASAQSFIERMTNFDKNLPNEKVLPKHSLLYEYFTVYNELTKVKYVTEGMRKPAFLSGEQKKAIVDLLFKTNRKVTVKQLKEDYFKKIECFDSVEISGVEDRFNASLGTYHDLLKIIKDKDFLDNEENEDILEDIVLTLTLFEDREMIEERLKTYAHLFDDKVMKQLKRRRYTGWGRLSRKLINGIRDKQSGKTILDFLKSDGFANRNFMQLIHDDSLTFKEDIQKAQVSGQGDSLHEHIANLAGSPAIKKGILQTVKVVDELVKVMGRHKPENIVIEMARENQTTQKGQKNSRERMKRIEEGIKELGSQILKEHPVENTQLQNEKLYLYYLQNGRDMYVDQELDINRLSDYDVDHIVPQSFLKDDSIDNKVLTRSDKARGKSDNVPSEEVVKKMKNYWRQLLNAKLITQRKFDNLTKAERGGLSELDKAGFIKRQLVETRQITKHVAQILDSRMNTKYDENDKLIREVKVITLKSKLVSDFRKDFQFYKVREINNYHHAHDAYLNAVVGTALIKKYPKLESEFVYGDYKVYDVRKMIAKSEQEIGKATAKYFFYSNIMNFFKTEITLANGEIRKRPLIETNGETGEIVWDKGRDFATVRKVLSMPQVNIVKKTEVQTGGFSKESILPKRNSDKLIARKKDWDPKKYGGFDSPTVAYSVLVVAKVEKGKSKKLKSVKELLGITIMERSSFEKNPIDFLEAKGYKEVKKDLIIKLPKYSLFELENGRKRMLASAGELQKGNELALPSKYVNFLYLASHYEKLKGSPEDNEQKQLFVEQHKHYLDEIIEQISEFSKRVILADANLDKVLSAYNKHRDKPIREQAENIIHLFTLTNLGAPAAFKYFDTTIDRKRYTSTKEVLDATLIHQSITGLYETRIDLSQLGGDGGPAPEAAAKGGVPWLMKKPLQLTVLVPLHEYQERLLQQTALPKEQKELLQKLFLKYDALWQHWENQVGHRRIKPHNIATGTLAPRPQKQYPINPKAKPSIQIVIDDLLKQGVLIQQNSTMNTPVYPVPKPDGKWRMVLDYREVNKTIPLIAAQNQHSAGILSSIYRGKYKTTLDLTNGFWAHPITPESYWLTAFTWQGKQYCWTRLPQGFLNSPALFTADVVDLLKEIPNVQAYVDDIYISHDDPQEHLEQLEKIFSILLNAGYVVSLKKSEIAQREVEFLGFNITKEGRGLTDTFKQKLLNITPPKDLKQLQSILGLLNFARNFIPNYSELVKPLYTIVANANGKFISWTEDNSNQLQHIISVLNQADNLEERNPETRLIIKVNSSPSAGYIRYYNEGSKRPIMYVNYIFSKAEAKFTQTEKLLTTMHKGLIKAMDLAMGQEILVYSPIVSMTKIQRTPLPERKALPVRWITWMTYLEDPRIQFHYDKSLPELQQIPNVTEDVIAKTKHPSEFAMVFYTDGSAIKHPDVNKSHSAGMGIAQVQFIPEYKIVHQWSIPLGDHTAQLAEIAAVEFACKKALKISGPVLIVTDSFYVAESANKELPYWKSNGFLNNKKKPLRHVSKWKSIAECLQLKPDIIIMHEKGHQQPMTTLHTEGNNLADKLATQGSYVVHAGKRTADGSEFEKRTADGSEFESPKKKAKVE

SEQ ID NO: 431 - protein, 2082 aa, synthetic construct
MPAAKRVKLDGGDKKYSIGLDIGTNSVGWAVITDEYKVPSKKFKVLGNTDRHSIKKNLIGALLFDSGETAEATRLKRTARRRYTRRKNRICYLQEIFSNEMAKVDDSFFHRLEESFLVEEDKKHERHPIFGNIVDEVAYHEKYPTIYHLRKKLVDSTDKADLRLIYLALAHMIKFRGHFLIEGDLNPDNSDVDKLFIQLVQTYNQLFEENPINASGVDAKAILSARLSKSRRLENLIAQLPGEKKNGLFGNLIALSLGLTPNFKSNFDLAEDAKLQLSKDTYDDDLDNLLAQIGDQYADLFLAAKNLSDAILLSDILRVNTEITKAPLSASMIKRYDEHHQDLTLLKALVRQQLPEKYKEIFFDQSKNGYAGYIDGGASQEEFYKFIKPILEKMDGTEELLVKLNREDLLRKQRTFDNGSIPHQIHLGELHAILRRQEDFYPFLKDNREKIEKILTFRIPYYVGPLARGNSRFAWMTRKSEETITPWNFEEVVDKGASAQSFIERMTNFDKNLPNEKVLPKHSLLYEYFTVYNELTKVKYVTEGMRKPAFLSGEQKKAIVDLLFKTNRKVTVKQLKEDYFKKIECFDSVEISGVEDRFNASLGTYHDLLKIIKDKDFLDNEENEDILEDIVLTLTLFEDREMIEERLKTYAHLFDDKVMKQLKRRRYTGWGRLSRKLINGIRDKQSGKTILDFLKSDGFANRNFMQLIHDDSLTFKEDIQKAQVSGQGDSLHEHIANLAGSPAIKKGILQTVKVVDELVKVMGRHKPENIVIEMARENQTTQKGQKNSRERMKRIEEGIKELGSQILKEHPVENTQLQNEKLYLYYLQNGRDMYVDQELDINRLSDYDVDHIVPQSFLKDDSIDNKVLTRSDKARGKSDNVPSEEVVKKMKNYWRQLLNAKLITQRKFDNLTKAERGGLSELDKAGFIKRQLVETRQITKHVAQILDSRMNTKYDENDKLIREVKVITLKSKLVSDFRKDFQFYKVREINNYHHAHDAYLNAVVGTALIKKYPKLESEFVYGDYKVYDVRKMIAKSEQEIGKATAKYFFYSNIMNFFKTEITLANGEIRKRPLIETNGETGEIVWDKGRDFATVRKVLSMPQVNIVKKTEVQTGGFSKESILPKRNSDKLIARKKDWDPKKYGGFDSPTVAYSVLVVAKVEKGKSKKLKSVKELLGITIMERSSFEKNPIDFLEAKGYKEVKKDLIIKLPKYSLFELENGRKRMLASAGELQKGNELALPSKYVNFLYLASHYEKLKGSPEDNEQKQLFVEQHKHYLDEIIEQISEFSKRVILADANLDKVLSAYNKHRDKPIREQAENIIHLFTLTNLGAPAAFKYFDTTIDRKRYTSTKEVLDATLIHQSITGLYETRIDLSQLGGDGGGGGGGGGGVPWLMKKPLQLTVLVPLHEYQERLLQQTALPKEQKELLQKLFLKYDALWQHWENQVGHRRIKPHNIATGTLAPRPQKQYPINPKAKPSIQIVIDDLLKQGVLIQQNSTMNTPVYPVPKPDGKWRMVLDYREVNKTIPLIAAQNQHSAGILSSIYRGKYKTTLDLTNGFWAHPITPESYWLTAFTWQGKQYCWTRLPQGFLNSPALFTADVVDLLKEIPNVQAYVDDIYISHDDPQEHLEQLEKIFSILLNAGYVVSLKKSEIAQREVEFLGFNITKEGRGLTDTFKQKLLNITPPKDLKQLQSILGLLNFARNFIPNYSELVKPLYTIVANANGKFISWTEDNSNQLQHIISVLNQADNLEERNPETRLIIKVNSSPSAGYIRYYNEGSKRPIMYVNYIFSKAEAKFTQTEKLLTTMHKGLIKAMDLAMGQEILVYSPIVSMTKIQRTPLPERKALPVRWITWMTYLEDPRIQFHYDKSLPELQQIPNVTEDVIAKTKHPSEFAMVFYTDGSAIKHPDVNKSHSAGMGIAQVQFIPEYKIVHQWSIPLGDHTAQLAEIAAVEFACKKALKISGPVLIVTDSFYVAESANKELPYWKSNGFLNNKKKPLRHVSKWKSIAECLQLKPDIIIMHEKGHQQPMTTLHTEGNNLADKLATQGSYVVHAGKRTADGSEFEKRTADGSEFESPKKKAKVE

SEQ ID NO: 432 - protein, 2087 aa, synthetic construct
MPAAKRVKLDGGDKKYSIGLDIGTNSVGWAVITDEYKVPSKKFKVLGNTDRHSIKKNLIGALLFDSGETAEATRLKRTARRRYTRRKNRICYLQEIFSNEMAKVDDSFFHRLEESFLVEEDKKHERHPIFGNIVDEVAYHEKYPTIYHLRKKLVDSTDKADLRLIYLALAHMIKFRGHFLIEGDLNPDNSDVDKLFIQLVQTYNQLFEENPINASGVDAKAILSARLSKSRRLENLIAQLPGEKKNGLFGNLIALSLGLTPNFKSNFDLAEDAKLQLSKDTYDDDLDNLLAQIGDQYADLFLAAKNLSDAILLSDILRVNTEITKAPLSASMIKRYDEHHQDLTLLKALVRQQLPEKYKEIFFDQSKNGYAGYIDGGASQEEFYKFIKPILEKMDGTEELLVKLNREDLLRKQRTFDNGSIPHQIHLGELHAILRRQEDFYPFLKDNREKIEKILTFRIPYYVGPLARGNSRFAWMTRKSEETITPWNFEEVVDKGASAQSFIERMTNFDKNLPNEKVLPKHSLLYEYFTVYNELTKVKYVTEGMRKPAFLSGEQKKAIVDLLFKTNRKVTVKQLKEDYFKKIECFDSVEISGVEDRFNASLGTYHDLLKIIKDKDFLDNEENEDILEDIVLTLTLFEDREMIEERLKTYAHLFDDKVMKQLKRRRYTGWGRLSRKLINGIRDKQSGKTILDFLKSDGFANRNFMQLIHDDSLTFKEDIQKAQVSGQGDSLHEHIANLAGSPAIKKGILQTVKVVDELVKVMGRHKPENIVIEMARENQTTQKGQKNSRERMKRIEEGIKELGSQILKEHPVENTQLQNEKLYLYYLQNGRDMYVDQELDINRLSDYDVDHIVPQSFLKDDSIDNKVLTRSDKARGKSDNVPSEEVVKKMKNYWRQLLNAKLITQRKFDNLTKAERGGLSELDKAGFIKRQLVETRQITKHVAQILDSRMNTKYDENDKLIREVKVITLKSKLVSDFRKDFQFYKVREINNYHHAHDAYLNAVVGTALIKKYPKLESEFVYGDYKVYDVRKMIAKSEQEIGKATAKYFFYSNIMNFFKTEITLANGEIRKRPLIETNGETGEIVWDKGRDFATVRKVLSMPQVNIVKKTEVQTGGFSKESILPKRNSDKLIARKKDWDPKKYGGFDSPTVAYSVLVVAKVEKGKSKKLKSVKELLGITIMERSSFEKNPIDFLEAKGYKEVKKDLIIKLPKYSLFELENGRKRMLASAGELQKGNELALPSKYVNFLYLASHYEKLKGSPEDNEQKQLFVEQHKHYLDEIIEQISEFSKRVILADANLDKVLSAYNKHRDKPIREQAENIIHLFTLTNLGAPAAFKYFDTTIDRKRYTSTKEVLDATLIHQSITGLYETRIDLSQLGGDGGGGSEAAAKPAPGGVPWLMKKPLQLTVLVPLHEYQERLLQQTALPKEQKELLQKLFLKYDALWQHWENQVGHRRIKPHNIATGTLAPRPQKQYPINPKAKPSIQIVIDDLLKQGVLIQQNSTMNTPVYPVPKPDGKWRMVLDYREVNKTIPLIAAQNQHSAGILSSIYRGKYKTTLDLTNGFWAHPITPESYWLTAFTWQGKQYCWTRLPQGFLNSPALFTADVVDLLKEIPNVQAYVDDIYISHDDPQEHLEQLEKIFSILLNAGYVVSLKKSEIAQREVEFLGFNITKEGRGLTDTFKQKLLNITPPKDLKQLQSILGLLNFARNFIPNYSELVKPLYTIVANANGKFISWTEDNSNQLQHIISVLNQADNLEERNPETRLIIKVNSSPSAGYIRYYNEGSKRPIMYVNYIFSKAEAKFTQTEKLLTTMHKGLIKAMDLAMGQEILVYSPIVSMTKIQRTPLPERKALPVRWITWMTYLEDPRIQFHYDKSLPELQQIPNVTEDVIAKTKHPSEFAMVFYTDGSAIKHPDVNKSHSAGMGIAQVQFIPEYKIVHQWSIPLGDHTAQLAEIAAVEFACKKALKISGPVLIVTDSFYVAESANKELPYWKSNGFLNNKKKPLRHVSKWKSIAECLQLKPDIIIMHEKGHQQPMTTLHTEGNNLADKLATQGSYVVHAGKRTADGSEFEKRTADGSEFESPKKKAKVE

SEQ ID NO: 433 - protein, 2087 aa, synthetic construct
MPAAKRVKLDGGDKKYSIGLDIGTNSVGWAVITDEYKVPSKKFKVLGNTDRHSIKKNLIGALLFDSGETAEATRLKRTARRRYTRRKNRICYLQEIFSNEMAKVDDSFFHRLEESFLVEEDKKHERHPIFGNIVDEVAYHEKYPTIYHLRKKLVDSTDKADLRLIYLALAHMIKFRGHFLIEGDLNPDNSDVDKLFIQLVQTYNQLFEENPINASGVDAKAILSARLSKSRRLENLIAQLPGEKKNGLFGNLIALSLGLTPNFKSNFDLAEDAKLQLSKDTYDDDLDNLLAQIGDQYADLFLAAKNLSDAILLSDILRVNTEITKAPLSASMIKRYDEHHQDLTLLKALVRQQLPEKYKEIFFDQSKNGYAGYIDGGASQEEFYKFIKPILEKMDGTEELLVKLNREDLLRKQRTFDNGSIPHQIHLGELHAILRRQEDFYPFLKDNREKIEKILTFRIPYYVGPLARGNSRFAWMTRKSEETITPWNFEEVVDKGASAQSFIERMTNFDKNLPNEKVLPKHSLLYEYFTVYNELTKVKYVTEGMRKPAFLSGEQKKAIVDLLFKTNRKVTVKQLKEDYFKKIECFDSVEISGVEDRFNASLGTYHDLLKIIKDKDFLDNEENEDILEDIVLTLTLFEDREMIEERLKTYAHLFDDKVMKQLKRRRYTGWGRLSRKLINGIRDKQSGKTILDFLKSDGFANRNFMQLIHDDSLTFKEDIQKAQVSGQGDSLHEHIANLAGSPAIKKGILQTVKVVDELVKVMGRHKPENIVIEMARENQTTQKGQKNSRERMKRIEEGIKELGSQILKEHPVENTQLQNEKLYLYYLQNGRDMYVDQELDINRLSDYDVDHIVPQSFLKDDSIDNKVLTRSDKARGKSDNVPSEEVVKKMKNYWRQLLNAKLITQRKFDNLTKAERGGLSELDKAGFIKRQLVETRQITKHVAQILDSRMNTKYDENDKLIREVKVITLKSKLVSDFRKDFQFYKVREINNYHHAHDAYLNAVVGTALIKKYPKLESEFVYGDYKVYDVRKMIAKSEQEIGKATAKYFFYSNIMNFFKTEITLANGEIRKRPLIETNGETGEIVWDKGRDFATVRKVLSMPQVNIVKKTEVQTGGFSKESILPKRNSDKLIARKKDWDPKKYGGFDSPTVAYSVLVVAKVEKGKSKKLKSVKELLGITIMERSSFEKNPIDFLEAKGYKEVKKDLIIKLPKYSLFELENGRKRMLASAGELQKGNELALPSKYVNFLYLASHYEKLKGSPEDNEQKQLFVEQHKHYLDEIIEQISEFSKRVILADANLDKVLSAYNKHRDKPIREQAENIIHLFTLTNLGAPAAFKYFDTTIDRKRYTSTKEVLDATLIHQSITGLYETRIDLSQLGGDGGGGGEAAAKGSSGGVPWLMKKPLQLTVLVPLHEYQERLLQQTALPKEQKELLQKLFLKYDALWQHWENQVGHRRIKPHNIATGTLAPRPQKQYPINPKAKPSIQIVIDDLLKQGVLIQQNSTMNTPVYPVPKPDGKWRMVLDYREVNKTIPLIAAQNQHSAGILSSIYRGKYKTTLDLTNGFWAHPITPESYWLTAFTWQGKQYCWTRLPQGFLNSPALFTADVVDLLKEIPNVQAYVDDIYISHDDPQEHLEQLEKIFSILLNAGYVVSLKKSEIAQREVEFLGFNITKEGRGLTDTFKQKLLNITPPKDLKQLQSILGLLNFARNFIPNYSELVKPLYTIVANANGKFISWTEDNSNQLQHIISVLNQADNLEERNPETRLIIKVNSSPSAGYIRYYNEGSKRPIMYVNYIFSKAEAKFTQTEKLLTTMHKGLIKAMDLAMGQEILVYSPIVSMTKIQRTPLPERKALPVRWITWMTYLEDPRIQFHYDKSLPELQQIPNVTEDVIAKTKHPSEFAMVFYTDGSAIKHPDVNKSHSAGMGIAQVQFIPEYKIVHQWSIPLGDHTAQLAEIAAVEFACKKALKISGPVLIVTDSFYVAESANKELPYWKSNGFLNNKKKPLRHVSKWKSIAECLQLKPDIIIMHEKGHQQPMTTLHTEGNNLADKLATQGSYVVHAGKRTADGSEFEKRTADGSEFESPKKKAKVE

SEQ ID NO: 434 - protein, 2082 aa, synthetic construct
MPAAKRVKLDGGDKKYSIGLDIGTNSVGWAVITDEYKVPSKKFKVLGNTDRHSIKKNLIGALLFDSGETAEATRLKRTARRRYTRRKNRICYLQEIFSNEMAKVDDSFFHRLEESFLVEEDKKHERHPIFGNIVDEVAYHEKYPTIYHLRKKLVDSTDKADLRLIYLALAHMIKFRGHFLIEGDLNPDNSDVDKLFIQLVQTYNQLFEENPINASGVDAKAILSARLSKSRRLENLIAQLPGEKKNGLFGNLIALSLGLTPNFKSNFDLAEDAKLQLSKDTYDDDLDNLLAQIGDQYADLFLAAKNLSDAILLSDILRVNTEITKAPLSASMIKRYDEHHQDLTLLKALVRQQLPEKYKEIFFDQSKNGYAGYIDGGASQEEFYKFIKPILEKMDGTEELLVKLNREDLLRKQRTFDNGSIPHQIHLGELHAILRRQEDFYPFLKDNREKIEKILTFRIPYYVGPLARGNSRFAWMTRKSEETITPWNFEEVVDKGASAQSFIERMTNFDKNLPNEKVLPKHSLLYEYFTVYNELTKVKYVTEGMRKPAFLSGEQKKAIVDLLFKTNRKVTVKQLKEDYFKKIECFDSVEISGVEDRFNASLGTYHDLLKIIKDKDFLDNEENEDILEDIVLTLTLFEDREMIEERLKTYAHLFDDKVMKQLKRRRYTGWGRLSRKLINGIRDKQSGKTILDFLKSDGFANRNFMQLIHDDSLTFKEDIQKAQVSGQGDSLHEHIANLAGSPAIKKGILQTVKVVDELVKVMGRHKPENIVIEMARENQTTQKGQKNSRERMKRIEEGIKELGSQILKEHPVENTQLQNEKLYLYYLQNGRDMYVDQELDINRLSDYDVDHIVPQSFLKDDSIDNKVLTRSDKARGKSDNVPSEEVVKKMKNYWRQLLNAKLITQRKFDNLTKAERGGLSELDKAGFIKRQLVETRQITKHVAQILDSRMNTKYDENDKLIREVKVITLKSKLVSDFRKDFQFYKVREINNYHHAHDAYLNAVVGTALIKKYPKLESEFVYGDYKVYDVRKMIAKSEQEIGKATAKYFFYSNIMNFFKTEITLANGEIRKRPLIETNGETGEIVWDKGRDFATVRKVLSMPQVNIVKKTEVQTGGFSKESILPKRNSDKLIARKKDWDPKKYGGFDSPTVAYSVLVVAKVEKGKSKKLKSVKELLGITIMERSSFEKNPIDFLEAKGYKEVKKDLIIKLPKYSLFELENGRKRMLASAGELQKGNELALPSKYVNFLYLASHYEKLKGSPEDNEQKQLFVEQHKHYLDEIIEQISEFSKRVILADANLDKVLSAYNKHRDKPIREQAENIIHLFTLTNLGAPAAFKYFDTTIDRKRYTSTKEVLDATLIHQSITGLYETRIDLSQLGGDGGGSSGSSGGVPWLMKKPLQLTVLVPLHEYQERLLQQTALPKEQKELLQKLFLKYDALWQHWENQVGHRRIKPHNIATGTLAPRPQKQYPINPKAKPSIQIVIDDLLKQGVLIQQNSTMNTPVYPVPKPDGKWRMVLDYREVNKTIPLIAAQNQHSAGILSSIYRGKYKTTLDLTNGFWAHPITPESYWLTAFTWQGKQYCWTRLPQGFLNSPALFTADVVDLLKEIPNVQAYVDDIYISHDDPQEHLEQLEKIFSILLNAGYVVSLKKSEIAQREVEFLGFNITKEGRGLTDTFKQKLLNITPPKDLKQLQSILGLLNFARNFIPNYSELVKPLYTIVANANGKFISWTEDNSNQLQHIISVLNQADNLEERNPETRLIIKVNSSPSAGYIRYYNEGSKRPIMYVNYIFSKAEAKFTQTEKLLTTMHKGLIKAMDLAMGQEILVYSPIVSMTKIQRTPLPERKALPVRWITWMTYLEDPRIQFHYDKSLPELQQIPNVTEDVIAKTKHPSEFAMVFYTDGSAIKHPDVNKSHSAGMGIAQVQFIPEYKIVHQWSIPLGDHTAQLAEIAAVEFACKKALKISGPVLIVTDSFYVAESANKELPYWKSNGFLNNKKKPLRHVSKWKSIAECLQLKPDIIIMHEKGHQQPMTTLHTEGNNLADKLATQGSYVVHAGKRTADGSEFEKRTADGSEFESPKKKAKVE

SEQ ID NO: 435 - protein, 2084 aa, synthetic construct
MPAAKRVKLDGGDKKYSIGLDIGTNSVGWAVITDEYKVPSKKFKVLGNTDRHSIKKNLIGALLFDSGETAEATRLKRTARRRYTRRKNRICYLQEIFSNEMAKVDDSFFHRLEESFLVEEDKKHERHPIFGNIVDEVAYHEKYPTIYHLRKKLVDSTDKADLRLIYLALAHMIKFRGHFLIEGDLNPDNSDVDKLFIQLVQTYNQLFEENPINASGVDAKAILSARLSKSRRLENLIAQLPGEKKNGLFGNLIALSLGLTPNFKSNFDLAEDAKLQLSKDTYDDDLDNLLAQIGDQYADLFLAAKNLSDAILLSDILRVNTEITKAPLSASMIKRYDEHHQDLTLLKALVRQQLPEKYKEIFFDQSKNGYAGYIDGGASQEEFYKFIKPILEKMDGTEELLVKLNREDLLRKQRTFDNGSIPHQIHLGELHAILRRQEDFYPFLKDNREKIEKILTFRIPYYVGPLARGNSRFAWMTRKSEETITPWNFEEVVDKGASAQSFIERMTNFDKNLPNEKVLPKHSLLYEYFTVYNELTKVKYVTEGMRKPAFLSGEQKKAIVDLLFKTNRKVTVKQLKEDYFKKIECFDSVEISGVEDRFNASLGTYHDLLKIIKDKDFLDNEENEDILEDIVLTLTLFEDREMIEERLKTYAHLFDDKVMKQLKRRRYTGWGRLSRKLINGIRDKQSGKTILDFLKSDGFANRNFMQLIHDDSLTFKEDIQKAQVSGQGDSLHEHIANLAGSPAIKKGILQTVKVVDELVKVMGRHKPENIVIEMARENQTTQKGQKNSRERMKRIEEGIKELGSQILKEHPVENTQLQNEKLYLYYLQNGRDMYVDQELDINRLSDYDVDHIVPQSFLKDDSIDNKVLTRSDKARGKSDNVPSEEVVKKMKNYWRQLLNAKLITQRKFDNLTKAERGGLSELDKAGFIKRQLVETRQITKHVAQILDSRMNTKYDENDKLIREVKVITLKSKLVSDFRKDFQFYKVREINNYHHAHDAYLNAVVGTALIKKYPKLESEFVYGDYKVYDVRKMIAKSEQEIGKATAKYFFYSNIMNFFKTEITLANGEIRKRPLIETNGETGEIVWDKGRDFATVRKVLSMPQVNIVKKTEVQTGGFSKESILPKRNSDKLIARKKDWDPKKYGGFDSPTVAYSVLVVAKVEKGKSKKLKSVKELLGITIMERSSFEKNPIDFLEAKGYKEVKKDLIIKLPKYSLFELENGRKRMLASAGELQKGNELALPSKYVNFLYLASHYEKLKGSPEDNEQKQLFVEQHKHYLDEIIEQISEFSKRVILADANLDKVLSAYNKHRDKPIREQAENIIHLFTLTNLGAPAAFKYFDTTIDRKRYTSTKEVLDATLIHQSITGLYETRIDLSQLGGDGGGGGEAAAKGGVPWLMKKPLQLTVLVPLHEYQERLLQQTALPKEQKELLQKLFLKYDALWQHWENQVGHRRIKPHNIATGTLAPRPQKQYPINPKAKPSIQIVIDDLLKQGVLIQQNSTMNTPVYPVPKPDGKWRMVLDYREVNKTIPLIAAQNQHSAGILSSIYRGKYKTTLDLTNGFWAHPITPESYWLTAFTWQGKQYCWTRLPQGFLNSPALFTADVVDLLKEIPNVQAYVDDIYISHDDPQEHLEQLEKIFSILLNAGYVVSLKKSEIAQREVEFLGFNITKEGRGLTDTFKQKLLNITPPKDLKQLQSILGLLNFARNFIPNYSELVKPLYTIVANANGKFISWTEDNSNQLQHIISVLNQADNLEERNPETRLIIKVNSSPSAGYIRYYNEGSKRPIMYVNYIFSKAEAKFTQTEKLLTTMHKGLIKAMDLAMGQEILVYSPIVSMTKIQRTPLPERKALPVRWITWMTYLEDPRIQFHYDKSLPELQQIPNVTEDVIAKTKHPSEFAMVFYTDGSAIKHPDVNKSHSAGMGIAQVQFIPEYKIVHQWSIPLGDHTAQLAEIAAVEFACKKALKISGPVLIVTDSFYVAESANKELPYWKSNGFLNNKKKPLRHVSKWKSIAECLQLKPDIIIMHEKGHQQPMTTLHTEGNNLADKLATQGSYVVHAGKRTADGSEFEKRTADGSEFESPKKKAKVE

SEQ ID NO: 436 - protein, 2087 aa, synthetic construct
MPAAKRVKLDGGDKKYSIGLDIGTNSVGWAVITDEYKVPSKKFKVLGNTDRHSIKKNLIGALLFDSGETAEATRLKRTARRRYTRRKNRICYLQEIFSNEMAKVDDSFFHRLEESFLVEEDKKHERHPIFGNIVDEVAYHEKYPTIYHLRKKLVDSTDKADLRLIYLALAHMIKFRGHFLIEGDLNPDNSDVDKLFIQLVQTYNQLFEENPINASGVDAKAILSARLSKSRRLENLIAQLPGEKKNGLFGNLIALSLGLTPNFKSNFDLAEDAKLQLSKDTYDDDLDNLLAQIGDQYADLFLAAKNLSDAILLSDILRVNTEITKAPLSASMIKRYDEHHQDLTLLKALVRQQLPEKYKEIFFDQSKNGYAGYIDGGASQEEFYKFIKPILEKMDGTEELLVKLNREDLLRKQRTFDNGSIPHQIHLGELHAILRRQEDFYPFLKDNREKIEKILTFRIPYYVGPLARGNSRFAWMTRKSEETITPWNFEEVVDKGASAQSFIERMTNFDKNLPNEKVLPKHSLLYEYFTVYNELTKVKYVTEGMRKPAFLSGEQKKAIVDLLFKTNRKVTVKQLKEDYFKKIECFDSVEISGVEDRFNASLGTYHDLLKIIKDKDFLDNEENEDILEDIVLTLTLFEDREMIEERLKTYAHLFDDKVMKQLKRRRYTGWGRLSRKLINGIRDKQSGKTILDFLKSDGFANRNFMQLIHDDSLTFKEDIQKAQVSGQGDSLHEHIANLAGSPAIKKGILQTVKVVDELVKVMGRHKPENIVIEMARENQTTQKGQKNSRERMKRIEEGIKELGSQILKEHPVENTQLQNEKLYLYYLQNGRDMYVDQELDINRLSDYDVDHIVPQSFLKDDSIDNKVLTRSDKARGKSDNVPSEEVVKKMKNYWRQLLNAKLITQRKFDNLTKAERGGLSELDKAGFIKRQLVETRQITKHVAQILDSRMNTKYDENDKLIREVKVITLKSKLVSDFRKDFQFYKVREINNYHHAHDAYLNAVVGTALIKKYPKLESEFVYGDYKVYDVRKMIAKSEQEIGKATAKYFFYSNIMNFFKTEITLANGEIRKRPLIETNGETGEIVWDKGRDFATVRKVLSMPQVNIVKKTEVQTGGFSKESILPKRNSDKLIARKKDWDPKKYGGFDSPTVAYSVLVVAKVEKGKSKKLKSVKELLGITIMERSSFEKNPIDFLEAKGYKEVKKDLIIKLPKYSLFELENGRKRMLASAGELQKGNELALPSKYVNFLYLASHYEKLKGSPEDNEQKQLFVEQHKHYLDEIIEQISEFSKRVILADANLDKVLSAYNKHRDKPIREQAENIIHLFTLTNLGAPAAFKYFDTTIDRKRYTSTKEVLDATLIHQSITGLYETRIDLSQLGGDGGPAPGGGEAAAKGGVPWLMKKPLQLTVLVPLHEYQERLLQQTALPKEQKELLQKLFLKYDALWQHWENQVGHRRIKPHNIATGTLAPRPQKQYPINPKAKPSIQIVIDDLLKQGVLIQQNSTMNTPVYPVPKPDGKWRMVLDYREVNKTIPLIAAQNQHSAGILSSIYRGKYKTTLDLTNGFWAHPITPESYWLTAFTWQGKQYCWTRLPQGFLNSPALFTADVVDLLKEIPNVQAYVDDIYISHDDPQEHLEQLEKIFSILLNAGYVVSLKKSEIAQREVEFLGFNITKEGRGLTDTFKQKLLNITPPKDLKQLQSILGLLNFARNFIPNYSELVKPLYTIVANANGKFISWTEDNSNQLQHIISVLNQADNLEERNPETRLIIKVNSSPSAGYIRYYNEGSKRPIMYVNYIFSKAEAKFTQTEKLLTTMHKGLIKAMDLAMGQEILVYSPIVSMTKIQRTPLPERKALPVRWITWMTYLEDPRIQFHYDKSLPELQQIPNVTEDVIAKTKHPSEFAMVFYTDGSAIKHPDVNKSHSAGMGIAQVQFIPEYKIVHQWSIPLGDHTAQLAEIAAVEFACKKALKISGPVLIVTDSFYVAESANKELPYWKSNGFLNNKKKPLRHVSKWKSIAECLQLKPDIIIMHEKGHQQPMTTLHTEGNNLADKLATQGSYVVHAGKRTADGSEFEKRTADGSEFESPKKKAKVE

SEQ ID NO: 437 - protein, 2094 aa, synthetic construct
MPAAKRVKLDGGDKKYSIGLDIGTNSVGWAVITDEYKVPSKKFKVLGNTDRHSIKKNLIGALLFDSGETAEATRLKRTARRRYTRRKNRICYLQEIFSNEMAKVDDSFFHRLEESFLVEEDKKHERHPIFGNIVDEVAYHEKYPTIYHLRKKLVDSTDKADLRLIYLALAHMIKFRGHFLIEGDLNPDNSDVDKLFIQLVQTYNQLFEENPINASGVDAKAILSARLSKSRRLENLIAQLPGEKKNGLFGNLIALSLGLTPNFKSNFDLAEDAKLQLSKDTYDDDLDNLLAQIGDQYADLFLAAKNLSDAILLSDILRVNTEITKAPLSASMIKRYDEHHQDLTLLKALVRQQLPEKYKEIFFDQSKNGYAGYIDGGASQEEFYKFIKPILEKMDGTEELLVKLNREDLLRKQRTFDNGSIPHQIHLGELHAILRRQEDFYPFLKDNREKIEKILTFRIPYYVGPLARGNSRFAWMTRKSEETITPWNFEEVVDKGASAQSFIERMTNFDKNLPNEKVLPKHSLLYEYFTVYNELTKVKYVTEGMRKPAFLSGEQKKAIVDLLFKTNRKVTVKQLKEDYFKKIECFDSVEISGVEDRFNASLGTYHDLLKIIKDKDFLDNEENEDILEDIVLTLTLFEDREMIEERLKTYAHLFDDKVMKQLKRRRYTGWGRLSRKLINGIRDKQSGKTILDFLKSDGFANRNFMQLIHDDSLTFKEDIQKAQVSGQGDSLHEHIANLAGSPAIKKGILQTVKVVDELVKVMGRHKPENIVIEMARENQTTQKGQKNSRERMKRIEEGIKELGSQILKEHPVENTQLQNEKLYLYYLQNGRDMYVDQELDINRLSDYDVDHIVPQSFLKDDSIDNKVLTRSDKARGKSDNVPSEEVVKKMKNYWRQLLNAKLITQRKFDNLTKAERGGLSELDKAGFIKRQLVETRQITKHVAQILDSRMNTKYDENDKLIREVKVITLKSKLVSDFRKDFQFYKVREINNYHHAHDAYLNAVVGTALIKKYPKLESEFVYGDYKVYDVRKMIAKSEQEIGKATAKYFFYSNIMNFFKTEITLANGEIRKRPLIETNGETGEIVWDKGRDFATVRKVLSMPQVNIVKKTEVQTGGFSKESILPKRNSDKLIARKKDWDPKKYGGFDSPTVAYSVLVVAKVEKGKSKKLKSVKELLGITIMERSSFEKNPIDFLEAKGYKEVKKDLIIKLPKYSLFELENGRKRMLASAGELQKGNELALPSKYVNFLYLASHYEKLKGSPEDNEQKQLFVEQHKHYLDEIIEQISEFSKRVILADANLDKVLSAYNKHRDKPIREQAENIIHLFTLTNLGAPAAFKYFDTTIDRKRYTSTKEVLDATLIHQSITGLYETRIDLSQLGGDGGGSSGSSGSSGSSGSSGSSGGVPWLMKKPLQLTVLVPLHEYQERLLQQTALPKEQKELLQKLFLKYDALWQHWENQVGHRRIKPHNIATGTLAPRPQKQYPINPKAKPSIQIVIDDLLKQGVLIQQNSTMNTPVYPVPKPDGKWRMVLDYREVNKTIPLIAAQNQHSAGILSSIYRGKYKTTLDLTNGFWAHPITPESYWLTAFTWQGKQYCWTRLPQGFLNSPALFNADVVDLLKEIPNVQAYVDDIYISHDDPQEHLEQLEKIFSILLNAGYVVSLKKSEIAQREVEFLGFNITKEGRGLTDTFKQKLLNITPPKDLKQLQSILGLLNFARNFIPNYSELVKPLYTIVAPANGKFISWTEDNSNQLQHIISVLNQADNLEERNPETRLIIKVNSSPSAGYIRYYNEGSKRPIMYVNYIFSKAEAKFTQTEKLLTTMHKGLIKAMDLAMGQEILVYSPIVSMTKIQRTPLPERKALPVRWITWMTYLEDPRIQFHYDKSLPELQQIPNVTEDVIAKTKHPSEFAMVFYTDGSAIKHPDVNKSHSAGMGIAQVQFIPEYKIVHQWSIPLGDHTAQLAEIAAVEFACKKALKISGPVLIVTDSFYVAESANKELPYWKSNGFLNNKKKPLRHVSKWKSIAECLQLKPDIIIMHEKGHQQPMTTLHTEGNNLADKLATQGSYVVHAGKRTADGSEFEKRTADGSEFESPKKKAKVE

SEQ ID NO: 438 - protein, 2087 aa, synthetic construct
MPAAKRVKLDGGDKKYSIGLDIGTNSVGWAVITDEYKVPSKKFKVLGNTDRHSIKKNLIGALLFDSGETAEATRLKRTARRRYTRRKNRICYLQEIFSNEMAKVDDSFFHRLEESFLVEEDKKHERHPIFGNIVDEVAYHEKYPTIYHLRKKLVDSTDKADLRLIYLALAHMIKFRGHFLIEGDLNPDNSDVDKLFIQLVQTYNQLFEENPINASGVDAKAILSARLSKSRRLENLIAQLPGEKKNGLFGNLIALSLGLTPNFKSNFDLAEDAKLQLSKDTYDDDLDNLLAQIGDQYADLFLAAKNLSDAILLSDILRVNTEITKAPLSASMIKRYDEHHQDLTLLKALVRQQLPEKYKEIFFDQSKNGYAGYIDGGASQEEFYKFIKPILEKMDGTEELLVKLNREDLLRKQRTFDNGSIPHQIHLGELHAILRRQEDFYPFLKDNREKIEKILTFRIPYYVGPLARGNSRFAWMTRKSEETITPWNFEEVVDKGASAQSFIERMTNFDKNLPNEKVLPKHSLLYEYFTVYNELTKVKYVTEGMRKPAFLSGEQKKAIVDLLFKTNRKVTVKQLKEDYFKKIECFDSVEISGVEDRFNASLGTYHDLLKIIKDKDFLDNEENEDILEDIVLTLTLFEDREMIEERLKTYAHLFDDKVMKQLKRRRYTGWGRLSRKLINGIRDKQSGKTILDFLKSDGFANRNFMQLIHDDSLTFKEDIQKAQVSGQGDSLHEHIANLAGSPAIKKGILQTVKVVDELVKVMGRHKPENIVIEMARENQTTQKGQKNSRERMKRIEEGIKELGSQILKEHPVENTQLQNEKLYLYYLQNGRDMYVDQELDINRLSDYDVDHIVPQSFLKDDSIDNKVLTRSDKARGKSDNVPSEEVVKKMKNYWRQLLNAKLITQRKFDNLTKAERGGLSELDKAGFIKRQLVETRQITKHVAQILDSRMNTKYDENDKLIREVKVITLKSKLVSDFRKDFQFYKVREINNYHHAHDAYLNAVVGTALIKKYPKLESEFVYGDYKVYDVRKMIAKSEQEIGKATAKYFFYSNIMNFFKTEITLANGEIRKRPLIETNGETGEIVWDKGRDFATVRKVLSMPQVNIVKKTEVQTGGFSKESILPKRNSDKLIARKKDWDPKKYGGFDSPTVAYSVLVVAKVEKGKSKKLKSVKELLGITIMERSSFEKNPIDFLEAKGYKEVKKDLIIKLPKYSLFELENGRKRMLASAGELQKGNELALPSKYVNFLYLASHYEKLKGSPEDNEQKQLFVEQHKHYLDEIIEQISEFSKRVILADANLDKVLSAYNKHRDKPIREQAENIIHLFTLTNLGAPAAFKYFDTTIDRKRYTSTKEVLDATLIHQSITGLYETRIDLSQLGGDGGGSSGGGEAAAKGGVPWLMKKPLQLTVLVPLHEYQERLLQQTALPKEQKELLQKLFLKYDALWQHWENQVGHRRIKPHNIATGTLAPRPQKQYPINPKAKPSIQIVIDDLLKQGVLIQQNSTMNTPVYPVPKPDGKWRMVLDYREVNKTIPLIAAQNQHSAGILSSIYRGKYKTTLDLTNGFWAHPITPESYWLTAFTWQGKQYCWTRLPQGFLNSPALFNADVVDLLKEIPNVQAYVDDIYISHDDPQEHLEQLEKIFSILLNAGYVVSLKKSEIAQREVEFLGFNITKEGRGLTDTFKQKLLNITPPKDLKQLQSILGLLNFARNFIPNYSELVKPLYTIVAPANGKFISWTEDNSNQLQHIISVLNQADNLEERNPETRLIIKVNSSPSAGYIRYYNEGSKRPIMYVNYIFSKAEAKFTQTEKLLTTMHKGLIKAMDLAMGQEILVYSPIVSMTKIQRTPLPERKALPVRWITWMTYLEDPRIQFHYDKSLPELQQIPNVTEDVIAKTKHPSEFAMVFYTDGSAIKHPDVNKSHSAGMGIAQVQFIPEYKIVHQWSIPLGDHTAQLAEIAAVEFACKKALKISGPVLIVTDSFYVAESANKELPYWKSNGFLNNKKKPLRHVSKWKSIAECLQLKPDIIIMHEKGHQQPMTTLHTEGNNLADKLATQGSYVVHAGKRTADGSEFEKRTADGSEFESPKKKAKVE

SEQ ID NO: 439 - protein, 2091 aa, synthetic construct
MPAAKRVKLDGGDKKYSIGLDIGTNSVGWAVITDEYKVPSKKFKVLGNTDRHSIKKNLIGALLFDSGETAEATRLKRTARRRYTRRKNRICYLQEIFSNEMAKVDDSFFHRLEESFLVEEDKKHERHPIFGNIVDEVAYHEKYPTIYHLRKKLVDSTDKADLRLIYLALAHMIKFRGHFLIEGDLNPDNSDVDKLFIQLVQTYNQLFEENPINASGVDAKAILSARLSKSRRLENLIAQLPGEKKNGLFGNLIALSLGLTPNFKSNFDLAEDAKLQLSKDTYDDDLDNLLAQIGDQYADLFLAAKNLSDAILLSDILRVNTEITKAPLSASMIKRYDEHHQDLTLLKALVRQQLPEKYKEIFFDQSKNGYAGYIDGGASQEEFYKFIKPILEKMDGTEELLVKLNREDLLRKQRTFDNGSIPHQIHLGELHAILRRQEDFYPFLKDNREKIEKILTFRIPYYVGPLARGNSRFAWMTRKSEETITPWNFEEVVDKGASAQSFIERMTNFDKNLPNEKVLPKHSLLYEYFTVYNELTKVKYVTEGMRKPAFLSGEQKKAIVDLLFKTNRKVTVKQLKEDYFKKIECFDSVEISGVEDRFNASLGTYHDLLKIIKDKDFLDNEENEDILEDIVLTLTLFEDREMIEERLKTYAHLFDDKVMKQLKRRRYTGWGRLSRKLINGIRDKQSGKTILDFLKSDGFANRNFMQLIHDDSLTFKEDIQKAQVSGQGDSLHEHIANLAGSPAIKKGILQTVKVVDELVKVMGRHKPENIVIEMARENQTTQKGQKNSRERMKRIEEGIKELGSQILKEHPVENTQLQNEKLYLYYLQNGRDMYVDQELDINRLSDYDVDHIVPQSFLKDDSIDNKVLTRSDKARGKSDNVPSEEVVKKMKNYWRQLLNAKLITQRKFDNLTKAERGGLSELDKAGFIKRQLVETRQITKHVAQILDSRMNTKYDENDKLIREVKVITLKSKLVSDFRKDFQFYKVREINNYHHAHDAYLNAVVGTALIKKYPKLESEFVYGDYKVYDVRKMIAKSEQEIGKATAKYFFYSNIMNFFKTEITLANGEIRKRPLIETNGETGEIVWDKGRDFATVRKVLSMPQVNIVKKTEVQTGGFSKESILPKRNSDKLIARKKDWDPKKYGGFDSPTVAYSVLVVAKVEKGKSKKLKSVKELLGITIMERSSFEKNPIDFLEAKGYKEVKKDLIIKLPKYSLFELENGRKRMLASAGELQKGNELALPSKYVNFLYLASHYEKLKGSPEDNEQKQLFVEQHKHYLDEIIEQISEFSKRVILADANLDKVLSAYNKHRDKPIREQAENIIHLFTLTNLGAPAAFKYFDTTIDRKRYTSTKEVLDATLIHQSITGLYETRIDLSQLGGDGGGGGGSEAAAKGGGGSGGVPWLMKKPLQLTVLVPLHEYQERLLQQTALPKEQKELLQKLFLKYDALWQHWENQVGHRRIKPHNIATGTLAPRPQKQYPINPKAKPSIQIVIDDLLKQGVLIQQNSTMNTPVYPVPKPDGKWRMVLDYREVNKTIPLIAAQNQHSAGILSSIYRGKYKTTLDLTNGFWAHPITPESYWLTAFTWQGKQYCWTRLPQGFLNSPALFNADVVDLLKEIPNVQAYVDDIYISHDDPQEHLEQLEKIFSILLNAGYVVSLKKSEIAQREVEFLGFNITKEGRGLTDTFKQKLLNITPPKDLKQLQSILGLLNFARNFIPNYSELVKPLYTIVAPANGKFISWTEDNSNQLQHIISVLNQADNLEERNPETRLIIKVNSSPSAGYIRYYNEGSKRPIMYVNYIFSKAEAKFTQTEKLLTTMHKGLIKAMDLAMGQEILVYSPIVSMTKIQRTPLPERKALPVRWITWMTYLEDPRIQFHYDKSLPELQQIPNVTEDVIAKTKHPSEFAMVFYTDGSAIKHPDVNKSHSAGMGIAQVQFIPEYKIVHQWSIPLGDHTAQLAEIAAVEFACKKALKISGPVLIVTDSFYVAESANKELPYWKSNGFLNNKKKPLRHVSKWKSIAECLQLKPDIIIMHEKGHQQPMTTLHTEGNNLADKLATQGSYVVHAGKRTADGSEFEKRTADGSEFESPKKKAKVE

SEQ ID NO: 440 - protein, 2085 aa, synthetic construct
MPAAKRVKLDGGDKKYSIGLDIGTNSVGWAVITDEYKVPSKKFKVLGNTDRHSIKKNLIGALLFDSGETAEATRLKRTARRRYTRRKNRICYLQEIFSNEMAKVDDSFFHRLEESFLVEEDKKHERHPIFGNIVDEVAYHEKYPTIYHLRKKLVDSTDKADLRLIYLALAHMIKFRGHFLIEGDLNPDNSDVDKLFIQLVQTYNQLFEENPINASGVDAKAILSARLSKSRRLENLIAQLPGEKKNGLFGNLIALSLGLTPNFKSNFDLAEDAKLQLSKDTYDDDLDNLLAQIGDQYADLFLAAKNLSDAILLSDILRVNTEITKAPLSASMIKRYDEHHQDLTLLKALVRQQLPEKYKEIFFDQSKNGYAGYIDGGASQEEFYKFIKPILEKMDGTEELLVKLNREDLLRKQRTFDNGSIPHQIHLGELHAILRRQEDFYPFLKDNREKIEKILTFRIPYYVGPLARGNSRFAWMTRKSEETITPWNFEEVVDKGASAQSFIERMTNFDKNLPNEKVLPKHSLLYEYFTVYNELTKVKYVTEGMRKPAFLSGEQKKAIVDLLFKTNRKVTVKQLKEDYFKKIECFDSVEISGVEDRFNASLGTYHDLLKIIKDKDFLDNEENEDILEDIVLTLTLFEDREMIEERLKTYAHLFDDKVMKQLKRRRYTGWGRLSRKLINGIRDKQSGKTILDFLKSDGFANRNFMQLIHDDSLTFKEDIQKAQVSGQGDSLHEHIANLAGSPAIKKGILQTVKVVDELVKVMGRHKPENIVIEMARENQTTQKGQKNSRERMKRIEEGIKELGSQILKEHPVENTQLQNEKLYLYYLQNGRDMYVDQELDINRLSDYDVDHIVPQSFLKDDSIDNKVLTRSDKARGKSDNVPSEEVVKKMKNYWRQLLNAKLITQRKFDNLTKAERGGLSELDKAGFIKRQLVETRQITKHVAQILDSRMNTKYDENDKLIREVKVITLKSKLVSDFRKDFQFYKVREINNYHHAHDAYLNAVVGTALIKKYPKLESEFVYGDYKVYDVRKMIAKSEQEIGKATAKYFFYSNIMNFFKTEITLANGEIRKRPLIETNGETGEIVWDKGRDFATVRKVLSMPQVNIVKKTEVQTGGFSKESILPKRNSDKLIARKKDWDPKKYGGFDSPTVAYSVLVVAKVEKGKSKKLKSVKELLGITIMERSSFEKNPIDFLEAKGYKEVKKDLIIKLPKYSLFELENGRKRMLASAGELQKGNELALPSKYVNFLYLASHYEKLKGSPEDNEQKQLFVEQHKHYLDEIIEQISEFSKRVILADANLDKVLSAYNKHRDKPIREQAENIIHLFTLTNLGAPAAFKYFDTTIDRKRYTSTKEVLDATLIHQSITGLYETRIDLSQLGGDGGPAPGSSGGSGGVPWLMKKPLQLTVLVPLHEYQERLLQQTALPKEQKELLQKLFLKYDALWQHWENQVGHRRIKPHNIATGTLAPRPQKQYPINPKAKPSIQIVIDDLLKQGVLIQQNSTMNTPVYPVPKPDGKWRMVLDYREVNKTIPLIAAQNQHSAGILSSIYRGKYKTTLDLTNGFWAHPITPESYWLTAFTWQGKQYCWTRLPQGFLNSPALFNADVVDLLKEIPNVQAYVDDIYISHDDPQEHLEQLEKIFSILLNAGYVVSLKKSEIAQREVEFLGFNITKEGRGLTDTFKQKLLNITPPKDLKQLQSILGLLNFARNFIPNYSELVKPLYTIVAPANGKFISWTEDNSNQLQHIISVLNQADNLEERNPETRLIIKVNSSPSAGYIRYYNEGSKRPIMYVNYIFSKAEAKFTQTEKLLTTMHKGLIKAMDLAMGQEILVYSPIVSMTKIQRTPLPERKALPVRWITWMTYLEDPRIQFHYDKSLPELQQIPNVTEDVIAKTKHPSEFAMVFYTDGSAIKHPDVNKSHSAGMGIAQVQFIPEYKIVHQWSIPLGDHTAQLAEIAAVEFACKKALKISGPVLIVTDSFYVAESANKELPYWKSNGFLNNKKKPLRHVSKWKSIAECLQLKPDIIIMHEKGHQQPMTTLHTEGNNLADKLATQGSYVVHAGKRTADGSEFEKRTADGSEFESPKKKAKVE

SEQ ID NO: 441 - protein, 2087 aa, synthetic construct
MPAAKRVKLDGGDKKYSIGLDIGTNSVGWAVITDEYKVPSKKFKVLGNTDRHSIKKNLIGALLFDSGETAEATRLKRTARRRYTRRKNRICYLQEIFSNEMAKVDDSFFHRLEESFLVEEDKKHERHPIFGNIVDEVAYHEKYPTIYHLRKKLVDSTDKADLRLIYLALAHMIKFRGHFLIEGDLNPDNSDVDKLFIQLVQTYNQLFEENPINASGVDAKAILSARLSKSRRLENLIAQLPGEKKNGLFGNLIALSLGLTPNFKSNFDLAEDAKLQLSKDTYDDDLDNLLAQIGDQYADLFLAAKNLSDAILLSDILRVNTEITKAPLSASMIKRYDEHHQDLTLLKALVRQQLPEKYKEIFFDQSKNGYAGYIDGGASQEEFYKFIKPILEKMDGTEELLVKLNREDLLRKQRTFDNGSIPHQIHLGELHAILRRQEDFYPFLKDNREKIEKILTFRIPYYVGPLARGNSRFAWMTRKSEETITPWNFEEVVDKGASAQSFIERMTNFDKNLPNEKVLPKHSLLYEYFTVYNELTKVKYVTEGMRKPAFLSGEQKKAIVDLLFKTNRKVTVKQLKEDYFKKIECFDSVEISGVEDRFNASLGTYHDLLKIIKDKDFLDNEENEDILEDIVLTLTLFEDREMIEERLKTYAHLFDDKVMKQLKRRRYTGWGRLSRKLINGIRDKQSGKTILDFLKSDGFANRNFMQLIHDDSLTFKEDIQKAQVSGQGDSLHEHIANLAGSPAIKKGILQTVKVVDELVKVMGRHKPENIVIEMARENQTTQKGQKNSRERMKRIEEGIKELGSQILKEHPVENTQLQNEKLYLYYLQNGRDMYVDQELDINRLSDYDVDHIVPQSFLKDDSIDNKVLTRSDKARGKSDNVPSEEVVKKMKNYWRQLLNAKLITQRKFDNLTKAERGGLSELDKAGFIKRQLVETRQITKHVAQILDSRMNTKYDENDKLIREVKVITLKSKLVSDFRKDFQFYKVREINNYHHAHDAYLNAVVGTALIKKYPKLESEFVYGDYKVYDVRKMIAKSEQEIGKATAKYFFYSNIMNFFKTEITLANGEIRKRPLIETNGETGEIVWDKGRDFATVRKVLSMPQVNIVKKTEVQTGGFSKESILPKRNSDKLIARKKDWDPKKYGGFDSPTVAYSVLVVAKVEKGKSKKLKSVKELLGITIMERSSFEKNPIDFLEAKGYKEVKKDLIIKLPKYSLFELENGRKRMLASAGELQKGNELALPSKYVNFLYLASHYEKLKGSPEDNEQKQLFVEQHKHYLDEIIEQISEFSKRVILADANLDKVLSAYNKHRDKPIREQAENIIHLFTLTNLGAPAAFKYFDTTIDRKRYTSTKEVLDATLIHQSITGLYETRIDLSQLGGDGGGGGEAAAKPAPGGVPWLMKKPLQLTVLVPLHEYQERLLQQTALPKEQKELLQKLFLKYDALWQHWENQVGHRRIKPHNIATGTLAPRPQKQYPINPKAKPSIQIVIDDLLKQGVLIQQNSTMNTPVYPVPKPDGKWRMVLDYREVNKTIPLIAAQNQHSAGILSSIYRGKYKTTLDLTNGFWAHPITPESYWLTAFTWQGKQYCWTRLPQGFLNSPALFNADVVDLLKEIPNVQAYVDDIYISHDDPQEHLEQLEKIFSILLNAGYVVSLKKSEIAQREVEFLGFNITKEGRGLTDTFKQKLLNITPPKDLKQLQSILGLLNFARNFIPNYSELVKPLYTIVAPANGKFISWTEDNSNQLQHIISVLNQADNLEERNPETRLIIKVNSSPSAGYIRYYNEGSKRPIMYVNYIFSKAEAKFTQTEKLLTTMHKGLIKAMDLAMGQEILVYSPIVSMTKIQRTPLPERKALPVRWITWMTYLEDPRIQFHYDKSLPELQQIPNVTEDVIAKTKHPSEFAMVFYTDGSAIKHPDVNKSHSAGMGIAQVQFIPEYKIVHQWSIPLGDHTAQLAEIAAVEFACKKALKISGPVLIVTDSFYVAESANKELPYWKSNGFLNNKKKPLRHVSKWKSIAECLQLKPDIIIMHEKGHQQPMTTLHTEGNNLADKLATQGSYVVHAGKRTADGSEFEKRTADGSEFESPKKKAKVE

SEQ ID NO: 442 - protein, 2087 aa, synthetic construct
MPAAKRVKLDGGDKKYSIGLDIGTNSVGWAVITDEYKVPSKKFKVLGNTDRHSIKKNLIGALLFDSGETAEATRLKRTARRRYTRRKNRICYLQEIFSNEMAKVDDSFFHRLEESFLVEEDKKHERHPIFGNIVDEVAYHEKYPTIYHLRKKLVDSTDKADLRLIYLALAHMIKFRGHFLIEGDLNPDNSDVDKLFIQLVQTYNQLFEENPINASGVDAKAILSARLSKSRRLENLIAQLPGEKKNGLFGNLIALSLGLTPNFKSNFDLAEDAKLQLSKDTYDDDLDNLLAQIGDQYADLFLAAKNLSDAILLSDILRVNTEITKAPLSASMIKRYDEHHQDLTLLKALVRQQLPEKYKEIFFDQSKNGYAGYIDGGASQEEFYKFIKPILEKMDGTEELLVKLNREDLLRKQRTFDNGSIPHQIHLGELHAILRRQEDFYPFLKDNREKIEKILTFRIPYYVGPLARGNSRFAWMTRKSEETITPWNFEEVVDKGASAQSFIERMTNFDKNLPNEKVLPKHSLLYEYFTVYNELTKVKYVTEGMRKPAFLSGEQKKAIVDLLFKTNRKVTVKQLKEDYFKKIECFDSVEISGVEDRFNASLGTYHDLLKIIKDKDFLDNEENEDILEDIVLTLTLFEDREMIEERLKTYAHLFDDKVMKQLKRRRYTGWGRLSRKLINGIRDKQSGKTILDFLKSDGFANRNFMQLIHDDSLTFKEDIQKAQVSGQGDSLHEHIANLAGSPAIKKGILQTVKVVDELVKVMGRHKPENIVIEMARENQTTQKGQKNSRERMKRIEEGIKELGSQILKEHPVENTQLQNEKLYLYYLQNGRDMYVDQELDINRLSDYDVDHIVPQSFLKDDSIDNKVLTRSDKARGKSDNVPSEEVVKKMKNYWRQLLNAKLITQRKFDNLTKAERGGLSELDKAGFIKRQLVETRQITKHVAQILDSRMNTKYDENDKLIREVKVITLKSKLVSDFRKDFQFYKVREINNYHHAHDAYLNAVVGTALIKKYPKLESEFVYGDYKVYDVRKMIAKSEQEIGKATAKYFFYSNIMNFFKTEITLANGEIRKRPLIETNGETGEIVWDKGRDFATVRKVLSMPQVNIVKKTEVQTGGFSKESILPKRNSDKLIARKKDWDPKKYGGFDSPTVAYSVLVVAKVEKGKSKKLKSVKELLGITIMERSSFEKNPIDFLEAKGYKEVKKDLIIKLPKYSLFELENGRKRMLASAGELQKGNELALPSKYVNFLYLASHYEKLKGSPEDNEQKQLFVEQHKHYLDEIIEQISEFSKRVILADANLDKVLSAYNKHRDKPIREQAENIIHLFTLTNLGAPAAFKYFDTTIDRKRYTSTKEVLDATLIHQSITGLYETRIDLSQLGGDGGGGSPAPEAAAKGGVPWLMKKPLQLTVLVPLHEYQERLLQQTALPKEQKELLQKLFLKYDALWQHWENQVGHRRIKPHNIATGTLAPRPQKQYPINPKAKPSIQIVIDDLLKQGVLIQQNSTMNTPVYPVPKPDGKWRMVLDYREVNKTIPLIAAQNQHSAGILSSIYRGKYKTTLDLTNGFWAHPITPESYWLTAFTWQGKQYCWTRLPQGFLNSPALFNADVVDLLKEIPNVQAYVDDIYISHDDPQEHLEQLEKIFSILLNAGYVVSLKKSEIAQREVEFLGFNITKEGRGLTDTFKQKLLNITPPKDLKQLQSILGLLNFARNFIPNYSELVKPLYTIVAPANGKFISWTEDNSNQLQHIISVLNQADNLEERNPETRLIIKVNSSPSAGYIRYYNEGSKRPIMYVNYIFSKAEAKFTQTEKLLTTMHKGLIKAMDLAMGQEILVYSPIVSMTKIQRTPLPERKALPVRWITWMTYLEDPRIQFHYDKSLPELQQIPNVTEDVIAKTKHPSEFAMVFYTDGSAIKHPDVNKSHSAGMGIAQVQFIPEYKIVHQWSIPLGDHTAQLAEIAAVEFACKKALKISGPVLIVTDSFYVAESANKELPYWKSNGFLNNKKKPLRHVSKWKSIAECLQLKPDIIIMHEKGHQQPMTTLHTEGNNLADKLATQGSYVVHAGKRTADGSEFEKRTADGSEFESPKKKAKVE

SEQ ID NO: 443 - protein, 2084 aa, synthetic construct
MPAAKRVKLDGGDKKYSIGLDIGTNSVGWAVITDEYKVPSKKFKVLGNTDRHSIKKNLIGALLFDSGETAEATRLKRTARRRYTRRKNRICYLQEIFSNEMAKVDDSFFHRLEESFLVEEDKKHERHPIFGNIVDEVAYHEKYPTIYHLRKKLVDSTDKADLRLIYLALAHMIKFRGHFLIEGDLNPDNSDVDKLFIQLVQTYNQLFEENPINASGVDAKAILSARLSKSRRLENLIAQLPGEKKNGLFGNLIALSLGLTPNFKSNFDLAEDAKLQLSKDTYDDDLDNLLAQIGDQYADLFLAAKNLSDAILLSDILRVNTEITKAPLSASMIKRYDEHHQDLTLLKALVRQQLPEKYKEIFFDQSKNGYAGYIDGGASQEEFYKFIKPILEKMDGTEELLVKLNREDLLRKQRTFDNGSIPHQIHLGELHAILRRQEDFYPFLKDNREKIEKILTFRIPYYVGPLARGNSRFAWMTRKSEETITPWNFEEVVDKGASAQSFIERMTNFDKNLPNEKVLPKHSLLYEYFTVYNELTKVKYVTEGMRKPAFLSGEQKKAIVDLLFKTNRKVTVKQLKEDYFKKIECFDSVEISGVEDRFNASLGTYHDLLKIIKDKDFLDNEENEDILEDIVLTLTLFEDREMIEERLKTYAHLFDDKVMKQLKRRRYTGWGRLSRKLINGIRDKQSGKTILDFLKSDGFANRNFMQLIHDDSLTFKEDIQKAQVSGQGDSLHEHIANLAGSPAIKKGILQTVKVVDELVKVMGRHKPENIVIEMARENQTTQKGQKNSRERMKRIEEGIKELGSQILKEHPVENTQLQNEKLYLYYLQNGRDMYVDQELDINRLSDYDVDHIVPQSFLKDDSIDNKVLTRSDKARGKSDNVPSEEVVKKMKNYWRQLLNAKLITQRKFDNLTKAERGGLSELDKAGFIKRQLVETRQITKHVAQILDSRMNTKYDENDKLIREVKVITLKSKLVSDFRKDFQFYKVREINNYHHAHDAYLNAVVGTALIKKYPKLESEFVYGDYKVYDVRKMIAKSEQEIGKATAKYFFYSNIMNFFKTEITLANGEIRKRPLIETNGETGEIVWDKGRDFATVRKVLSMPQVNIVKKTEVQTGGFSKESILPKRNSDKLIARKKDWDPKKYGGFDSPTVAYSVLVVAKVEKGKSKKLKSVKELLGITIMERSSFEKNPIDFLEAKGYKEVKKDLIIKLPKYSLFELENGRKRMLASAGELQKGNELALPSKYVNFLYLASHYEKLKGSPEDNEQKQLFVEQHKHYLDEIIEQISEFSKRVILADANLDKVLSAYNKHRDKPIREQAENIIHLFTLTNLGAPAAFKYFDTTIDRKRYTSTKEVLDATLIHQSITGLYETRIDLSQLGGDGGEAAAKGGGGGVPWLMKKPLQLTVLVPLHEYQERLLQQTALPKEQKELLQKLFLKYDALWQHWENQVGHRRIKPHNIATGTLAPRPQKQYPINPKAKPSIQIVIDDLLKQGVLIQQNSTMNTPVYPVPKPDGKWRMVLDYREVNKTIPLIAAQNQHSAGILSSIYRGKYKTTLDLTNGFWAHPITPESYWLTAFTWQGKQYCWTRLPQGFLNSPALFNADVVDLLKEIPNVQAYVDDIYISHDDPQEHLEQLEKIFSILLNAGYVVSLKKSEIAQREVEFLGFNITKEGRGLTDTFKQKLLNITPPKDLKQLQSILGLLNFARNFIPNYSELVKPLYTIVAPANGKFISWTEDNSNQLQHIISVLNQADNLEERNPETRLIIKVNSSPSAGYIRYYNEGSKRPIMYVNYIFSKAEAKFTQTEKLLTTMHKGLIKAMDLAMGQEILVYSPIVSMTKIQRTPLPERKALPVRWITWMTYLEDPRIQFHYDKSLPELQQIPNVTEDVIAKTKHPSEFAMVFYTDGSAIKHPDVNKSHSAGMGIAQVQFIPEYKIVHQWSIPLGDHTAQLAEIAAVEFACKKALKISGPVLIVTDSFYVAESANKELPYWKSNGFLNNKKKPLRHVSKWKSIAECLQLKPDIIIMHEKGHQQPMTTLHTEGNNLADKLATQGSYVVHAGKRTADGSEFEKRTADGSEFESPKKKAKVE

SEQ ID NO: 444 - protein, 2087 aa, synthetic construct
MPAAKRVKLDGGDKKYSIGLDIGTNSVGWAVITDEYKVPSKKFKVLGNTDRHSIKKNLIGALLFDSGETAEATRLKRTARRRYTRRKNRICYLQEIFSNEMAKVDDSFFHRLEESFLVEEDKKHERHPIFGNIVDEVAYHEKYPTIYHLRKKLVDSTDKADLRLIYLALAHMIKFRGHFLIEGDLNPDNSDVDKLFIQLVQTYNQLFEENPINASGVDAKAILSARLSKSRRLENLIAQLPGEKKNGLFGNLIALSLGLTPNFKSNFDLAEDAKLQLSKDTYDDDLDNLLAQIGDQYADLFLAAKNLSDAILLSDILRVNTEITKAPLSASMIKRYDEHHQDLTLLKALVRQQLPEKYKEIFFDQSKNGYAGYIDGGASQEEFYKFIKPILEKMDGTEELLVKLNREDLLRKQRTFDNGSIPHQIHLGELHAILRRQEDFYPFLKDNREKIEKILTFRIPYYVGPLARGNSRFAWMTRKSEETITPWNFEEVVDKGASAQSFIERMTNFDKNLPNEKVLPKHSLLYEYFTVYNELTKVKYVTEGMRKPAFLSGEQKKAIVDLLFKTNRKVTVKQLKEDYFKKIECFDSVEISGVEDRFNASLGTYHDLLKIIKDKDFLDNEENEDILEDIVLTLTLFEDREMIEERLKTYAHLFDDKVMKQLKRRRYTGWGRLSRKLINGIRDKQSGKTILDFLKSDGFANRNFMQLIHDDSLTFKEDIQKAQVSGQGDSLHEHIANLAGSPAIKKGILQTVKVVDELVKVMGRHKPENIVIEMARENQTTQKGQKNSRERMKRIEEGIKELGSQILKEHPVENTQLQNEKLYLYYLQNGRDMYVDQELDINRLSDYDVDHIVPQSFLKDDSIDNKVLTRSDKARGKSDNVPSEEVVKKMKNYWRQLLNAKLITQRKFDNLTKAERGGLSELDKAGFIKRQLVETRQITKHVAQILDSRMNTKYDENDKLIREVKVITLKSKLVSDFRKDFQFYKVREINNYHHAHDAYLNAVVGTALIKKYPKLESEFVYGDYKVYDVRKMIAKSEQEIGKATAKYFFYSNIMNFFKTEITLANGEIRKRPLIETNGETGEIVWDKGRDFATVRKVLSMPQVNIVKKTEVQTGGFSKESILPKRNSDKLIARKKDWDPKKYGGFDSPTVAYSVLVVAKVEKGKSKKLKSVKELLGITIMERSSFEKNPIDFLEAKGYKEVKKDLIIKLPKYSLFELENGRKRMLASAGELQKGNELALPSKYVNFLYLASHYEKLKGSPEDNEQKQLFVEQHKHYLDEIIEQISEFSKRVILADANLDKVLSAYNKHRDKPIREQAENIIHLFTLTNLGAPAAFKYFDTTIDRKRYTSTKEVLDATLIHQSITGLYETRIDLSQLGGDGGPAPGGSEAAAKGGVPWLMKKPLQLTVLVPLHEYQERLLQQTALPKEQKELLQKLFLKYDALWQHWENQVGHRRIKPHNIATGTLAPRPQKQYPINPKAKPSIQIVIDDLLKQGVLIQQNSTMNTPVYPVPKPDGKWRMVLDYREVNKTIPLIAAQNQHSAGILSSIYRGKYKTTLDLTNGFWAHPITPESYWLTAFTWQGKQYCWTRLPQGFLNSPALFNADVVDLLKEIPNVQAYVDDIYISHDDPQEHLEQLEKIFSILLNAGYVVSLKKSEIAQREVEFLGFNITKEGRGLTDTFKQKLLNITPPKDLKQLQSILGLLNFARNFIPNYSELVKPLYTIVAPANGKFISWTEDNSNQLQHIISVLNQADNLEERNPETRLIIKVNSSPSAGYIRYYNEGSKRPIMYVNYIFSKAEAKFTQTEKLLTTMHKGLIKAMDLAMGQEILVYSPIVSMTKIQRTPLPERKALPVRWITWMTYLEDPRIQFHYDKSLPELQQIPNVTEDVIAKTKHPSEFAMVFYTDGSAIKHPDVNKSHSAGMGIAQVQFIPEYKIVHQWSIPLGDHTAQLAEIAAVEFACKKALKISGPVLIVTDSFYVAESANKELPYWKSNGFLNNKKKPLRHVSKWKSIAECLQLKPDIIIMHEKGHQQPMTTLHTEGNNLADKLATQGSYVVHAGKRTADGSEFEKRTADGSEFESPKKKAKVE

SEQ ID NO: 445 - protein, 2091 aa, synthetic construct
MPAAKRVKLDGGDKKYSIGLDIGTNSVGWAVITDEYKVPSKKFKVLGNTDRHSIKKNLIGALLFDSGETAEATRLKRTARRRYTRRKNRICYLQEIFSNEMAKVDDSFFHRLEESFLVEEDKKHERHPIFGNIVDEVAYHEKYPTIYHLRKKLVDSTDKADLRLIYLALAHMIKFRGHFLIEGDLNPDNSDVDKLFIQLVQTYNQLFEENPINASGVDAKAILSARLSKSRRLENLIAQLPGEKKNGLFGNLIALSLGLTPNFKSNFDLAEDAKLQLSKDTYDDDLDNLLAQIGDQYADLFLAAKNLSDAILLSDILRVNTEITKAPLSASMIKRYDEHHQDLTLLKALVRQQLPEKYKEIFFDQSKNGYAGYIDGGASQEEFYKFIKPILEKMDGTEELLVKLNREDLLRKQRTFDNGSIPHQIHLGELHAILRRQEDFYPFLKDNREKIEKILTFRIPYYVGPLARGNSRFAWMTRKSEETITPWNFEEVVDKGASAQSFIERMTNFDKNLPNEKVLPKHSLLYEYFTVYNELTKVKYVTEGMRKPAFLSGEQKKAIVDLLFKTNRKVTVKQLKEDYFKKIECFDSVEISGVEDRFNASLGTYHDLLKIIKDKDFLDNEENEDILEDIVLTLTLFEDREMIEERLKTYAHLFDDKVMKQLKRRRYTGWGRLSRKLINGIRDKQSGKTILDFLKSDGFANRNFMQLIHDDSLTFKEDIQKAQVSGQGDSLHEHIANLAGSPAIKKGILQTVKVVDELVKVMGRHKPENIVIEMARENQTTQKGQKNSRERMKRIEEGIKELGSQILKEHPVENTQLQNEKLYLYYLQNGRDMYVDQELDINRLSDYDVDHIVPQSFLKDDSIDNKVLTRSDKARGKSDNVPSEEVVKKMKNYWRQLLNAKLITQRKFDNLTKAERGGLSELDKAGFIKRQLVETRQITKHVAQILDSRMNTKYDENDKLIREVKVITLKSKLVSDFRKDFQFYKVREINNYHHAHDAYLNAVVGTALIKKYPKLESEFVYGDYKVYDVRKMIAKSEQEIGKATAKYFFYSNIMNFFKTEITLANGEIRKRPLIETNGETGEIVWDKGRDFATVRKVLSMPQVNIVKKTEVQTGGFSKESILPKRNSDKLIARKKDWDPKKYGGFDSPTVAYSVLVVAKVEKGKSKKLKSVKELLGITIMERSSFEKNPIDFLEAKGYKEVKKDLIIKLPKYSLFELENGRKRMLASAGELQKGNELALPSKYVNFLYLASHYEKLKGSPEDNEQKQLFVEQHKHYLDEIIEQISEFSKRVILADANLDKVLSAYNKHRDKPIREQAENIIHLFTLTNLGAPAAFKYFDTTIDRKRYTSTKEVLDATLIHQSITGLYETRIDLSQLGGDGGGGGGSEAAAKGGGGSGGVPWLMKKPLQLTVLVPLHEYQERLLQQTALPKEQKELLQKLFLKYDALWQHWENQVGHRRIKPHNIATGTLAPRPQKQYPINPKAKPSIQIVIDDLLKQGVLIQQNSTMNTPVYPVPKPDGKWRMVLDYREVNKTIPLIAAQNQHSAGILSSIYRGKYKTTLDLTNGFWAHPITPESYWLTAFTWQGKQYCWTRLPQGFLNSPALFNADVVDLLKEIPNVQAYVDDIYISHDDPQEHLEQLEKIFSILLNAGYVVSLKKSEIAQREVEFLGFNITKEGRGLTDTFKQKLLNITPPKDLKQLQSILGKLNFARNFIPNYSELVKPLYTIVAPANGKFISWTEDNSNQLQHIISVLNQADNLEERNPETRLIIKVNSSPSAGYIRYYNEGSKRPIMYVNYIFSKAEAKFTQTEKLLTTMHKGLIKAMDLAMGQEILVYSPIVSMTKIQRTPLPERKALPVRWITWMTYLEDPRIQFHYDKSLPELQQIPNVTEDVIAKTKHPSEFAMVFYTDGSAIKHPDVNKSHSAGMGIAQVQFIPEYKIVHQWSIPLGDHTAQLAEIAAVEFACKKALKISGPVLIVTDSFYVAESANKELPYWKSNGFLNNKKKPLRHVSKWKSIAECLQLKPDIIIMHEKGHQQPMTTLHTEGNNLADKLATQGSYVVHAGKRTADGSEFEKRTADGSEFESPKKKAKVE

SEQ ID NO: 446 - protein, 2082 aa, synthetic construct
MPAAKRVKLDGGDKKYSIGLDIGTNSVGWAVITDEYKVPSKKFKVLGNTDRHSIKKNLIGALLFDSGETAEATRLKRTARRRYTRRKNRICYLQEIFSNEMAKVDDSFFHRLEESFLVEEDKKHERHPIFGNIVDEVAYHEKYPTIYHLRKKLVDSTDKADLRLIYLALAHMIKFRGHFLIEGDLNPDNSDVDKLFIQLVQTYNQLFEENPINASGVDAKAILSARLSKSRRLENLIAQLPGEKKNGLFGNLIALSLGLTPNFKSNFDLAEDAKLQLSKDTYDDDLDNLLAQIGDQYADLFLAAKNLSDAILLSDILRVNTEITKAPLSASMIKRYDEHHQDLTLLKALVRQQLPEKYKEIFFDQSKNGYAGYIDGGASQEEFYKFIKPILEKMDGTEELLVKLNREDLLRKQRTFDNGSIPHQIHLGELHAILRRQEDFYPFLKDNREKIEKILTFRIPYYVGPLARGNSRFAWMTRKSEETITPWNFEEVVDKGASAQSFIERMTNFDKNLPNEKVLPKHSLLYEYFTVYNELTKVKYVTEGMRKPAFLSGEQKKAIVDLLFKTNRKVTVKQLKEDYFKKIECFDSVEISGVEDRFNASLGTYHDLLKIIKDKDFLDNEENEDILEDIVLTLTLFEDREMIEERLKTYAHLFDDKVMKQLKRRRYTGWGRLSRKLINGIRDKQSGKTILDFLKSDGFANRNFMQLIHDDSLTFKEDIQKAQVSGQGDSLHEHIANLAGSPAIKKGILQTVKVVDELVKVMGRHKPENIVIEMARENQTTQKGQKNSRERMKRIEEGIKELGSQILKEHPVENTQLQNEKLYLYYLQNGRDMYVDQELDINRLSDYDVDHIVPQSFLKDDSIDNKVLTRSDKARGKSDNVPSEEVVKKMKNYWRQLLNAKLITQRKFDNLTKAERGGLSELDKAGFIKRQLVETRQITKHVAQILDSRMNTKYDENDKLIREVKVITLKSKLVSDFRKDFQFYKVREINNYHHAHDAYLNAVVGTALIKKYPKLESEFVYGDYKVYDVRKMIAKSEQEIGKATAKYFFYSNIMNFFKTEITLANGEIRKRPLIETNGETGEIVWDKGRDFATVRKVLSMPQVNIVKKTEVQTGGFSKESILPKRNSDKLIARKKDWDPKKYGGFDSPTVAYSVLVVAKVEKGKSKKLKSVKELLGITIMERSSFEKNPIDFLEAKGYKEVKKDLIIKLPKYSLFELENGRKRMLASAGELQKGNELALPSKYVNFLYLASHYEKLKGSPEDNEQKQLFVEQHKHYLDEIIEQISEFSKRVILADANLDKVLSAYNKHRDKPIREQAENIIHLFTLTNLGAPAAFKYFDTTIDRKRYTSTKEVLDATLIHQSITGLYETRIDLSQLGGDGGGGGGSSGGVPWLMKKPLQLTVLVPLHEYQERLLQQTALPKEQKELLQKLFLKYDALWQHWENQVGHRRIKPHNIATGTLAPRPQKQYPINPKAKPSIQIVIDDLLKQGVLIQQNSTMNTPVYPVPKPDGKWRMVLDYREVNKTIPLIAAQNQHSAGILSSIYRGKYKTTLDLTNGFWAHPITPESYWLTAFTWQGKQYCWTRLPQGFLNSPALFNADVVDLLKEIPNVQAYVDDIYISHDDPQEHLEQLEKIFSILLNAGYVVSLKKSEIAQREVEFLGFNITKEGRGLTDTFKQKLLNITPPKDLKQLQSILGKLNFARNFIPNYSELVKPLYTIVAPANGKFISWTEDNSNQLQHIISVLNQADNLEERNPETRLIIKVNSSPSAGYIRYYNEGSKRPIMYVNYIFSKAEAKFTQTEKLLTTMHKGLIKAMDLAMGQEILVYSPIVSMTKIQRTPLPERKALPVRWITWMTYLEDPRIQFHYDKSLPELQQIPNVTEDVIAKTKHPSEFAMVFYTDGSAIKHPDVNKSHSAGMGIAQVQFIPEYKIVHQWSIPLGDHTAQLAEIAAVEFACKKALKISGPVLIVTDSFYVAESANKELPYWKSNGFLNNKKKPLRHVSKWKSIAECLQLKPDIIIMHEKGHQQPMTTLHTEGNNLADKLATQGSYVVHAGKRTADGSEFEKRTADGSEFESPKKKAKVE

SEQ ID NO: 447 - protein, 2101 aa, synthetic construct
MPAAKRVKLDGGDKKYSIGLDIGTNSVGWAVITDEYKVPSKKFKVLGNTDRHSIKKNLIGALLFDSGETAEATRLKRTARRRYTRRKNRICYLQEIFSNEMAKVDDSFFHRLEESFLVEEDKKHERHPIFGNIVDEVAYHEKYPTIYHLRKKLVDSTDKADLRLIYLALAHMIKFRGHFLIEGDLNPDNSDVDKLFIQLVQTYNQLFEENPINASGVDAKAILSARLSKSRRLENLIAQLPGEKKNGLFGNLIALSLGLTPNFKSNFDLAEDAKLQLSKDTYDDDLDNLLAQIGDQYADLFLAAKNLSDAILLSDILRVNTEITKAPLSASMIKRYDEHHQDLTLLKALVRQQLPEKYKEIFFDQSKNGYAGYIDGGASQEEFYKFIKPILEKMDGTEELLVKLNREDLLRKQRTFDNGSIPHQIHLGELHAILRRQEDFYPFLKDNREKIEKILTFRIPYYVGPLARGNSRFAWMTRKSEETITPWNFEEVVDKGASAQSFIERMTNFDKNLPNEKVLPKHSLLYEYFTVYNELTKVKYVTEGMRKPAFLSGEQKKAIVDLLFKTNRKVTVKQLKEDYFKKIECFDSVEISGVEDRFNASLGTYHDLLKIIKDKDFLDNEENEDILEDIVLTLTLFEDREMIEERLKTYAHLFDDKVMKQLKRRRYTGWGRLSRKLINGIRDKQSGKTILDFLKSDGFANRNFMQLIHDDSLTFKEDIQKAQVSGQGDSLHEHIANLAGSPAIKKGILQTVKVVDELVKVMGRHKPENIVIEMARENQTTQKGQKNSRERMKRIEEGIKELGSQILKEHPVENTQLQNEKLYLYYLQNGRDMYVDQELDINRLSDYDVDHIVPQSFLKDDSIDNKVLTRSDKARGKSDNVPSEEVVKKMKNYWRQLLNAKLITQRKFDNLTKAERGGLSELDKAGFIKRQLVETRQITKHVAQILDSRMNTKYDENDKLIREVKVITLKSKLVSDFRKDFQFYKVREINNYHHAHDAYLNAVVGTALIKKYPKLESEFVYGDYKVYDVRKMIAKSEQEIGKATAKYFFYSNIMNFFKTEITLANGEIRKRPLIETNGETGEIVWDKGRDFATVRKVLSMPQVNIVKKTEVQTGGFSKESILPKRNSDKLIARKKDWDPKKYGGFDSPTVAYSVLVVAKVEKGKSKKLKSVKELLGITIMERSSFEKNPIDFLEAKGYKEVKKDLIIKLPKYSLFELENGRKRMLASAGELQKGNELALPSKYVNFLYLASHYEKLKGSPEDNEQKQLFVEQHKHYLDEIIEQISEFSKRVILADANLDKVLSAYNKHRDKPIREQAENIIHLFTLTNLGAPAAFKYFDTTIDRKRYTSTKEVLDATLIHQSITGLYETRIDLSQLGGDGGEAAAKEAAAKEAAAKEAAAKEAAAKGGVPWLMKKPLQLTVLVPLHEYQERLLQQTALPKEQKELLQKLFLKYDALWQHWENQVGHRRIKPHNIATGTLAPRPQKQYPINPKAKPSIQIVIDDLLKQGVLIQQNSTMNTPVYPVPKPDGKWRMVLDYREVNKTIPLIAAQNQHSAGILSSIYRGKYKTTLDLTNGFWAHPITPESYWLTAFTWQGKQYCWTRLPQGFLNSPALFNADVVDLLKEIPNVQAYVDDIYISHDDPQEHLEQLEKIFSILLNAGYVVSLKKSEIAQREVEFLGFNITKEGRGLTDTFKQKLLNITPPKDLKQLQSILGKLNFARNFIPNYSELVKPLYTIVAPANGKFISWTEDNSNQLQHIISVLNQADNLEERNPETRLIIKVNSSPSAGYIRYYNEGSKRPIMYVNYIFSKAEAKFTQTEKLLTTMHKGLIKAMDLAMGQEILVYSPIVSMTKIQRTPLPERKALPVRWITWMTYLEDPRIQFHYDKSLPELQQIPNVTEDVIAKTKHPSEFAMVFYTDGSAIKHPDVNKSHSAGMGIAQVQFIPEYKIVHQWSIPLGDHTAQLAEIAAVEFACKKALKISGPVLIVTDSFYVAESANKELPYWKSNGFLNNKKKPLRHVSKWKSIAECLQLKPDIIIMHEKGHQQPMTTLHTEGNNLADKLATQGSYVVHAGKRTADGSEFEKRTADGSEFESPKKKAKVE

SEQ ID NO: 448 - protein, 2085 aa, synthetic construct
MPAAKRVKLDGGDKKYSIGLDIGTNSVGWAVITDEYKVPSKKFKVLGNTDRHSIKKNLIGALLFDSGETAEATRLKRTARRRYTRRKNRICYLQEIFSNEMAKVDDSFFHRLEESFLVEEDKKHERHPIFGNIVDEVAYHEKYPTIYHLRKKLVDSTDKADLRLIYLALAHMIKFRGHFLIEGDLNPDNSDVDKLFIQLVQTYNQLFEENPINASGVDAKAILSARLSKSRRLENLIAQLPGEKKNGLFGNLIALSLGLTPNFKSNFDLAEDAKLQLSKDTYDDDLDNLLAQIGDQYADLFLAAKNLSDAILLSDILRVNTEITKAPLSASMIKRYDEHHQDLTLLKALVRQQLPEKYKEIFFDQSKNGYAGYIDGGASQEEFYKFIKPILEKMDGTEELLVKLNREDLLRKQRTFDNGSIPHQIHLGELHAILRRQEDFYPFLKDNREKIEKILTFRIPYYVGPLARGNSRFAWMTRKSEETITPWNFEEVVDKGASAQSFIERMTNFDKNLPNEKVLPKHSLLYEYFTVYNELTKVKYVTEGMRKPAFLSGEQKKAIVDLLFKTNRKVTVKQLKEDYFKKIECFDSVEISGVEDRFNASLGTYHDLLKIIKDKDFLDNEENEDILEDIVLTLTLFEDREMIEERLKTYAHLFDDKVMKQLKRRRYTGWGRLSRKLINGIRDKQSGKTILDFLKSDGFANRNFMQLIHDDSLTFKEDIQKAQVSGQGDSLHEHIANLAGSPAIKKGILQTVKVVDELVKVMGRHKPENIVIEMARENQTTQKGQKNSRERMKRIEEGIKELGSQILKEHPVENTQLQNEKLYLYYLQNGRDMYVDQELDINRLSDYDVDHIVPQSFLKDDSIDNKVLTRSDKARGKSDNVPSEEVVKKMKNYWRQLLNAKLITQRKFDNLTKAERGGLSELDKAGFIKRQLVETRQITKHVAQILDSRMNTKYDENDKLIREVKVITLKSKLVSDFRKDFQFYKVREINNYHHAHDAYLNAVVGTALIKKYPKLESEFVYGDYKVYDVRKMIAKSEQEIGKATAKYFFYSNIMNFFKTEITLANGEIRKRPLIETNGETGEIVWDKGRDFATVRKVLSMPQVNIVKKTEVQTGGFSKESILPKRNSDKLIARKKDWDPKKYGGFDSPTVAYSVLVVAKVEKGKSKKLKSVKELLGITIMERSSFEKNPIDFLEAKGYKEVKKDLIIKLPKYSLFELENGRKRMLASAGELQKGNELALPSKYVNFLYLASHYEKLKGSPEDNEQKQLFVEQHKHYLDEIIEQISEFSKRVILADANLDKVLSAYNKHRDKPIREQAENIIHLFTLTNLGAPAAFKYFDTTIDRKRYTSTKEVLDATLIHQSITGLYETRIDLSQLGGDGGGGGPAPGGSGGVPWLMKKPLQLTVLVPLHEYQERLLQQTALPKEQKELLQKLFLKYDALWQHWENQVGHRRIKPHNIATGTLAPRPQKQYPINPKAKPSIQIVIDDLLKQGVLIQQNSTMNTPVYPVPKPDGKWRMVLDYREVNKTIPLIAAQNQHSAGILSSIYRGKYKTTLDLTNGFWAHPITPESYWLTAFTWQGKQYCWTRLPQGFLNSPALFNADVVDLLKEIPNVQAYVDDIYISHDDPQEHLEQLEKIFSILLNAGYVVSLKKSEIAQREVEFLGFNITKEGRGLTDTFKQKLLNITPPKDLKQLQSILGKLNFARNFIPNYSELVKPLYTIVAPANGKFISWTEDNSNQLQHIISVLNQADNLEERNPETRLIIKVNSSPSAGYIRYYNEGSKRPIMYVNYIFSKAEAKFTQTEKLLTTMHKGLIKAMDLAMGQEILVYSPIVSMTKIQRTPLPERKALPVRWITWMTYLEDPRIQFHYDKSLPELQQIPNVTEDVIAKTKHPSEFAMVFYTDGSAIKHPDVNKSHSAGMGIAQVQFIPEYKIVHQWSIPLGDHTAQLAEIAAVEFACKKALKISGPVLIVTDSFYVAESANKELPYWKSNGFLNNKKKPLRHVSKWKSIAECLQLKPDIIIMHEKGHQQPMTTLHTEGNNLADKLATQGSYVVHAGKRTADGSEFEKRTADGSEFESPKKKAKVE

SEQ ID NO: 449 - protein, 2088 aa, synthetic construct
MPAAKRVKLDGGDKKYSIGLDIGTNSVGWAVITDEYKVPSKKFKVLGNTDRHSIKKNLIGALLFDSGETAEATRLKRTARRRYTRRKNRICYLQEIFSNEMAKVDDSFFHRLEESFLVEEDKKHERHPIFGNIVDEVAYHEKYPTIYHLRKKLVDSTDKADLRLIYLALAHMIKFRGHFLIEGDLNPDNSDVDKLFIQLVQTYNQLFEENPINASGVDAKAILSARLSKSRRLENLIAQLPGEKKNGLFGNLIALSLGLTPNFKSNFDLAEDAKLQLSKDTYDDDLDNLLAQIGDQYADLFLAAKNLSDAILLSDILRVNTEITKAPLSASMIKRYDEHHQDLTLLKALVRQQLPEKYKEIFFDQSKNGYAGYIDGGASQEEFYKFIKPILEKMDGTEELLVKLNREDLLRKQRTFDNGSIPHQIHLGELHAILRRQEDFYPFLKDNREKIEKILTFRIPYYVGPLARGNSRFAWMTRKSEETITPWNFEEVVDKGASAQSFIERMTNFDKNLPNEKVLPKHSLLYEYFTVYNELTKVKYVTEGMRKPAFLSGEQKKAIVDLLFKTNRKVTVKQLKEDYFKKIECFDSVEISGVEDRFNASLGTYHDLLKIIKDKDFLDNEENEDILEDIVLTLTLFEDREMIEERLKTYAHLFDDKVMKQLKRRRYTGWGRLSRKLINGIRDKQSGKTILDFLKSDGFANRNFMQLIHDDSLTFKEDIQKAQVSGQGDSLHEHIANLAGSPAIKKGILQTVKVVDELVKVMGRHKPENIVIEMARENQTTQKGQKNSRERMKRIEEGIKELGSQILKEHPVENTQLQNEKLYLYYLQNGRDMYVDQELDINRLSDYDVDHIVPQSFLKDDSIDNKVLTRSDKARGKSDNVPSEEVVKKMKNYWRQLLNAKLITQRKFDNLTKAERGGLSELDKAGFIKRQLVETRQITKHVAQILDSRMNTKYDENDKLIREVKVITLKSKLVSDFRKDFQFYKVREINNYHHAHDAYLNAVVGTALIKKYPKLESEFVYGDYKVYDVRKMIAKSEQEIGKATAKYFFYSNIMNFFKTEITLANGEIRKRPLIETNGETGEIVWDKGRDFATVRKVLSMPQVNIVKKTEVQTGGFSKESILPKRNSDKLIARKKDWDPKKYGGFDSPTVAYSVLVVAKVEKGKSKKLKSVKELLGITIMERSSFEKNPIDFLEAKGYKEVKKDLIIKLPKYSLFELENGRKRMLASAGELQKGNELALPSKYVNFLYLASHYEKLKGSPEDNEQKQLFVEQHKHYLDEIIEQISEFSKRVILADANLDKVLSAYNKHRDKPIREQAENIIHLFTLTNLGAPAAFKYFDTTIDRKRYTSTKEVLDATLIHQSITGLYETRIDLSQLGGDGGGSSGSSGSSGSSGGVPWLMKKPLQLTVLVPLHEYQERLLQQTALPKEQKELLQKLFLKYDALWQHWENQVGHRRIKPHNIATGTLAPRPQKQYPINPKAKPSIQIVIDDLLKQGVLIQQNSTMNTPVYPVPKPDGKWRMVLDYREVNKTIPLIAAQNQHSAGILSSIYRGKYKTTLDLTNGFWAHPITPESYWLTAFTWQGKQYCWTRLPQGFLNSPALFNADVVDLLKEIPNVQAYVDDIYISHDDPQEHLEQLEKIFSILLNAGYVVSLKKSEIAQREVEFLGFNITKEGRGLTDTFKQKLLNITPPKDLKQLQSILGKLNFARNFIPNYSELVKPLYTIVAPANGKFISWTEDNSNQLQHIISVLNQADNLEERNPETRLIIKVNSSPSAGYIRYYNEGSKRPIMYVNYIFSKAEAKFTQTEKLLTTMHKGLIKAMDLAMGQEILVYSPIVSMTKIQRTPLPERKALPVRWITWMTYLEDPRIQFHYDKSLPELQQIPNVTEDVIAKTKHPSEFAMVFYTDGSAIKHPDVNKSHSAGMGIAQVQFIPEYKIVHQWSIPLGDHTAQLAEIAAVEFACKKALKISGPVLIVTDSFYVAESANKELPYWKSNGFLNNKKKPLRHVSKWKSIAECLQLKPDIIIMHEKGHQQPMTTLHTEGNNLADKLATQGSYVVHAGKRTADGSEFEKRTADGSEFESPKKKAKVE

SEQ ID NO: 450 - protein, 2094 aa, synthetic construct
MPAAKRVKLDGGDKKYSIGLDIGTNSVGWAVITDEYKVPSKKFKVLGNTDRHSIKKNLIGALLFDSGETAEATRLKRTARRRYTRRKNRICYLQEIFSNEMAKVDDSFFHRLEESFLVEEDKKHERHPIFGNIVDEVAYHEKYPTIYHLRKKLVDSTDKADLRLIYLALAHMIKFRGHFLIEGDLNPDNSDVDKLFIQLVQTYNQLFEENPINASGVDAKAILSARLSKSRRLENLIAQLPGEKKNGLFGNLIALSLGLTPNFKSNFDLAEDAKLQLSKDTYDDDLDNLLAQIGDQYADLFLAAKNLSDAILLSDILRVNTEITKAPLSASMIKRYDEHHQDLTLLKALVRQQLPEKYKEIFFDQSKNGYAGYIDGGASQEEFYKFIKPILEKMDGTEELLVKLNREDLLRKQRTFDNGSIPHQIHLGELHAILRRQEDFYPFLKDNREKIEKILTFRIPYYVGPLARGNSRFAWMTRKSEETITPWNFEEVVDKGASAQSFIERMTNFDKNLPNEKVLPKHSLLYEYFTVYNELTKVKYVTEGMRKPAFLSGEQKKAIVDLLFKTNRKVTVKQLKEDYFKKIECFDSVEISGVEDRFNASLGTYHDLLKIIKDKDFLDNEENEDILEDIVLTLTLFEDREMIEERLKTYAHLFDDKVMKQLKRRRYTGWGRLSRKLINGIRDKQSGKTILDFLKSDGFANRNFMQLIHDDSLTFKEDIQKAQVSGQGDSLHEHIANLAGSPAIKKGILQTVKVVDELVKVMGRHKPENIVIEMARENQTTQKGQKNSRERMKRIEEGIKELGSQILKEHPVENTQLQNEKLYLYYLQNGRDMYVDQELDINRLSDYDVDHIVPQSFLKDDSIDNKVLTRSDKARGKSDNVPSEEVVKKMKNYWRQLLNAKLITQRKFDNLTKAERGGLSELDKAGFIKRQLVETRQITKHVAQILDSRMNTKYDENDKLIREVKVITLKSKLVSDFRKDFQFYKVREINNYHHAHDAYLNAVVGTALIKKYPKLESEFVYGDYKVYDVRKMIAKSEQEIGKATAKYFFYSNIMNFFKTEITLANGEIRKRPLIETNGETGEIVWDKGRDFATVRKVLSMPQVNIVKKTEVQTGGFSKESILPKRNSDKLIARKKDWDPKKYGGFDSPTVAYSVLVVAKVEKGKSKKLKSVKELLGITIMERSSFEKNPIDFLEAKGYKEVKKDLIIKLPKYSLFELENGRKRMLASAGELQKGNELALPSKYVNFLYLASHYEKLKGSPEDNEQKQLFVEQHKHYLDEIIEQISEFSKRVILADANLDKVLSAYNKHRDKPIREQAENIIHLFTLTNLGAPAAFKYFDTTIDRKRYTSTKEVLDATLIHQSITGLYETRIDLSQLGGDGGGSSGSSGSSGSSGSSGSSGGVPWLMKKPLQLTVLVPLHEYQERLLQQTALPKEQKELLQKLFLKYDALWQHWENQVGHRRIKPHNIATGTLAPRPQKQYPINPKAKPSIQIVIDDLLKQGVLIQQNSTMNTPVYPVPKPDGKWRMVLDYREVNKTIPLIAAQNQHSAGILSSIYRGKYKTTLDLTNGFWAHPITPESYWLTAFTWQGKQYCWTRLPQGFLNSPALFNADVVDLLKEIPNVQAYVDDIYISHDDPQEHLEQLEKIFSILLNAGYVVSLKKSEIAQREVEFLGFNITKEGRGLTDTFKQKLLNITPPKDLKQLQSILGKLNFARNFIPNYSELVKPLYTIVAPANGKFISWTEDNSNQLQHIISVLNQADNLEERNPETRLIIKVNSSPSAGYIRYYNEGSKRPIMYVNYIFSKAEAKFTQTEKLLTTMHKGLIKAMDLAMGQEILVYSPIVSMTKIQRTPLPERKALPVRWITWMTYLEDPRIQFHYDKSLPELQQIPNVTEDVIAKTKHPSEFAMVFYTDGSAIKHPDVNKSHSAGMGIAQVQFIPEYKIVHQWSIPLGDHTAQLAEIAAVEFACKKALKISGPVLIVTDSFYVAESANKELPYWKSNGFLNNKKKPLRHVSKWKSIAECLQLKPDIIIMHEKGHQQPMTTLHTEGNNLADKLATQGSYVVHAGKRTADGSEFEKRTADGSEFESPKKKAKVE

SEQ ID NO: 451 - protein, 2087 aa, synthetic construct
MPAAKRVKLDGGDKKYSIGLDIGTNSVGWAVITDEYKVPSKKFKVLGNTDRHSIKKNLIGALLFDSGETAEATRLKRTARRRYTRRKNRICYLQEIFSNEMAKVDDSFFHRLEESFLVEEDKKHERHPIFGNIVDEVAYHEKYPTIYHLRKKLVDSTDKADLRLIYLALAHMIKFRGHFLIEGDLNPDNSDVDKLFIQLVQTYNQLFEENPINASGVDAKAILSARLSKSRRLENLIAQLPGEKKNGLFGNLIALSLGLTPNFKSNFDLAEDAKLQLSKDTYDDDLDNLLAQIGDQYADLFLAAKNLSDAILLSDILRVNTEITKAPLSASMIKRYDEHHQDLTLLKALVRQQLPEKYKEIFFDQSKNGYAGYIDGGASQEEFYKFIKPILEKMDGTEELLVKLNREDLLRKQRTFDNGSIPHQIHLGELHAILRRQEDFYPFLKDNREKIEKILTFRIPYYVGPLARGNSRFAWMTRKSEETITPWNFEEVVDKGASAQSFIERMTNFDKNLPNEKVLPKHSLLYEYFTVYNELTKVKYVTEGMRKPAFLSGEQKKAIVDLLFKTNRKVTVKQLKEDYFKKIECFDSVEISGVEDRFNASLGTYHDLLKIIKDKDFLDNEENEDILEDIVLTLTLFEDREMIEERLKTYAHLFDDKVMKQLKRRRYTGWGRLSRKLINGIRDKQSGKTILDFLKSDGFANRNFMQLIHDDSLTFKEDIQKAQVSGQGDSLHEHIANLAGSPAIKKGILQTVKVVDELVKVMGRHKPENIVIEMARENQTTQKGQKNSRERMKRIEEGIKELGSQILKEHPVENTQLQNEKLYLYYLQNGRDMYVDQELDINRLSDYDVDHIVPQSFLKDDSIDNKVLTRSDKARGKSDNVPSEEVVKKMKNYWRQLLNAKLITQRKFDNLTKAERGGLSELDKAGFIKRQLVETRQITKHVAQILDSRMNTKYDENDKLIREVKVITLKSKLVSDFRKDFQFYKVREINNYHHAHDAYLNAVVGTALIKKYPKLESEFVYGDYKVYDVRKMIAKSEQEIGKATAKYFFYSNIMNFFKTEITLANGEIRKRPLIETNGETGEIVWDKGRDFATVRKVLSMPQVNIVKKTEVQTGGFSKESILPKRNSDKLIARKKDWDPKKYGGFDSPTVAYSVLVVAKVEKGKSKKLKSVKELLGITIMERSSFEKNPIDFLEAKGYKEVKKDLIIKLPKYSLFELENGRKRMLASAGELQKGNELALPSKYVNFLYLASHYEKLKGSPEDNEQKQLFVEQHKHYLDEIIEQISEFSKRVILADANLDKVLSAYNKHRDKPIREQAENIIHLFTLTNLGAPAAFKYFDTTIDRKRYTSTKEVLDATLIHQSITGLYETRIDLSQLGGDGGPAPGGGEAAAKGGVPWLMKKPLQLTVLVPLHEYQERLLQQTALPKEQKELLQKLFLKYDALWQHWENQVGHRRIKPHNIATGTLAPRPQKQYPINPKAKPSIQIVIDDLLKQGVLIQQNSTMNTPVYPVPKPDGKWRMVLDYREVNKTIPLIAAQNQHSAGILSSIYRGKYKTTLDLTNGFWAHPITPESYWLTAFTWQGKQYCWTRLPQGFLNSPALFNADVVDLLKEIPNVQAYVDDIYISHDDPQEHLEQLEKIFSILLNAGYVVSLKKSEIAQREVEFLGFNITKEGRGLTDTFKQKLLNITPPKDLKQLQSILGKLNFARNFIPNYSELVKPLYTIVAPANGKFISWTEDNSNQLQHIISVLNQADNLEERNPETRLIIKVNSSPSAGYIRYYNEGSKRPIMYVNYIFSKAEAKFTQTEKLLTTMHKGLIKAMDLAMGQEILVYSPIVSMTKIQRTPLPERKALPVRWITWMTYLEDPRIQFHYDKSLPELQQIPNVTEDVIAKTKHPSEFAMVFYTDGSAIKHPDVNKSHSAGMGIAQVQFIPEYKIVHQWSIPLGDHTAQLAEIAAVEFACKKALKISGPVLIVTDSFYVAESANKELPYWKSNGFLNNKKKPLRHVSKWKSIAECLQLKPDIIIMHEKGHQQPMTTLHTEGNNLADKLATQGSYVVHAGKRTADGSEFEKRTADGSEFESPKKKAKVE

SEQ ID NO: 452 - protein, 2081 aa, synthetic construct
MPAAKRVKLDGGDKKYSIGLDIGTNSVGWAVITDEYKVPSKKFKVLGNTDRHSIKKNLIGALLFDSGETAEATRLKRTARRRYTRRKNRICYLQEIFSNEMAKVDDSFFHRLEESFLVEEDKKHERHPIFGNIVDEVAYHEKYPTIYHLRKKLVDSTDKADLRLIYLALAHMIKFRGHFLIEGDLNPDNSDVDKLFIQLVQTYNQLFEENPINASGVDAKAILSARLSKSRRLENLIAQLPGEKKNGLFGNLIALSLGLTPNFKSNFDLAEDAKLQLSKDTYDDDLDNLLAQIGDQYADLFLAAKNLSDAILLSDILRVNTEITKAPLSASMIKRYDEHHQDLTLLKALVRQQLPEKYKEIFFDQSKNGYAGYIDGGASQEEFYKFIKPILEKMDGTEELLVKLNREDLLRKQRTFDNGSIPHQIHLGELHAILRRQEDFYPFLKDNREKIEKILTFRIPYYVGPLARGNSRFAWMTRKSEETITPWNFEEVVDKGASAQSFIERMTNFDKNLPNEKVLPKHSLLYEYFTVYNELTKVKYVTEGMRKPAFLSGEQKKAIVDLLFKTNRKVTVKQLKEDYFKKIECFDSVEISGVEDRFNASLGTYHDLLKIIKDKDFLDNEENEDILEDIVLTLTLFEDREMIEERLKTYAHLFDDKVMKQLKRRRYTGWGRLSRKLINGIRDKQSGKTILDFLKSDGFANRNFMQLIHDDSLTFKEDIQKAQVSGQGDSLHEHIANLAGSPAIKKGILQTVKVVDELVKVMGRHKPENIVIEMARENQTTQKGQKNSRERMKRIEEGIKELGSQILKEHPVENTQLQNEKLYLYYLQNGRDMYVDQELDINRLSDYDVDHIVPQSFLKDDSIDNKVLTRSDKARGKSDNVPSEEVVKKMKNYWRQLLNAKLITQRKFDNLTKAERGGLSELDKAGFIKRQLVETRQITKHVAQILDSRMNTKYDENDKLIREVKVITLKSKLVSDFRKDFQFYKVREINNYHHAHDAYLNAVVGTALIKKYPKLESEFVYGDYKVYDVRKMIAKSEQEIGKATAKYFFYSNIMNFFKTEITLANGEIRKRPLIETNGETGEIVWDKGRDFATVRKVLSMPQVNIVKKTEVQTGGFSKESILPKRNSDKLIARKKDWDPKKYGGFDSPTVAYSVLVVAKVEKGKSKKLKSVKELLGITIMERSSFEKNPIDFLEAKGYKEVKKDLIIKLPKYSLFELENGRKRMLASAGELQKGNELALPSKYVNFLYLASHYEKLKGSPEDNEQKQLFVEQHKHYLDEIIEQISEFSKRVILADANLDKVLSAYNKHRDKPIREQAENIIHLFTLTNLGAPAAFKYFDTTIDRKRYTSTKEVLDATLIHQSITGLYETRIDLSQLGGDGGGGGGSGGVPWLMKKPLQLTVLVPLHEYQERLLQQTALPKEQKELLQKLFLKYDALWQHWENQVGHRRIKPHNIATGTLAPRPQKQYPINPKAKPSIQIVIDDLLKQGVLIQQNSTMNTPVYPVPKPDGKWRMVLDYREVNKTIPLIAAQNQHSAGILSSIYRGKYKTTLDLTNGFWAHPITPESYWLTAFTWQGKQYCWTRLPQGFLNSPALFNADVVDLLKEIPNVQAYVDDIYISHDDPQEHLEQLEKIFSILLNAGYVVSLKKSEIAQREVEFLGFNITKEGRGLTDTFKQKLLNITPPKDLKQLQSILGKLNFARNFIPNYSELVKPLYTIVAPANGKFISWTEDNSNQLQHIISVLNQADNLEERNPETRLIIKVNSSPSAGYIRYYNEGSKRPIMYVNYIFSKAEAKFTQTEKLLTTMHKGLIKAMDLAMGQEILVYSPIVSMTKIQRTPLPERKALPVRWITWMTYLEDPRIQFHYDKSLPELQQIPNVTEDVIAKTKHPSEFAMVFYTDGSAIKHPDVNKSHSAGMGIAQVQFIPEYKIVHQWSIPLGDHTAQLAEIAAVEFACKKALKISGPVLIVTDSFYVAESANKELPYWKSNGFLNNKKKPLRHVSKWKSIAECLQLKPDIIIMHEKGHQQPMTTLHTEGNNLADKLATQGSYVVHAGKRTADGSEFEKRTADGSEFESPKKKAKVE

SEQ ID NO: 453 - protein, 2084 aa, synthetic construct
MPAAKRVKLDGGDKKYSIGLDIGTNSVGWAVITDEYKVPSKKFKVLGNTDRHSIKKNLIGALLFDSGETAEATRLKRTARRRYTRRKNRICYLQEIFSNEMAKVDDSFFHRLEESFLVEEDKKHERHPIFGNIVDEVAYHEKYPTIYHLRKKLVDSTDKADLRLIYLALAHMIKFRGHFLIEGDLNPDNSDVDKLFIQLVQTYNQLFEENPINASGVDAKAILSARLSKSRRLENLIAQLPGEKKNGLFGNLIALSLGLTPNFKSNFDLAEDAKLQLSKDTYDDDLDNLLAQIGDQYADLFLAAKNLSDAILLSDILRVNTEITKAPLSASMIKRYDEHHQDLTLLKALVRQQLPEKYKEIFFDQSKNGYAGYIDGGASQEEFYKFIKPILEKMDGTEELLVKLNREDLLRKQRTFDNGSIPHQIHLGELHAILRRQEDFYPFLKDNREKIEKILTFRIPYYVGPLARGNSRFAWMTRKSEETITPWNFEEVVDKGASAQSFIERMTNFDKNLPNEKVLPKHSLLYEYFTVYNELTKVKYVTEGMRKPAFLSGEQKKAIVDLLFKTNRKVTVKQLKEDYFKKIECFDSVEISGVEDRFNASLGTYHDLLKIIKDKDFLDNEENEDILEDIVLTLTLFEDREMIEERLKTYAHLFDDKVMKQLKRRRYTGWGRLSRKLINGIRDKQSGKTILDFLKSDGFANRNFMQLIHDDSLTFKEDIQKAQVSGQGDSLHEHIANLAGSPAIKKGILQTVKVVDELVKVMGRHKPENIVIEMARENQTTQKGQKNSRERMKRIEEGIKELGSQILKEHPVENTQLQNEKLYLYYLQNGRDMYVDQELDINRLSDYDVDHIVPQSFLKDDSIDNKVLTRSDKARGKSDNVPSEEVVKKMKNYWRQLLNAKLITQRKFDNLTKAERGGLSELDKAGFIKRQLVETRQITKHVAQILDSRMNTKYDENDKLIREVKVITLKSKLVSDFRKDFQFYKVREINNYHHAHDAYLNAVVGTALIKKYPKLESEFVYGDYKVYDVRKMIAKSEQEIGKATAKYFFYSNIMNFFKTEITLANGEIRKRPLIETNGETGEIVWDKGRDFATVRKVLSMPQVNIVKKTEVQTGGFSKESILPKRNSDKLIARKKDWDPKKYGGFDSPTVAYSVLVVAKVEKGKSKKLKSVKELLGITIMERSSFEKNPIDFLEAKGYKEVKKDLIIKLPKYSLFELENGRKRMLASAGELQKGNELALPSKYVNFLYLASHYEKLKGSPEDNEQKQLFVEQHKHYLDEIIEQISEFSKRVILADANLDKVLSAYNKHRDKPIREQAENIIHLFTLTNLGAPAAFKYFDTTIDRKRYTSTKEVLDATLIHQSITGLYETRIDLSQLGGDGGEAAAKPAPGGVPWLMKKPLQLTVLVPLHEYQERLLQQTALPKEQKELLQKLFLKYDALWQHWENQVGHRRIKPHNIATGTLAPRPQKQYPINPKAKPSIQIVIDDLLKQGVLIQQNSTMNTPVYPVPKPDGKWRMVLDYREVNKTIPLIAAQNQHSAGILSSIYRGKYKTTLDLTNGFWAHPITPESYWLTAFTWQGKQYCWTRLPQGFLNSPALFNADVVDLLKEIPNVQAYVDDIYISHDDPQEHLEQLEKIFSILLNAGYVVSLKKSEIAQREVEFLGFNITKEGRGLTDTFKQKLLNITPPKDLKQLQSILGKLNFARNFIPNYSELVKPLYTIVAPANGKFISWTEDNSNQLQHIISVLNQADNLEERNPETRLIIKVNSSPSAGYIRYYNEGSKRPIMYVNYIFSKAEAKFTQTEKLLTTMHKGLIKAMDLAMGQEILVYSPIVSMTKIQRTPLPERKALPVRWITWMTYLEDPRIQFHYDKSLPELQQIPNVTEDVIAKTKHPSEFAMVFYTDGSAIKHPDVNKSHSAGMGIAQVQFIPEYKIVHQWSIPLGDHTAQLAEIAAVEFACKKALKISGPVLIVTDSFYVAESANKELPYWKSNGFLNNKKKPLRHVSKWKSIAECLQLKPDIIIMHEKGHQQPMTTLHTEGNNLADKLATQGSYVVHAGKRTADGSEFEKRTADGSEFESPKKKAKVE

SEQ ID NO: 454 - protein, 2085 aa, synthetic construct
MPAAKRVKLDGGDKKYSIGLDIGTNSVGWAVITDEYKVPSKKFKVLGNTDRHSIKKNLIGALLFDSGETAEATRLKRTARRRYTRRKNRICYLQEIFSNEMAKVDDSFFHRLEESFLVEEDKKHERHPIFGNIVDEVAYHEKYPTIYHLRKKLVDSTDKADLRLIYLALAHMIKFRGHFLIEGDLNPDNSDVDKLFIQLVQTYNQLFEENPINASGVDAKAILSARLSKSRRLENLIAQLPGEKKNGLFGNLIALSLGLTPNFKSNFDLAEDAKLQLSKDTYDDDLDNLLAQIGDQYADLFLAAKNLSDAILLSDILRVNTEITKAPLSASMIKRYDEHHQDLTLLKALVRQQLPEKYKEIFFDQSKNGYAGYIDGGASQEEFYKFIKPILEKMDGTEELLVKLNREDLLRKQRTFDNGSIPHQIHLGELHAILRRQEDFYPFLKDNREKIEKILTFRIPYYVGPLARGNSRFAWMTRKSEETITPWNFEEVVDKGASAQSFIERMTNFDKNLPNEKVLPKHSLLYEYFTVYNELTKVKYVTEGMRKPAFLSGEQKKAIVDLLFKTNRKVTVKQLKEDYFKKIECFDSVEISGVEDRFNASLGTYHDLLKIIKDKDFLDNEENEDILEDIVLTLTLFEDREMIEERLKTYAHLFDDKVMKQLKRRRYTGWGRLSRKLINGIRDKQSGKTILDFLKSDGFANRNFMQLIHDDSLTFKEDIQKAQVSGQGDSLHEHIANLAGSPAIKKGILQTVKVVDELVKVMGRHKPENIVIEMARENQTTQKGQKNSRERMKRIEEGIKELGSQILKEHPVENTQLQNEKLYLYYLQNGRDMYVDQELDINRLSDYDVDHIVPQSFLKDDSIDNKVLTRSDKARGKSDNVPSEEVVKKMKNYWRQLLNAKLITQRKFDNLTKAERGGLSELDKAGFIKRQLVETRQITKHVAQILDSRMNTKYDENDKLIREVKVITLKSKLVSDFRKDFQFYKVREINNYHHAHDAYLNAVVGTALIKKYPKLESEFVYGDYKVYDVRKMIAKSEQEIGKATAKYFFYSNIMNFFKTEITLANGEIRKRPLIETNGETGEIVWDKGRDFATVRKVLSMPQVNIVKKTEVQTGGFSKESILPKRNSDKLIARKKDWDPKKYGGFDSPTVAYSVLVVAKVEKGKSKKLKSVKELLGITIMERSSFEKNPIDFLEAKGYKEVKKDLIIKLPKYSLFELENGRKRMLASAGELQKGNELALPSKYVNFLYLASHYEKLKGSPEDNEQKQLFVEQHKHYLDEIIEQISEFSKRVILADANLDKVLSAYNKHRDKPIREQAENIIHLFTLTNLGAPAAFKYFDTTIDRKRYTSTKEVLDATLIHQSITGLYETRIDLSQLGGDGGGGGGSSGGSGGVPWLMKKPLQLTVLVPLHEYQERLLQQTALPKEQKELLQKLFLKYDALWQHWENQVGHRRIKPHNIATGTLAPRPQKQYPINPKAKPSIQIVIDDLLKQGVLIQQNSTMNTPVYPVPKPDGKWRMVLDYREVNKTIPLIAAQNQHSAGILSSIYRGKYKTTLDLTNGFWAHPITPESYWLTAFTWQGKQYCWTRLPQGFLNSPALFNADVVDLLKEIPNVQAYVDDIYISHDDPQEHLEQLEKIFSILLNAGYVVSLKKSEIAQREVEFLGFNITKEGRGLTDTFKQKLLNITPPKDLKQLQSILGKLNFARNFIPNYSELVKPLYTIVAPANGKFISWTEDNSNQLQHIISVLNQADNLEERNPETRLIIKVNSSPSAGYIRYYNEGSKRPIMYVNYIFSKAEAKFTQTEKLLTTMHKGLIKAMDLAMGQEILVYSPIVSMTKIQRTPLPERKALPVRWITWMTYLEDPRIQFHYDKSLPELQQIPNVTEDVIAKTKHPSEFAMVFYTDGSAIKHPDVNKSHSAGMGIAQVQFIPEYKIVHQWSIPLGDHTAQLAEIAAVEFACKKALKISGPVLIVTDSFYVAESANKELPYWKSNGFLNNKKKPLRHVSKWKSIAECLQLKPDIIIMHEKGHQQPMTTLHTEGNNLADKLATQGSYVVHAGKRTADGSEFEKRTADGSEFESPKKKAKVE

SEQ ID NO: 455 - protein, 2085 aa, synthetic construct
MPAAKRVKLDGGDKKYSIGLDIGTNSVGWAVITDEYKVPSKKFKVLGNTDRHSIKKNLIGALLFDSGETAEATRLKRTARRRYTRRKNRICYLQEIFSNEMAKVDDSFFHRLEESFLVEEDKKHERHPIFGNIVDEVAYHEKYPTIYHLRKKLVDSTDKADLRLIYLALAHMIKFRGHFLIEGDLNPDNSDVDKLFIQLVQTYNQLFEENPINASGVDAKAILSARLSKSRRLENLIAQLPGEKKNGLFGNLIALSLGLTPNFKSNFDLAEDAKLQLSKDTYDDDLDNLLAQIGDQYADLFLAAKNLSDAILLSDILRVNTEITKAPLSASMIKRYDEHHQDLTLLKALVRQQLPEKYKEIFFDQSKNGYAGYIDGGASQEEFYKFIKPILEKMDGTEELLVKLNREDLLRKQRTFDNGSIPHQIHLGELHAILRRQEDFYPFLKDNREKIEKILTFRIPYYVGPLARGNSRFAWMTRKSEETITPWNFEEVVDKGASAQSFIERMTNFDKNLPNEKVLPKHSLLYEYFTVYNELTKVKYVTEGMRKPAFLSGEQKKAIVDLLFKTNRKVTVKQLKEDYFKKIECFDSVEISGVEDRFNASLGTYHDLLKIIKDKDFLDNEENEDILEDIVLTLTLFEDREMIEERLKTYAHLFDDKVMKQLKRRRYTGWGRLSRKLINGIRDKQSGKTILDFLKSDGFANRNFMQLIHDDSLTFKEDIQKAQVSGQGDSLHEHIANLAGSPAIKKGILQTVKVVDELVKVMGRHKPENIVIEMARENQTTQKGQKNSRERMKRIEEGIKELGSQILKEHPVENTQLQNEKLYLYYLQNGRDMYVDQELDINRLSDYDVDHIVPQSFLKDDSIDNKVLTRSDKARGKSDNVPSEEVVKKMKNYWRQLLNAKLITQRKFDNLTKAERGGLSELDKAGFIKRQLVETRQITKHVAQILDSRMNTKYDENDKLIREVKVITLKSKLVSDFRKDFQFYKVREINNYHHAHDAYLNAVVGTALIKKYPKLESEFVYGDYKVYDVRKMIAKSEQEIGKATAKYFFYSNIMNFFKTEITLANGEIRKRPLIETNGETGEIVWDKGRDFATVRKVLSMPQVNIVKKTEVQTGGFSKESILPKRNSDKLIARKKDWDPKKYGGFDSPTVAYSVLVVAKVEKGKSKKLKSVKELLGITIMERSSFEKNPIDFLEAKGYKEVKKDLIIKLPKYSLFELENGRKRMLASAGELQKGNELALPSKYVNFLYLASHYEKLKGSPEDNEQKQLFVEQHKHYLDEIIEQISEFSKRVILADANLDKVLSAYNKHRDKPIREQAENIIHLFTLTNLGAPAAFKYFDTTIDRKRYTSTKEVLDATLIHQSITGLYETRIDLSQLGGDGGGSSPAPGGSGGVPWLMKKPLQLTVLVPLHEYQERLLQQTALPKEQKELLQKLFLKYDALWQHWENQVGHRRIKPHNIATGTLAPRPQKQYPINPKAKPSIQIVIDDLLKQGVLIQQNSTMNTPVYPVPKPDGKWRMVLDYREVNKTIPLIAAQNQHSAGILSSIYRGKYKTTLDLTNGFWAHPITPESYWLTAFTWQGKQYCWTRLPQGFLNSPALFNADVVDLLKEIPNVQAYVDDIYISHDDPQEHLEQLEKIFSILLNAGYVVSLKKSEIAQREVEFLGFNITKEGRGLTDTFKQKLLNITPPKDLKQLQSILGKLNFARNFIPNYSELVKPLYTIVAPANGKFISWTEDNSNQLQHIISVLNQADNLEERNPETRLIIKVNSSPSAGYIRYYNEGSKRPIMYVNYIFSKAEAKFTQTEKLLTTMHKGLIKAMDLAMGQEILVYSPIVSMTKIQRTPLPERKALPVRWITWMTYLEDPRIQFHYDKSLPELQQIPNVTEDVIAKTKHPSEFAMVFYTDGSAIKHPDVNKSHSAGMGIAQVQFIPEYKIVHQWSIPLGDHTAQLAEIAAVEFACKKALKISGPVLIVTDSFYVAESANKELPYWKSNGFLNNKKKPLRHVSKWKSIAECLQLKPDIIIMHEKGHQQPMTTLHTEGNNLADKLATQGSYVVHAGKRTADGSEFEKRTADGSEFESPKKKAKVE

SEQ ID NO: 456 - protein, 2085 aa, synthetic construct
MPAAKRVKLDGGDKKYSIGLDIGTNSVGWAVITDEYKVPSKKFKVLGNTDRHSIKKNLIGALLFDSGETAEATRLKRTARRRYTRRKNRICYLQEIFSNEMAKVDDSFFHRLEESFLVEEDKKHERHPIFGNIVDEVAYHEKYPTIYHLRKKLVDSTDKADLRLIYLALAHMIKFRGHFLIEGDLNPDNSDVDKLFIQLVQTYNQLFEENPINASGVDAKAILSARLSKSRRLENLIAQLPGEKKNGLFGNLIALSLGLTPNFKSNFDLAEDAKLQLSKDTYDDDLDNLLAQIGDQYADLFLAAKNLSDAILLSDILRVNTEITKAPLSASMIKRYDEHHQDLTLLKALVRQQLPEKYKEIFFDQSKNGYAGYIDGGASQEEFYKFIKPILEKMDGTEELLVKLNREDLLRKQRTFDNGSIPHQIHLGELHAILRRQEDFYPFLKDNREKIEKILTFRIPYYVGPLARGNSRFAWMTRKSEETITPWNFEEVVDKGASAQSFIERMTNFDKNLPNEKVLPKHSLLYEYFTVYNELTKVKYVTEGMRKPAFLSGEQKKAIVDLLFKTNRKVTVKQLKEDYFKKIECFDSVEISGVEDRFNASLGTYHDLLKIIKDKDFLDNEENEDILEDIVLTLTLFEDREMIEERLKTYAHLFDDKVMKQLKRRRYTGWGRLSRKLINGIRDKQSGKTILDFLKSDGFANRNFMQLIHDDSLTFKEDIQKAQVSGQGDSLHEHIANLAGSPAIKKGILQTVKVVDELVKVMGRHKPENIVIEMARENQTTQKGQKNSRERMKRIEEGIKELGSQILKEHPVENTQLQNEKLYLYYLQNGRDMYVDQELDINRLSDYDVDHIVPQSFLKDDSIDNKVLTRSDKARGKSDNVPSEEVVKKMKNYWRQLLNAKLITQRKFDNLTKAERGGLSELDKAGFIKRQLVETRQITKHVAQILDSRMNTKYDENDKLIREVKVITLKSKLVSDFRKDFQFYKVREINNYHHAHDAYLNAVVGTALIKKYPKLESEFVYGDYKVYDVRKMIAKSEQEIGKATAKYFFYSNIMNFFKTEITLANGEIRKRPLIETNGETGEIVWDKGRDFATVRKVLSMPQVNIVKKTEVQTGGFSKESILPKRNSDKLIARKKDWDPKKYGGFDSPTVAYSVLVVAKVEKGKSKKLKSVKELLGITIMERSSFEKNPIDFLEAKGYKEVKKDLIIKLPKYSLFELENGRKRMLASAGELQKGNELALPSKYVNFLYLASHYEKLKGSPEDNEQKQLFVEQHKHYLDEIIEQISEFSKRVILADANLDKVLSAYNKHRDKPIREQAENIIHLFTLTNLGAPAAFKYFDTTIDRKRYTSTKEVLDATLIHQSITGLYETRIDLSQLGGDGGPAPGSSGGGGGVPWLMKKPLQLTVLVPLHEYQERLLQQTALPKEQKELLQKLFLKYDALWQHWENQVGHRRIKPHNIATGTLAPRPQKQYPINPKAKPSIQIVIDDLLKQGVLIQQNSTMNTPVYPVPKPDGKWRMVLDYREVNKTIPLIAAQNQHSAGILSSIYRGKYKTTLDLTNGFWAHPITPESYWLTAFTWQGKQYCWTRLPQGFLNSPALFNADVVDLLKEIPNVQAYVDDIYISHDDPQEHLEQLEKIFSILLNAGYVVSLKKSEIAQREVEFLGFNITKEGRGLTDTFKQKLLNITPPKDLKQLQSILGKLNFARNFIPNYSELVKPLYTIVAPANGKFISWTEDNSNQLQHIISVLNQADNLEERNPETRLIIKVNSSPSAGYIRYYNEGSKRPIMYVNYIFSKAEAKFTQTEKLLTTMHKGLIKAMDLAMGQEILVYSPIVSMTKIQRTPLPERKALPVRWITWMTYLEDPRIQFHYDKSLPELQQIPNVTEDVIAKTKHPSEFAMVFYTDGSAIKHPDVNKSHSAGMGIAQVQFIPEYKIVHQWSIPLGDHTAQLAEIAAVEFACKKALKISGPVLIVTDSFYVAESANKELPYWKSNGFLNNKKKPLRHVSKWKSIAECLQLKPDIIIMHEKGHQQPMTTLHTEGNNLADKLATQGSYVVHAGKRTADGSEFEKRTADGSEFESPKKKAKVE

SEQ ID NO: 457 - protein, 2082 aa, synthetic construct
MPAAKRVKLDGGDKKYSIGLDIGTNSVGWAVITDEYKVPSKKFKVLGNTDRHSIKKNLIGALLFDSGETAEATRLKRTARRRYTRRKNRICYLQEIFSNEMAKVDDSFFHRLEESFLVEEDKKHERHPIFGNIVDEVAYHEKYPTIYHLRKKLVDSTDKADLRLIYLALAHMIKFRGHFLIEGDLNPDNSDVDKLFIQLVQTYNQLFEENPINASGVDAKAILSARLSKSRRLENLIAQLPGEKKNGLFGNLIALSLGLTPNFKSNFDLAEDAKLQLSKDTYDDDLDNLLAQIGDQYADLFLAAKNLSDAILLSDILRVNTEITKAPLSASMIKRYDEHHQDLTLLKALVRQQLPEKYKEIFFDQSKNGYAGYIDGGASQEEFYKFIKPILEKMDGTEELLVKLNREDLLRKQRTFDNGSIPHQIHLGELHAILRRQEDFYPFLKDNREKIEKILTFRIPYYVGPLARGNSRFAWMTRKSEETITPWNFEEVVDKGASAQSFIERMTNFDKNLPNEKVLPKHSLLYEYFTVYNELTKVKYVTEGMRKPAFLSGEQKKAIVDLLFKTNRKVTVKQLKEDYFKKIECFDSVEISGVEDRFNASLGTYHDLLKIIKDKDFLDNEENEDILEDIVLTLTLFEDREMIEERLKTYAHLFDDKVMKQLKRRRYTGWGRLSRKLINGIRDKQSGKTILDFLKSDGFANRNFMQLIHDDSLTFKEDIQKAQVSGQGDSLHEHIANLAGSPAIKKGILQTVKVVDELVKVMGRHKPENIVIEMARENQTTQKGQKNSRERMKRIEEGIKELGSQILKEHPVENTQLQNEKLYLYYLQNGRDMYVDQELDINRLSDYDVDHIVPQSFLKDDSIDNKVLTRSDKARGKSDNVPSEEVVKKMKNYWRQLLNAKLITQRKFDNLTKAERGGLSELDKAGFIKRQLVETRQITKHVAQILDSRMNTKYDENDKLIREVKVITLKSKLVSDFRKDFQFYKVREINNYHHAHDAYLNAVVGTALIKKYPKLESEFVYGDYKVYDVRKMIAKSEQEIGKATAKYFFYSNIMNFFKTEITLANGEIRKRPLIETNGETGEIVWDKGRDFATVRKVLSMPQVNIVKKTEVQTGGFSKESILPKRNSDKLIARKKDWDPKKYGGFDSPTVAYSVLVVAKVEKGKSKKLKSVKELLGITIMERSSFEKNPIDFLEAKGYKEVKKDLIIKLPKYSLFELENGRKRMLASAGELQKGNELALPSKYVNFLYLASHYEKLKGSPEDNEQKQLFVEQHKHYLDEIIEQISEFSKRVILADANLDKVLSAYNKHRDKPIREQAENIIHLFTLTNLGAPAAFKYFDTTIDRKRYTSTKEVLDATLIHQSITGLYETRIDLSQLGGDGGGGSGGSGGVPWLMKKPLQLTVLVPLHEYQERLLQQTALPKEQKELLQKLFLKYDALWQHWENQVGHRRIKPHNIATGTLAPRPQKQYPINPKAKPSIQIVIDDLLKQGVLIQQNSTMNTPVYPVPKPDGKWRMVLDYREVNKTIPLIAAQNQHSAGILSSIYRGKYKTTLDLTNGFWAHPITPESYWLTAFTWQGKQYCWTRLPQGFLNSPALFNADVVDLLKEIPNVQAYVDDIYISHDDPQEHLEQLEKIFSILLNAGYVVSLKKSEIAQREVEFLGFNITKEGRGLTDTFKQKLLNITPPKDLKQLQSILGKLNFARNFIPNYSELVKPLYTIVAPANGKFISWTEDNSNQLQHIISVLNQADNLEERNPETRLIIKVNSSPSAGYIRYYNEGSKRPIMYVNYIFSKAEAKFTQTEKLLTTMHKGLIKAMDLAMGQEILVYSPIVSMTKIQRTPLPERKALPVRWITWMTYLEDPRIQFHYDKSLPELQQIPNVTEDVIAKTKHPSEFAMVFYTDGSAIKHPDVNKSHSAGMGIAQVQFIPEYKIVHQWSIPLGDHTAQLAEIAAVEFACKKALKISGPVLIVTDSFYVAESANKELPYWKSNGFLNNKKKPLRHVSKWKSIAECLQLKPDIIIMHEKGHQQPMTTLHTEGNNLADKLATQGSYVVHAGKRTADGSEFEKRTADGSEFESPKKKAKVE

SEQ ID NO: 458 - protein, 2087 aa, synthetic construct
MPAAKRVKLDGGDKKYSIGLDIGTNSVGWAVITDEYKVPSKKFKVLGNTDRHSIKKNLIGALLFDSGETAEATRLKRTARRRYTRRKNRICYLQEIFSNEMAKVDDSFFHRLEESFLVEEDKKHERHPIFGNIVDEVAYHEKYPTIYHLRKKLVDSTDKADLRLIYLALAHMIKFRGHFLIEGDLNPDNSDVDKLFIQLVQTYNQLFEENPINASGVDAKAILSARLSKSRRLENLIAQLPGEKKNGLFGNLIALSLGLTPNFKSNFDLAEDAKLQLSKDTYDDDLDNLLAQIGDQYADLFLAAKNLSDAILLSDILRVNTEITKAPLSASMIKRYDEHHQDLTLLKALVRQQLPEKYKEIFFDQSKNGYAGYIDGGASQEEFYKFIKPILEKMDGTEELLVKLNREDLLRKQRTFDNGSIPHQIHLGELHAILRRQEDFYPFLKDNREKIEKILTFRIPYYVGPLARGNSRFAWMTRKSEETITPWNFEEVVDKGASAQSFIERMTNFDKNLPNEKVLPKHSLLYEYFTVYNELTKVKYVTEGMRKPAFLSGEQKKAIVDLLFKTNRKVTVKQLKEDYFKKIECFDSVEISGVEDRFNASLGTYHDLLKIIKDKDFLDNEENEDILEDIVLTLTLFEDREMIEERLKTYAHLFDDKVMKQLKRRRYTGWGRLSRKLINGIRDKQSGKTILDFLKSDGFANRNFMQLIHDDSLTFKEDIQKAQVSGQGDSLHEHIANLAGSPAIKKGILQTVKVVDELVKVMGRHKPENIVIEMARENQTTQKGQKNSRERMKRIEEGIKELGSQILKEHPVENTQLQNEKLYLYYLQNGRDMYVDQELDINRLSDYDVDHIVPQSFLKDDSIDNKVLTRSDKARGKSDNVPSEEVVKKMKNYWRQLLNAKLITQRKFDNLTKAERGGLSELDKAGFIKRQLVETRQITKHVAQILDSRMNTKYDENDKLIREVKVITLKSKLVSDFRKDFQFYKVREINNYHHAHDAYLNAVVGTALIKKYPKLESEFVYGDYKVYDVRKMIAKSEQEIGKATAKYFFYSNIMNFFKTEITLANGEIRKRPLIETNGETGEIVWDKGRDFATVRKVLSMPQVNIVKKTEVQTGGFSKESILPKRNSDKLIARKKDWDPKKYGGFDSPTVAYSVLVVAKVEKGKSKKLKSVKELLGITIMERSSFEKNPIDFLEAKGYKEVKKDLIIKLPKYSLFELENGRKRMLASAGELQKGNELALPSKYVNFLYLASHYEKLKGSPEDNEQKQLFVEQHKHYLDEIIEQISEFSKRVILADANLDKVLSAYNKHRDKPIREQAENIIHLFTLTNLGAPAAFKYFDTTIDRKRYTSTKEVLDATLIHQSITGLYETRIDLSQLGGDGGGGGEAAAKGSSGGVPWLMKKPLQLTVLVPLHEYQERLLQQTALPKEQKELLQKLFLKYDALWQHWENQVGHRRIKPHNIATGTLAPRPQKQYPINPKAKPSIQIVIDDLLKQGVLIQQNSTMNTPVYPVPKPDGKWRMVLDYREVNKTIPLIAAQNQHSAGILSSIYRGKYKTTLDLTNGFWAHPITPESYWLTAFTWQGKQYCWTRLPQGFLNSPALFNADVVDLLKEIPNVQAYVDDIYISHDDPQEHLEQLEKIFSILLNAGYVVSLKKSEIAQREVEFLGFNITKEGRGLTDTFKQKLLNITPPKDLKQLQSILGKLNFARNFIPNYSELVKPLYTIVAPANGKFISWTEDNSNQLQHIISVLNQADNLEERNPETRLIIKVNSSPSAGYIRYYNEGSKRPIMYVNYIFSKAEAKFTQTEKLLTTMHKGLIKAMDLAMGQEILVYSPIVSMTKIQRTPLPERKALPVRWITWMTYLEDPRIQFHYDKSLPELQQIPNVTEDVIAKTKHPSEFAMVFYTDGSAIKHPDVNKSHSAGMGIAQVQFIPEYKIVHQWSIPLGDHTAQLAEIAAVEFACKKALKISGPVLIVTDSFYVAESANKELPYWKSNGFLNNKKKPLRHVSKWKSIAECLQLKPDIIIMHEKGHQQPMTTLHTEGNNLADKLATQGSYVVHAGKRTADGSEFEKRTADGSEFESPKKKAKVE

SEQ ID NO: 459 - protein, 2087 aa, synthetic construct
MPAAKRVKLDGGDKKYSIGLDIGTNSVGWAVITDEYKVPSKKFKVLGNTDRHSIKKNLIGALLFDSGETAEATRLKRTARRRYTRRKNRICYLQEIFSNEMAKVDDSFFHRLEESFLVEEDKKHERHPIFGNIVDEVAYHEKYPTIYHLRKKLVDSTDKADLRLIYLALAHMIKFRGHFLIEGDLNPDNSDVDKLFIQLVQTYNQLFEENPINASGVDAKAILSARLSKSRRLENLIAQLPGEKKNGLFGNLIALSLGLTPNFKSNFDLAEDAKLQLSKDTYDDDLDNLLAQIGDQYADLFLAAKNLSDAILLSDILRVNTEITKAPLSASMIKRYDEHHQDLTLLKALVRQQLPEKYKEIFFDQSKNGYAGYIDGGASQEEFYKFIKPILEKMDGTEELLVKLNREDLLRKQRTFDNGSIPHQIHLGELHAILRRQEDFYPFLKDNREKIEKILTFRIPYYVGPLARGNSRFAWMTRKSEETITPWNFEEVVDKGASAQSFIERMTNFDKNLPNEKVLPKHSLLYEYFTVYNELTKVKYVTEGMRKPAFLSGEQKKAIVDLLFKTNRKVTVKQLKEDYFKKIECFDSVEISGVEDRFNASLGTYHDLLKIIKDKDFLDNEENEDILEDIVLTLTLFEDREMIEERLKTYAHLFDDKVMKQLKRRRYTGWGRLSRKLINGIRDKQSGKTILDFLKSDGFANRNFMQLIHDDSLTFKEDIQKAQVSGQGDSLHEHIANLAGSPAIKKGILQTVKVVDELVKVMGRHKPENIVIEMARENQTTQKGQKNSRERMKRIEEGIKELGSQILKEHPVENTQLQNEKLYLYYLQNGRDMYVDQELDINRLSDYDVDHIVPQSFLKDDSIDNKVLTRSDKARGKSDNVPSEEVVKKMKNYWRQLLNAKLITQRKFDNLTKAERGGLSELDKAGFIKRQLVETRQITKHVAQILDSRMNTKYDENDKLIREVKVITLKSKLVSDFRKDFQFYKVREINNYHHAHDAYLNAVVGTALIKKYPKLESEFVYGDYKVYDVRKMIAKSEQEIGKATAKYFFYSNIMNFFKTEITLANGEIRKRPLIETNGETGEIVWDKGRDFATVRKVLSMPQVNIVKKTEVQTGGFSKESILPKRNSDKLIARKKDWDPKKYGGFDSPTVAYSVLVVAKVEKGKSKKLKSVKELLGITIMERSSFEKNPIDFLEAKGYKEVKKDLIIKLPKYSLFELENGRKRMLASAGELQKGNELALPSKYVNFLYLASHYEKLKGSPEDNEQKQLFVEQHKHYLDEIIEQISEFSKRVILADANLDKVLSAYNKHRDKPIREQAENIIHLFTLTNLGAPAAFKYFDTTIDRKRYTSTKEVLDATLIHQSITGLYETRIDLSQLGGDGGGGSGGGEAAAKGGVPWLMKKPLQLTVLVPLHEYQERLLQQTALPKEQKELLQKLFLKYDALWQHWENQVGHRRIKPHNIATGTLAPRPQKQYPINPKAKPSIQIVIDDLLKQGVLIQQNSTMNTPVYPVPKPDGKWRMVLDYREVNKTIPLIAAQNQHSAGILSSIYRGKYKTTLDLTNGFWAHPITPESYWLTAFTWQGKQYCWTRLPQGFLNSPALFNADVVDLLKEIPNVQAYVDDIYISHDDPQEHLEQLEKIFSILLNAGYVVSLKKSEIAQREVEFLGFNITKEGRGLTDTFKQKLLNITPPKDLKQLQSILGKLNFARNFIPNYSELVKPLYTIVAPANGKFISWTEDNSNQLQHIISVLNQADNLEERNPETRLIIKVNSSPSAGYIRYYNEGSKRPIMYVNYIFSKAEAKFTQTEKLLTTMHKGLIKAMDLAMGQEILVYSPIVSMTKIQRTPLPERKALPVRWITWMTYLEDPRIQFHYDKSLPELQQIPNVTEDVIAKTKHPSEFAMVFYTDGSAIKHPDVNKSHSAGMGIAQVQFIPEYKIVHQWSIPLGDHTAQLAEIAAVEFACKKALKISGPVLIVTDSFYVAESANKELPYWKSNGFLNNKKKPLRHVSKWKSIAECLQLKPDIIIMHEKGHQQPMTTLHTEGNNLADKLATQGSYVVHAGKRTADGSEFEKRTADGSEFESPKKKAKVE

SEQ ID NO: 460 - protein, 2185 aa, synthetic construct
MPAAKRVKLDGGDKKYSIGLDIGTNSVGWAVITDEYKVPSKKFKVLGNTDRHSIKKNLIGALLFDSGETAEATRLKRTARRRYTRRKNRICYLQEIFSNEMAKVDDSFFHRLEESFLVEEDKKHERHPIFGNIVDEVAYHEKYPTIYHLRKKLVDSTDKADLRLIYLALAHMIKFRGHFLIEGDLNPDNSDVDKLFIQLVQTYNQLFEENPINASGVDAKAILSARLSKSRRLENLIAQLPGEKKNGLFGNLIALSLGLTPNFKSNFDLAEDAKLQLSKDTYDDDLDNLLAQIGDQYADLFLAAKNLSDAILLSDILRVNTEITKAPLSASMIKRYDEHHQDLTLLKALVRQQLPEKYKEIFFDQSKNGYAGYIDGGASQEEFYKFIKPILEKMDGTEELLVKLNREDLLRKQRTFDNGSIPHQIHLGELHAILRRQEDFYPFLKDNREKIEKILTFRIPYYVGPLARGNSRFAWMTRKSEETITPWNFEEVVDKGASAQSFIERMTNFDKNLPNEKVLPKHSLLYEYFTVYNELTKVKYVTEGMRKPAFLSGEQKKAIVDLLFKTNRKVTVKQLKEDYFKKIECFDSVEISGVEDRFNASLGTYHDLLKIIKDKDFLDNEENEDILEDIVLTLTLFEDREMIEERLKTYAHLFDDKVMKQLKRRRYTGWGRLSRKLINGIRDKQSGKTILDFLKSDGFANRNFMQLIHDDSLTFKEDIQKAQVSGQGDSLHEHIANLAGSPAIKKGILQTVKVVDELVKVMGRHKPENIVIEMARENQTTQKGQKNSRERMKRIEEGIKELGSQILKEHPVENTQLQNEKLYLYYLQNGRDMYVDQELDINRLSDYDVDHIVPQSFLKDDSIDNKVLTRSDKARGKSDNVPSEEVVKKMKNYWRQLLNAKLITQRKFDNLTKAERGGLSELDKAGFIKRQLVETRQITKHVAQILDSRMNTKYDENDKLIREVKVITLKSKLVSDFRKDFQFYKVREINNYHHAHDAYLNAVVGTALIKKYPKLESEFVYGDYKVYDVRKMIAKSEQEIGKATAKYFFYSNIMNFFKTEITLANGEIRKRPLIETNGETGEIVWDKGRDFATVRKVLSMPQVNIVKKTEVQTGGFSKESILPKRNSDKLIARKKDWDPKKYGGFDSPTVAYSVLVVAKVEKGKSKKLKSVKELLGITIMERSSFEKNPIDFLEAKGYKEVKKDLIIKLPKYSLFELENGRKRMLASAGELQKGNELALPSKYVNFLYLASHYEKLKGSPEDNEQKQLFVEQHKHYLDEIIEQISEFSKRVILADANLDKVLSAYNKHRDKPIREQAENIIHLFTLTNLGAPAAFKYFDTTIDRKRYTSTKEVLDATLIHQSITGLYETRIDLSQLGGDGGGGGGSGGGGSGGGGSGGGGSGGMDPLQLLQPLEAEIKGTKLKAHWNSGATITCVPEAFLEDERPIQTMLIKTIHGEKQQDVYYLTFKVQGRKVEAEVLASPYDYILLNPSDVPWLMKKPLQLTVLVPLHEYQERLLQQTALPKEQKELLQKLFLKYDALWQHWENQVGHRRIKPHNIATGTLAPRPQKQYPINPKAKPSIQIVIDDLLKQGVLIQQNSTMNTPVYPVPKPDGKWRMVLDYREVNKTIPLIAAQNQHSAGILSSIYRGKYKTTLDLTNGFWAHPITPESYWLTAFTWQGKQYCWTRLPQGFLNSPALFNADVVDLLKEIPNVQAYVDDIYISHDDPQEHLEQLEKIFSILLNAGYVVSLKKSEIAQREVEFLGFNITKEGRGLTDTFKQKLLNITPPKDLKQLQSILGLLNFARNFIPNYSELVKPLYTIVAPANGKFISWTEDNSNQLQHIISVLNQADNLEERNPETRLIIKVNSSPSAGYIRYYNEGSKRPIMYVNYIFSKAEAKFTQTEKLLTTMHKGLIKAMDLAMGQEILVYSPIVSMTKIQRTPLPERKALPVRWITWMTYLEDPRIQFHYDKSLPELQQIPNVTEDVIAKTKHPSEFAMVFYTDGSAIKHPDVNKSHSAGMGIAQVQFIPEYKIVHQWSIPLGDHTAQLAEIAAVEFACKKALKISGPVLIVTDSFYVAESANKELPYWKSNGFLNNKKKPLRHVSKWKSIAECLQLKPDIIIMHEKGHQQPMTTLHTEGNNLADKLATQGSYVVHAGKRTADGSEFEKRTADGSEFESPKKKAKVE

SEQ ID NO: 461 - protein, 2180 aa, synthetic construct
MPAAKRVKLDGGDKKYSIGLDIGTNSVGWAVITDEYKVPSKKFKVLGNTDRHSIKKNLIGALLFDSGETAEATRLKRTARRRYTRRKNRICYLQEIFSNEMAKVDDSFFHRLEESFLVEEDKKHERHPIFGNIVDEVAYHEKYPTIYHLRKKLVDSTDKADLRLIYLALAHMIKFRGHFLIEGDLNPDNSDVDKLFIQLVQTYNQLFEENPINASGVDAKAILSARLSKSRRLENLIAQLPGEKKNGLFGNLIALSLGLTPNFKSNFDLAEDAKLQLSKDTYDDDLDNLLAQIGDQYADLFLAAKNLSDAILLSDILRVNTEITKAPLSASMIKRYDEHHQDLTLLKALVRQQLPEKYKEIFFDQSKNGYAGYIDGGASQEEFYKFIKPILEKMDGTEELLVKLNREDLLRKQRTFDNGSIPHQIHLGELHAILRRQEDFYPFLKDNREKIEKILTFRIPYYVGPLARGNSRFAWMTRKSEETITPWNFEEVVDKGASAQSFIERMTNFDKNLPNEKVLPKHSLLYEYFTVYNELTKVKYVTEGMRKPAFLSGEQKKAIVDLLFKTNRKVTVKQLKEDYFKKIECFDSVEISGVEDRFNASLGTYHDLLKIIKDKDFLDNEENEDILEDIVLTLTLFEDREMIEERLKTYAHLFDDKVMKQLKRRRYTGWGRLSRKLINGIRDKQSGKTILDFLKSDGFANRNFMQLIHDDSLTFKEDIQKAQVSGQGDSLHEHIANLAGSPAIKKGILQTVKVVDELVKVMGRHKPENIVIEMARENQTTQKGQKNSRERMKRIEEGIKELGSQILKEHPVENTQLQNEKLYLYYLQNGRDMYVDQELDINRLSDYDVDHIVPQSFLKDDSIDNKVLTRSDKARGKSDNVPSEEVVKKMKNYWRQLLNAKLITQRKFDNLTKAERGGLSELDKAGFIKRQLVETRQITKHVAQILDSRMNTKYDENDKLIREVKVITLKSKLVSDFRKDFQFYKVREINNYHHAHDAYLNAVVGTALIKKYPKLESEFVYGDYKVYDVRKMIAKSEQEIGKATAKYFFYSNIMNFFKTEITLANGEIRKRPLIETNGETGEIVWDKGRDFATVRKVLSMPQVNIVKKTEVQTGGFSKESILPKRNSDKLIARKKDWDPKKYGGFDSPTVAYSVLVVAKVEKGKSKKLKSVKELLGITIMERSSFEKNPIDFLEAKGYKEVKKDLIIKLPKYSLFELENGRKRMLASAGELQKGNELALPSKYVNFLYLASHYEKLKGSPEDNEQKQLFVEQHKHYLDEIIEQISEFSKRVILADANLDKVLSAYNKHRDKPIREQAENIIHLFTLTNLGAPAAFKYFDTTIDRKRYTSTKEVLDATLIHQSITGLYETRIDLSQLGGDGGGSSGSSGSSGSSGSSGGMDPLQLLQPLEAEIKGTKLKAHWNSGATITCVPEAFLEDERPIQTMLIKTIHGEKQQDVYYLTFKVQGRKVEAEVLASPYDYILLNPSDVPWLMKKPLQLTVLVPLHEYQERLLQQTALPKEQKELLQKLFLKYDALWQHWENQVGHRRIKPHNIATGTLAPRPQKQYPINPKAKPSIQIVIDDLLKQGVLIQQNSTMNTPVYPVPKPDGKWRMVLDYREVNKTIPLIAAQNQHSAGILSSIYRGKYKTTLDLTNGFWAHPITPESYWLTAFTWQGKQYCWTRLPQGFLNSPALFNADVVDLLKEIPNVQAYVDDIYISHDDPQEHLEQLEKIFSILLNAGYVVSLKKSEIAQREVEFLGFNITKEGRGLTDTFKQKLLNITPPKDLKQLQSILGLLNFARNFIPNYSELVKPLYTIVAPANGKFISWTEDNSNQLQHIISVLNQADNLEERNPETRLIIKVNSSPSAGYIRYYNEGSKRPIMYVNYIFSKAEAKFTQTEKLLTTMHKGLIKAMDLAMGQEILVYSPIVSMTKIQRTPLPERKALPVRWITWMTYLEDPRIQFHYDKSLPELQQIPNVTEDVIAKTKHPSEFAMVFYTDGSAIKHPDVNKSHSAGMGIAQVQFIPEYKIVHQWSIPLGDHTAQLAEIAAVEFACKKALKISGPVLIVTDSFYVAESANKELPYWKSNGFLNNKKKPLRHVSKWKSIAECLQLKPDIIIMHEKGHQQPMTTLHTEGNNLADKLATQGSYVVHAGKRTADGSEFEKRTADGSEFESPKKKAKVE

SEQ ID NO: 462 - protein, 2176 aa, synthetic construct
MPAAKRVKLDGGDKKYSIGLDIGTNSVGWAVITDEYKVPSKKFKVLGNTDRHSIKKNLIGALLFDSGETAEATRLKRTARRRYTRRKNRICYLQEIFSNEMAKVDDSFFHRLEESFLVEEDKKHERHPIFGNIVDEVAYHEKYPTIYHLRKKLVDSTDKADLRLIYLALAHMIKFRGHFLIEGDLNPDNSDVDKLFIQLVQTYNQLFEENPINASGVDAKAILSARLSKSRRLENLIAQLPGEKKNGLFGNLIALSLGLTPNFKSNFDLAEDAKLQLSKDTYDDDLDNLLAQIGDQYADLFLAAKNLSDAILLSDILRVNTEITKAPLSASMIKRYDEHHQDLTLLKALVRQQLPEKYKEIFFDQSKNGYAGYIDGGASQEEFYKFIKPILEKMDGTEELLVKLNREDLLRKQRTFDNGSIPHQIHLGELHAILRRQEDFYPFLKDNREKIEKILTFRIPYYVGPLARGNSRFAWMTRKSEETITPWNFEEVVDKGASAQSFIERMTNFDKNLPNEKVLPKHSLLYEYFTVYNELTKVKYVTEGMRKPAFLSGEQKKAIVDLLFKTNRKVTVKQLKEDYFKKIECFDSVEISGVEDRFNASLGTYHDLLKIIKDKDFLDNEENEDILEDIVLTLTLFEDREMIEERLKTYAHLFDDKVMKQLKRRRYTGWGRLSRKLINGIRDKQSGKTILDFLKSDGFANRNFMQLIHDDSLTFKEDIQKAQVSGQGDSLHEHIANLAGSPAIKKGILQTVKVVDELVKVMGRHKPENIVIEMARENQTTQKGQKNSRERMKRIEEGIKELGSQILKEHPVENTQLQNEKLYLYYLQNGRDMYVDQELDINRLSDYDVDHIVPQSFLKDDSIDNKVLTRSDKARGKSDNVPSEEVVKKMKNYWRQLLNAKLITQRKFDNLTKAERGGLSELDKAGFIKRQLVETRQITKHVAQILDSRMNTKYDENDKLIREVKVITLKSKLVSDFRKDFQFYKVREINNYHHAHDAYLNAVVGTALIKKYPKLESEFVYGDYKVYDVRKMIAKSEQEIGKATAKYFFYSNIMNFFKTEITLANGEIRKRPLIETNGETGEIVWDKGRDFATVRKVLSMPQVNIVKKTEVQTGGFSKESILPKRNSDKLIARKKDWDPKKYGGFDSPTVAYSVLVVAKVEKGKSKKLKSVKELLGITIMERSSFEKNPIDFLEAKGYKEVKKDLIIKLPKYSLFELENGRKRMLASAGELQKGNELALPSKYVNFLYLASHYEKLKGSPEDNEQKQLFVEQHKHYLDEIIEQISEFSKRVILADANLDKVLSAYNKHRDKPIREQAENIIHLFTLTNLGAPAAFKYFDTTIDRKRYTSTKEVLDATLIHQSITGLYETRIDLSQLGGDGGGGGEAAAKGSSGGMDPLQLLQPLEAEIKGTKLKAHWNSGATITCVPEAFLEDERPIQTMLIKTIHGEKQQDVYYLTFKVQGRKVEAEVLASPYDYILLNPSDVPWLMKKPLQLTVLVPLHEYQERLLQQTALPKEQKELLQKLFLKYDALWQHWENQVGHRRIKPHNIATGTLAPRPQKQYPINPKAKPSIQIVIDDLLKQGVLIQQNSTMNTPVYPVPKPDGKWRMVLDYREVNKTIPLIAAQNQHSAGILSSIYRGKYKTTLDLTNGFWAHPITPESYWLTAFTWQGKQYCWTRLPQGFLNSPALFNADVVDLLKEIPNVQAYVDDIYISHDDPQEHLEQLEKIFSILLNAGYVVSLKKSEIAQREVEFLGFNITKEGRGLTDTFKQKLLNITPPKDLKQLQSILGLLNFARNFIPNYSELVKPLYTIVAPANGKFISWTEDNSNQLQHIISVLNQADNLEERNPETRLIIKVNSSPSAGYIRYYNEGSKRPIMYVNYIFSKAEAKFTQTEKLLTTMHKGLIKAMDLAMGQEILVYSPIVSMTKIQRTPLPERKALPVRWITWMTYLEDPRIQFHYDKSLPELQQIPNVTEDVIAKTKHPSEFAMVFYTDGSAIKHPDVNKSHSAGMGIAQVQFIPEYKIVHQWSIPLGDHTAQLAEIAAVEFACKKALKISGPVLIVTDSFYVAESANKELPYWKSNGFLNNKKKPLRHVSKWKSIAECLQLKPDIIIMHEKGHQQPMTTLHTEGNNLADKLATQGSYVVHAGKRTADGSEFEKRTADGSEFESPKKKAKVE

SEQ ID NO: 463 - protein, 2176 aa, synthetic construct
MPAAKRVKLDGGDKKYSIGLDIGTNSVGWAVITDEYKVPSKKFKVLGNTDRHSIKKNLIGALLFDSGETAEATRLKRTARRRYTRRKNRICYLQEIFSNEMAKVDDSFFHRLEESFLVEEDKKHERHPIFGNIVDEVAYHEKYPTIYHLRKKLVDSTDKADLRLIYLALAHMIKFRGHFLIEGDLNPDNSDVDKLFIQLVQTYNQLFEENPINASGVDAKAILSARLSKSRRLENLIAQLPGEKKNGLFGNLIALSLGLTPNFKSNFDLAEDAKLQLSKDTYDDDLDNLLAQIGDQYADLFLAAKNLSDAILLSDILRVNTEITKAPLSASMIKRYDEHHQDLTLLKALVRQQLPEKYKEIFFDQSKNGYAGYIDGGASQEEFYKFIKPILEKMDGTEELLVKLNREDLLRKQRTFDNGSIPHQIHLGELHAILRRQEDFYPFLKDNREKIEKILTFRIPYYVGPLARGNSRFAWMTRKSEETITPWNFEEVVDKGASAQSFIERMTNFDKNLPNEKVLPKHSLLYEYFTVYNELTKVKYVTEGMRKPAFLSGEQKKAIVDLLFKTNRKVTVKQLKEDYFKKIECFDSVEISGVEDRFNASLGTYHDLLKIIKDKDFLDNEENEDILEDIVLTLTLFEDREMIEERLKTYAHLFDDKVMKQLKRRRYTGWGRLSRKLINGIRDKQSGKTILDFLKSDGFANRNFMQLIHDDSLTFKEDIQKAQVSGQGDSLHEHIANLAGSPAIKKGILQTVKVVDELVKVMGRHKPENIVIEMARENQTTQKGQKNSRERMKRIEEGIKELGSQILKEHPVENTQLQNEKLYLYYLQNGRDMYVDQELDINRLSDYDVDHIVPQSFLKDDSIDNKVLTRSDKARGKSDNVPSEEVVKKMKNYWRQLLNAKLITQRKFDNLTKAERGGLSELDKAGFIKRQLVETRQITKHVAQILDSRMNTKYDENDKLIREVKVITLKSKLVSDFRKDFQFYKVREINNYHHAHDAYLNAVVGTALIKKYPKLESEFVYGDYKVYDVRKMIAKSEQEIGKATAKYFFYSNIMNFFKTEITLANGEIRKRPLIETNGETGEIVWDKGRDFATVRKVLSMPQVNIVKKTEVQTGGFSKESILPKRNSDKLIARKKDWDPKKYGGFDSPTVAYSVLVVAKVEKGKSKKLKSVKELLGITIMERSSFEKNPIDFLEAKGYKEVKKDLIIKLPKYSLFELENGRKRMLASAGELQKGNELALPSKYVNFLYLASHYEKLKGSPEDNEQKQLFVEQHKHYLDEIIEQISEFSKRVILADANLDKVLSAYNKHRDKPIREQAENIIHLFTLTNLGAPAAFKYFDTTIDRKRYTSTKEVLDATLIHQSITGLYETRIDLSQLGGDGGGGGEAAAKPAPGGMDPLQLLQPLEAEIKGTKLKAHWNSGATITCVPEAFLEDERPIQTMLIKTIHGEKQQDVYYLTFKVQGRKVEAEVLASPYDYILLNPSDVPWLMKKPLQLTVLVPLHEYQERLLQQTALPKEQKELLQKLFLKYDALWQHWENQVGHRRIKPHNIATGTLAPRPQKQYPINPKAKPSIQIVIDDLLKQGVLIQQNSTMNTPVYPVPKPDGKWRMVLDYREVNKTIPLIAAQNQHSAGILSSIYRGKYKTTLDLTNGFWAHPITPESYWLTAFTWQGKQYCWTRLPQGFLNSPALFNADVVDLLKEIPNVQAYVDDIYISHDDPQEHLEQLEKIFSILLNAGYVVSLKKSEIAQREVEFLGFNITKEGRGLTDTFKQKLLNITPPKDLKQLQSILGLLNFARNFIPNYSELVKPLYTIVAPANGKFISWTEDNSNQLQHIISVLNQADNLEERNPETRLIIKVNSSPSAGYIRYYNEGSKRPIMYVNYIFSKAEAKFTQTEKLLTTMHKGLIKAMDLAMGQEILVYSPIVSMTKIQRTPLPERKALPVRWITWMTYLEDPRIQFHYDKSLPELQQIPNVTEDVIAKTKHPSEFAMVFYTDGSAIKHPDVNKSHSAGMGIAQVQFIPEYKIVHQWSIPLGDHTAQLAEIAAVEFACKKALKISGPVLIVTDSFYVAESANKELPYWKSNGFLNNKKKPLRHVSKWKSIAECLQLKPDIIIMHEKGHQQPMTTLHTEGNNLADKLATQGSYVVHAGKRTADGSEFEKRTADGSEFESPKKKAKVE

SEQ ID NO: 464 - protein, 2176 aa, synthetic construct
MPAAKRVKLDGGDKKYSIGLDIGTNSVGWAVITDEYKVPSKKFKVLGNTDRHSIKKNLIGALLFDSGETAEATRLKRTARRRYTRRKNRICYLQEIFSNEMAKVDDSFFHRLEESFLVEEDKKHERHPIFGNIVDEVAYHEKYPTIYHLRKKLVDSTDKADLRLIYLALAHMIKFRGHFLIEGDLNPDNSDVDKLFIQLVQTYNQLFEENPINASGVDAKAILSARLSKSRRLENLIAQLPGEKKNGLFGNLIALSLGLTPNFKSNFDLAEDAKLQLSKDTYDDDLDNLLAQIGDQYADLFLAAKNLSDAILLSDILRVNTEITKAPLSASMIKRYDEHHQDLTLLKALVRQQLPEKYKEIFFDQSKNGYAGYIDGGASQEEFYKFIKPILEKMDGTEELLVKLNREDLLRKQRTFDNGSIPHQIHLGELHAILRRQEDFYPFLKDNREKIEKILTFRIPYYVGPLARGNSRFAWMTRKSEETITPWNFEEVVDKGASAQSFIERMTNFDKNLPNEKVLPKHSLLYEYFTVYNELTKVKYVTEGMRKPAFLSGEQKKAIVDLLFKTNRKVTVKQLKEDYFKKIECFDSVEISGVEDRFNASLGTYHDLLKIIKDKDFLDNEENEDILEDIVLTLTLFEDREMIEERLKTYAHLFDDKVMKQLKRRRYTGWGRLSRKLINGIRDKQSGKTILDFLKSDGFANRNFMQLIHDDSLTFKEDIQKAQVSGQGDSLHEHIANLAGSPAIKKGILQTVKVVDELVKVMGRHKPENIVIEMARENQTTQKGQKNSRERMKRIEEGIKELGSQILKEHPVENTQLQNEKLYLYYLQNGRDMYVDQELDINRLSDYDVDHIVPQSFLKDDSIDNKVLTRSDKARGKSDNVPSEEVVKKMKNYWRQLLNAKLITQRKFDNLTKAERGGLSELDKAGFIKRQLVETRQITKHVAQILDSRMNTKYDENDKLIREVKVITLKSKLVSDFRKDFQFYKVREINNYHHAHDAYLNAVVGTALIKKYPKLESEFVYGDYKVYDVRKMIAKSEQEIGKATAKYFFYSNIMNFFKTEITLANGEIRKRPLIETNGETGEIVWDKGRDFATVRKVLSMPQVNIVKKTEVQTGGFSKESILPKRNSDKLIARKKDWDPKKYGGFDSPTVAYSVLVVAKVEKGKSKKLKSVKELLGITIMERSSFEKNPIDFLEAKGYKEVKKDLIIKLPKYSLFELENGRKRMLASAGELQKGNELALPSKYVNFLYLASHYEKLKGSPEDNEQKQLFVEQHKHYLDEIIEQISEFSKRVILADANLDKVLSAYNKHRDKPIREQAENIIHLFTLTNLGAPAAFKYFDTTIDRKRYTSTKEVLDATLIHQSITGLYETRIDLSQLGGDGGGGSEAAAKPAPGGMDPLQLLQPLEAEIKGTKLKAHWNSGATITCVPEAFLEDERPIQTMLIKTIHGEKQQDVYYLTFKVQGRKVEAEVLASPYDYILLNPSDVPWLMKKPLQLTVLVPLHEYQERLLQQTALPKEQKELLQKLFLKYDALWQHWENQVGHRRIKPHNIATGTLAPRPQKQYPINPKAKPSIQIVIDDLLKQGVLIQQNSTMNTPVYPVPKPDGKWRMVLDYREVNKTIPLIAAQNQHSAGILSSIYRGKYKTTLDLTNGFWAHPITPESYWLTAFTWQGKQYCWTRLPQGFLNSPALFNADVVDLLKEIPNVQAYVDDIYISHDDPQEHLEQLEKIFSILLNAGYVVSLKKSEIAQREVEFLGFNITKEGRGLTDTFKQKLLNITPPKDLKQLQSILGLLNFARNFIPNYSELVKPLYTIVAPANGKFISWTEDNSNQLQHIISVLNQADNLEERNPETRLIIKVNSSPSAGYIRYYNEGSKRPIMYVNYIFSKAEAKFTQTEKLLTTMHKGLIKAMDLAMGQEILVYSPIVSMTKIQRTPLPERKALPVRWITWMTYLEDPRIQFHYDKSLPELQQIPNVTEDVIAKTKHPSEFAMVFYTDGSAIKHPDVNKSHSAGMGIAQVQFIPEYKIVHQWSIPLGDHTAQLAEIAAVEFACKKALKISGPVLIVTDSFYVAESANKELPYWKSNGFLNNKKKPLRHVSKWKSIAECLQLKPDIIIMHEKGHQQPMTTLHTEGNNLADKLATQGSYVVHAGKRTADGSEFEKRTADGSEFESPKKKAKVE

SEQ ID NO: 465 - protein, 2170 aa, synthetic construct
MPAAKRVKLDGGDKKYSIGLDIGTNSVGWAVITDEYKVPSKKFKVLGNTDRHSIKKNLIGALLFDSGETAEATRLKRTARRRYTRRKNRICYLQEIFSNEMAKVDDSFFHRLEESFLVEEDKKHERHPIFGNIVDEVAYHEKYPTIYHLRKKLVDSTDKADLRLIYLALAHMIKFRGHFLIEGDLNPDNSDVDKLFIQLVQTYNQLFEENPINASGVDAKAILSARLSKSRRLENLIAQLPGEKKNGLFGNLIALSLGLTPNFKSNFDLAEDAKLQLSKDTYDDDLDNLLAQIGDQYADLFLAAKNLSDAILLSDILRVNTEITKAPLSASMIKRYDEHHQDLTLLKALVRQQLPEKYKEIFFDQSKNGYAGYIDGGASQEEFYKFIKPILEKMDGTEELLVKLNREDLLRKQRTFDNGSIPHQIHLGELHAILRRQEDFYPFLKDNREKIEKILTFRIPYYVGPLARGNSRFAWMTRKSEETITPWNFEEVVDKGASAQSFIERMTNFDKNLPNEKVLPKHSLLYEYFTVYNELTKVKYVTEGMRKPAFLSGEQKKAIVDLLFKTNRKVTVKQLKEDYFKKIECFDSVEISGVEDRFNASLGTYHDLLKIIKDKDFLDNEENEDILEDIVLTLTLFEDREMIEERLKTYAHLFDDKVMKQLKRRRYTGWGRLSRKLINGIRDKQSGKTILDFLKSDGFANRNFMQLIHDDSLTFKEDIQKAQVSGQGDSLHEHIANLAGSPAIKKGILQTVKVVDELVKVMGRHKPENIVIEMARENQTTQKGQKNSRERMKRIEEGIKELGSQILKEHPVENTQLQNEKLYLYYLQNGRDMYVDQELDINRLSDYDVDHIVPQSFLKDDSIDNKVLTRSDKARGKSDNVPSEEVVKKMKNYWRQLLNAKLITQRKFDNLTKAERGGLSELDKAGFIKRQLVETRQITKHVAQILDSRMNTKYDENDKLIREVKVITLKSKLVSDFRKDFQFYKVREINNYHHAHDAYLNAVVGTALIKKYPKLESEFVYGDYKVYDVRKMIAKSEQEIGKATAKYFFYSNIMNFFKTEITLANGEIRKRPLIETNGETGEIVWDKGRDFATVRKVLSMPQVNIVKKTEVQTGGFSKESILPKRNSDKLIARKKDWDPKKYGGFDSPTVAYSVLVVAKVEKGKSKKLKSVKELLGITIMERSSFEKNPIDFLEAKGYKEVKKDLIIKLPKYSLFELENGRKRMLASAGELQKGNELALPSKYVNFLYLASHYEKLKGSPEDNEQKQLFVEQHKHYLDEIIEQISEFSKRVILADANLDKVLSAYNKHRDKPIREQAENIIHLFTLTNLGAPAAFKYFDTTIDRKRYTSTKEVLDATLIHQSITGLYETRIDLSQLGGDGGEAAAKGGMDPLQLLQPLEAEIKGTKLKAHWNSGATITCVPEAFLEDERPIQTMLIKTIHGEKQQDVYYLTFKVQGRKVEAEVLASPYDYILLNPSDVPWLMKKPLQLTVLVPLHEYQERLLQQTALPKEQKELLQKLFLKYDALWQHWENQVGHRRIKPHNIATGTLAPRPQKQYPINPKAKPSIQIVIDDLLKQGVLIQQNSTMNTPVYPVPKPDGKWRMVLDYREVNKTIPLIAAQNQHSAGILSSIYRGKYKTTLDLTNGFWAHPITPESYWLTAFTWQGKQYCWTRLPQGFLNSPALFNADVVDLLKEIPNVQAYVDDIYISHDDPQEHLEQLEKIFSILLNAGYVVSLKKSEIAQREVEFLGFNITKEGRGLTDTFKQKLLNITPPKDLKQLQSILGLLNFARNFIPNYSELVKPLYTIVAPANGKFISWTEDNSNQLQHIISVLNQADNLEERNPETRLIIKVNSSPSAGYIRYYNEGSKRPIMYVNYIFSKAEAKFTQTEKLLTTMHKGLIKAMDLAMGQEILVYSPIVSMTKIQRTPLPERKALPVRWITWMTYLEDPRIQFHYDKSLPELQQIPNVTEDVIAKTKHPSEFAMVFYTDGSAIKHPDVNKSHSAGMGIAQVQFIPEYKIVHQWSIPLGDHTAQLAEIAAVEFACKKALKISGPVLIVTDSFYVAESANKELPYWKSNGFLNNKKKPLRHVSKWKSIAECLQLKPDIIIMHEKGHQQPMTTLHTEGNNLADKLATQGSYVVHAGKRTADGSEFEKRTADGSEFESPKKKAKVE

SEQ ID NO: 466 - protein, 2176 aa, synthetic construct
MPAAKRVKLDGGDKKYSIGLDIGTNSVGWAVITDEYKVPSKKFKVLGNTDRHSIKKNLIGALLFDSGETAEATRLKRTARRRYTRRKNRICYLQEIFSNEMAKVDDSFFHRLEESFLVEEDKKHERHPIFGNIVDEVAYHEKYPTIYHLRKKLVDSTDKADLRLIYLALAHMIKFRGHFLIEGDLNPDNSDVDKLFIQLVQTYNQLFEENPINASGVDAKAILSARLSKSRRLENLIAQLPGEKKNGLFGNLIALSLGLTPNFKSNFDLAEDAKLQLSKDTYDDDLDNLLAQIGDQYADLFLAAKNLSDAILLSDILRVNTEITKAPLSASMIKRYDEHHQDLTLLKALVRQQLPEKYKEIFFDQSKNGYAGYIDGGASQEEFYKFIKPILEKMDGTEELLVKLNREDLLRKQRTFDNGSIPHQIHLGELHAILRRQEDFYPFLKDNREKIEKILTFRIPYYVGPLARGNSRFAWMTRKSEETITPWNFEEVVDKGASAQSFIERMTNFDKNLPNEKVLPKHSLLYEYFTVYNELTKVKYVTEGMRKPAFLSGEQKKAIVDLLFKTNRKVTVKQLKEDYFKKIECFDSVEISGVEDRFNASLGTYHDLLKIIKDKDFLDNEENEDILEDIVLTLTLFEDREMIEERLKTYAHLFDDKVMKQLKRRRYTGWGRLSRKLINGIRDKQSGKTILDFLKSDGFANRNFMQLIHDDSLTFKEDIQKAQVSGQGDSLHEHIANLAGSPAIKKGILQTVKVVDELVKVMGRHKPENIVIEMARENQTTQKGQKNSRERMKRIEEGIKELGSQILKEHPVENTQLQNEKLYLYYLQNGRDMYVDQELDINRLSDYDVDHIVPQSFLKDDSIDNKVLTRSDKARGKSDNVPSEEVVKKMKNYWRQLLNAKLITQRKFDNLTKAERGGLSELDKAGFIKRQLVETRQITKHVAQILDSRMNTKYDENDKLIREVKVITLKSKLVSDFRKDFQFYKVREINNYHHAHDAYLNAVVGTALIKKYPKLESEFVYGDYKVYDVRKMIAKSEQEIGKATAKYFFYSNIMNFFKTEITLANGEIRKRPLIETNGETGEIVWDKGRDFATVRKVLSMPQVNIVKKTEVQTGGFSKESILPKRNSDKLIARKKDWDPKKYGGFDSPTVAYSVLVVAKVEKGKSKKLKSVKELLGITIMERSSFEKNPIDFLEAKGYKEVKKDLIIKLPKYSLFELENGRKRMLASAGELQKGNELALPSKYVNFLYLASHYEKLKGSPEDNEQKQLFVEQHKHYLDEIIEQISEFSKRVILADANLDKVLSAYNKHRDKPIREQAENIIHLFTLTNLGAPAAFKYFDTTIDRKRYTSTKEVLDATLIHQSITGLYETRIDLSQLGGDGGGGSGSSEAAAKGGMDPLQLLQPLEAEIKGTKLKAHWNSGATITCVPEAFLEDERPIQTMLIKTIHGEKQQDVYYLTFKVQGRKVEAEVLASPYDYILLNPSDVPWLMKKPLQLTVLVPLHEYQERLLQQTALPKEQKELLQKLFLKYDALWQHWENQVGHRRIKPHNIATGTLAPRPQKQYPINPKAKPSIQIVIDDLLKQGVLIQQNSTMNTPVYPVPKPDGKWRMVLDYREVNKTIPLIAAQNQHSAGILSSIYRGKYKTTLDLTNGFWAHPITPESYWLTAFTWQGKQYCWTRLPQGFLNSPALFNADVVDLLKEIPNVQAYVDDIYISHDDPQEHLEQLEKIFSILLNAGYVVSLKKSEIAQREVEFLGFNITKEGRGLTDTFKQKLLNITPPKDLKQLQSILGLLNFARNFIPNYSELVKPLYTIVAPANGKFISWTEDNSNQLQHIISVLNQADNLEERNPETRLIIKVNSSPSAGYIRYYNEGSKRPIMYVNYIFSKAEAKFTQTEKLLTTMHKGLIKAMDLAMGQEILVYSPIVSMTKIQRTPLPERKALPVRWITWMTYLEDPRIQFHYDKSLPELQQIPNVTEDVIAKTKHPSEFAMVFYTDGSAIKHPDVNKSHSAGMGIAQVQFIPEYKIVHQWSIPLGDHTAQLAEIAAVEFACKKALKISGPVLIVTDSFYVAESANKELPYWKSNGFLNNKKKPLRHVSKWKSIAECLQLKPDIIIMHEKGHQQPMTTLHTEGNNLADKLATQGSYVVHAGKRTADGSEFEKRTADGSEFESPKKKAKVE

SEQ ID NO: 467 - protein, 2177 aa, synthetic construct
MPAAKRVKLDGGDKKYSIGLDIGTNSVGWAVITDEYKVPSKKFKVLGNTDRHSIKKNLIGALLFDSGETAEATRLKRTARRRYTRRKNRICYLQEIFSNEMAKVDDSFFHRLEESFLVEEDKKHERHPIFGNIVDEVAYHEKYPTIYHLRKKLVDSTDKADLRLIYLALAHMIKFRGHFLIEGDLNPDNSDVDKLFIQLVQTYNQLFEENPINASGVDAKAILSARLSKSRRLENLIAQLPGEKKNGLFGNLIALSLGLTPNFKSNFDLAEDAKLQLSKDTYDDDLDNLLAQIGDQYADLFLAAKNLSDAILLSDILRVNTEITKAPLSASMIKRYDEHHQDLTLLKALVRQQLPEKYKEIFFDQSKNGYAGYIDGGASQEEFYKFIKPILEKMDGTEELLVKLNREDLLRKQRTFDNGSIPHQIHLGELHAILRRQEDFYPFLKDNREKIEKILTFRIPYYVGPLARGNSRFAWMTRKSEETITPWNFEEVVDKGASAQSFIERMTNFDKNLPNEKVLPKHSLLYEYFTVYNELTKVKYVTEGMRKPAFLSGEQKKAIVDLLFKTNRKVTVKQLKEDYFKKIECFDSVEISGVEDRFNASLGTYHDLLKIIKDKDFLDNEENEDILEDIVLTLTLFEDREMIEERLKTYAHLFDDKVMKQLKRRRYTGWGRLSRKLINGIRDKQSGKTILDFLKSDGFANRNFMQLIHDDSLTFKEDIQKAQVSGQGDSLHEHIANLAGSPAIKKGILQTVKVVDELVKVMGRHKPENIVIEMARENQTTQKGQKNSRERMKRIEEGIKELGSQILKEHPVENTQLQNEKLYLYYLQNGRDMYVDQELDINRLSDYDVDHIVPQSFLKDDSIDNKVLTRSDKARGKSDNVPSEEVVKKMKNYWRQLLNAKLITQRKFDNLTKAERGGLSELDKAGFIKRQLVETRQITKHVAQILDSRMNTKYDENDKLIREVKVITLKSKLVSDFRKDFQFYKVREINNYHHAHDAYLNAVVGTALIKKYPKLESEFVYGDYKVYDVRKMIAKSEQEIGKATAKYFFYSNIMNFFKTEITLANGEIRKRPLIETNGETGEIVWDKGRDFATVRKVLSMPQVNIVKKTEVQTGGFSKESILPKRNSDKLIARKKDWDPKKYGGFDSPTVAYSVLVVAKVEKGKSKKLKSVKELLGITIMERSSFEKNPIDFLEAKGYKEVKKDLIIKLPKYSLFELENGRKRMLASAGELQKGNELALPSKYVNFLYLASHYEKLKGSPEDNEQKQLFVEQHKHYLDEIIEQISEFSKRVILADANLDKVLSAYNKHRDKPIREQAENIIHLFTLTNLGAPAAFKYFDTTIDRKRYTSTKEVLDATLIHQSITGLYETRIDLSQLGGDGGGSSGSSGSSGSSGGMDPLQLLQPLEAEIKGTKLKAHWNSGATITCVPEAFLEDERPIQTMLIKTIHGEKQQDVYYLTFKVQGRKVEAEVLASPYDYILLNPSDVPWLMKKPLQLTVLVPLHEYQERLLQQTALPKEQKELLQKLFLKYDALWQHWENQVGHRRIKPHNIATGTLAPRPQKQYPINPKAKPSIQIVIDDLLKQGVLIQQNSTMNTPVYPVPKPDGKWRMVLDYREVNKTIPLIAAQNQHSAGILSSIYRGKYKTTLDLTNGFWAHPITPESYWLTAFTWQGKQYCWTRLPQGFLNSPALFNADVVDLLKEIPNVQAYVDDIYISHDDPQEHLEQLEKIFSILLNAGYVVSLKKSEIAQREVEFLGFNITKEGRGLTDTFKQKLLNITPPKDLKQLQSILGLLNFARNFIPNYSELVKPLYTIVAPANGKFISWTEDNSNQLQHIISVLNQADNLEERNPETRLIIKVNSSPSAGYIRYYNEGSKRPIMYVNYIFSKAEAKFTQTEKLLTTMHKGLIKAMDLAMGQEILVYSPIVSMTKIQRTPLPERKALPVRWITWMTYLEDPRIQFHYDKSLPELQQIPNVTEDVIAKTKHPSEFAMVFYTDGSAIKHPDVNKSHSAGMGIAQVQFIPEYKIVHQWSIPLGDHTAQLAEIAAVEFACKKALKISGPVLIVTDSFYVAESANKELPYWKSNGFLNNKKKPLRHVSKWKSIAECLQLKPDIIIMHEKGHQQPMTTLHTEGNNLADKLATQGSYVVHAGKRTADGSEFEKRTADGSEFESPKKKAKVE

SEQ ID NO: 468 - protein, 2177 aa, synthetic construct
MPAAKRVKLDGGDKKYSIGLDIGTNSVGWAVITDEYKVPSKKFKVLGNTDRHSIKKNLIGALLFDSGETAEATRLKRTARRRYTRRKNRICYLQEIFSNEMAKVDDSFFHRLEESFLVEEDKKHERHPIFGNIVDEVAYHEKYPTIYHLRKKLVDSTDKADLRLIYLALAHMIKFRGHFLIEGDLNPDNSDVDKLFIQLVQTYNQLFEENPINASGVDAKAILSARLSKSRRLENLIAQLPGEKKNGLFGNLIALSLGLTPNFKSNFDLAEDAKLQLSKDTYDDDLDNLLAQIGDQYADLFLAAKNLSDAILLSDILRVNTEITKAPLSASMIKRYDEHHQDLTLLKALVRQQLPEKYKEIFFDQSKNGYAGYIDGGASQEEFYKFIKPILEKMDGTEELLVKLNREDLLRKQRTFDNGSIPHQIHLGELHAILRRQEDFYPFLKDNREKIEKILTFRIPYYVGPLARGNSRFAWMTRKSEETITPWNFEEVVDKGASAQSFIERMTNFDKNLPNEKVLPKHSLLYEYFTVYNELTKVKYVTEGMRKPAFLSGEQKKAIVDLLFKTNRKVTVKQLKEDYFKKIECFDSVEISGVEDRFNASLGTYHDLLKIIKDKDFLDNEENEDILEDIVLTLTLFEDREMIEERLKTYAHLFDDKVMKQLKRRRYTGWGRLSRKLINGIRDKQSGKTILDFLKSDGFANRNFMQLIHDDSLTFKEDIQKAQVSGQGDSLHEHIANLAGSPAIKKGILQTVKVVDELVKVMGRHKPENIVIEMARENQTTQKGQKNSRERMKRIEEGIKELGSQILKEHPVENTQLQNEKLYLYYLQNGRDMYVDQELDINRLSDYDVDHIVPQSFLKDDSIDNKVLTRSDKARGKSDNVPSEEVVKKMKNYWRQLLNAKLITQRKFDNLTKAERGGLSELDKAGFIKRQLVETRQITKHVAQILDSRMNTKYDENDKLIREVKVITLKSKLVSDFRKDFQFYKVREINNYHHAHDAYLNAVVGTALIKKYPKLESEFVYGDYKVYDVRKMIAKSEQEIGKATAKYFFYSNIMNFFKTEITLANGEIRKRPLIETNGETGEIVWDKGRDFATVRKVLSMPQVNIVKKTEVQTGGFSKESILPKRNSDKLIARKKDWDPKKYGGFDSPTVAYSVLVVAKVEKGKSKKLKSVKELLGITIMERSSFEKNPIDFLEAKGYKEVKKDLIIKLPKYSLFELENGRKRMLASAGELQKGNELALPSKYVNFLYLASHYEKLKGSPEDNEQKQLFVEQHKHYLDEIIEQISEFSKRVILADANLDKVLSAYNKHRDKPIREQAENIIHLFTLTNLGAPAAFKYFDTTIDRKRYTSTKEVLDATLIHQSITGLYETRIDLSQLGGDGGGSAGSAAGSGEFGGMDPLQLLQPLEAEIKGTKLKAHWNSGATITCVPEAFLEDERPIQTMLIKTIHGEKQQDVYYLTFKVQGRKVEAEVLASPYDYILLNPSDVPWLMKKPLQLTVLVPLHEYQERLLQQTALPKEQKELLQKLFLKYDALWQHWENQVGHRRIKPHNIATGTLAPRPQKQYPINPKAKPSIQIVIDDLLKQGVLIQQNSTMNTPVYPVPKPDGKWRMVLDYREVNKTIPLIAAQNQHSAGILSSIYRGKYKTTLDLTNGFWAHPITPESYWLTAFTWQGKQYCWTRLPQGFLNSPALFNADVVDLLKEIPNVQAYVDDIYISHDDPQEHLEQLEKIFSILLNAGYVVSLKKSEIAQREVEFLGFNITKEGRGLTDTFKQKLLNITPPKDLKQLQSILGLLNFARNFIPNYSELVKPLYTIVAPANGKFISWTEDNSNQLQHIISVLNQADNLEERNPETRLIIKVNSSPSAGYIRYYNEGSKRPIMYVNYIFSKAEAKFTQTEKLLTTMHKGLIKAMDLAMGQEILVYSPIVSMTKIQRTPLPERKALPVRWITWMTYLEDPRIQFHYDKSLPELQQIPNVTEDVIAKTKHPSEFAMVFYTDGSAIKHPDVNKSHSAGMGIAQVQFIPEYKIVHQWSIPLGDHTAQLAEIAAVEFACKKALKISGPVLIVTDSFYVAESANKELPYWKSNGFLNNKKKPLRHVSKWKSIAECLQLKPDIIIMHEKGHQQPMTTLHTEGNNLADKLATQGSYVVHAGKRTADGSEFEKRTADGSEFESPKKKAKVE

SEQ ID NO: 469 - protein, 2171 aa, synthetic construct
MPAAKRVKLDGGDKKYSIGLDIGTNSVGWAVITDEYKVPSKKFKVLGNTDRHSIKKNLIGALLFDSGETAEATRLKRTARRRYTRRKNRICYLQEIFSNEMAKVDDSFFHRLEESFLVEEDKKHERHPIFGNIVDEVAYHEKYPTIYHLRKKLVDSTDKADLRLIYLALAHMIKFRGHFLIEGDLNPDNSDVDKLFIQLVQTYNQLFEENPINASGVDAKAILSARLSKSRRLENLIAQLPGEKKNGLFGNLIALSLGLTPNFKSNFDLAEDAKLQLSKDTYDDDLDNLLAQIGDQYADLFLAAKNLSDAILLSDILRVNTEITKAPLSASMIKRYDEHHQDLTLLKALVRQQLPEKYKEIFFDQSKNGYAGYIDGGASQEEFYKFIKPILEKMDGTEELLVKLNREDLLRKQRTFDNGSIPHQIHLGELHAILRRQEDFYPFLKDNREKIEKILTFRIPYYVGPLARGNSRFAWMTRKSEETITPWNFEEVVDKGASAQSFIERMTNFDKNLPNEKVLPKHSLLYEYFTVYNELTKVKYVTEGMRKPAFLSGEQKKAIVDLLFKTNRKVTVKQLKEDYFKKIECFDSVEISGVEDRFNASLGTYHDLLKIIKDKDFLDNEENEDILEDIVLTLTLFEDREMIEERLKTYAHLFDDKVMKQLKRRRYTGWGRLSRKLINGIRDKQSGKTILDFLKSDGFANRNFMQLIHDDSLTFKEDIQKAQVSGQGDSLHEHIANLAGSPAIKKGILQTVKVVDELVKVMGRHKPENIVIEMARENQTTQKGQKNSRERMKRIEEGIKELGSQILKEHPVENTQLQNEKLYLYYLQNGRDMYVDQELDINRLSDYDVDHIVPQSFLKDDSIDNKVLTRSDKARGKSDNVPSEEVVKKMKNYWRQLLNAKLITQRKFDNLTKAERGGLSELDKAGFIKRQLVETRQITKHVAQILDSRMNTKYDENDKLIREVKVITLKSKLVSDFRKDFQFYKVREINNYHHAHDAYLNAVVGTALIKKYPKLESEFVYGDYKVYDVRKMIAKSEQEIGKATAKYFFYSNIMNFFKTEITLANGEIRKRPLIETNGETGEIVWDKGRDFATVRKVLSMPQVNIVKKTEVQTGGFSKESILPKRNSDKLIARKKDWDPKKYGGFDSPTVAYSVLVVAKVEKGKSKKLKSVKELLGITIMERSSFEKNPIDFLEAKGYKEVKKDLIIKLPKYSLFELENGRKRMLASAGELQKGNELALPSKYVNFLYLASHYEKLKGSPEDNEQKQLFVEQHKHYLDEIIEQISEFSKRVILADANLDKVLSAYNKHRDKPIREQAENIIHLFTLTNLGAPAAFKYFDTTIDRKRYTSTKEVLDATLIHQSITGLYETRIDLSQLGGDGGGGSGGSGGMDPLQLLQPLEAEIKGTKLKAHWNSGATITCVPEAFLEDERPIQTMLIKTIHGEKQQDVYYLTFKVQGRKVEAEVLASPYDYILLNPSDVPWLMKKPLQLTVLVPLHEYQERLLQQTALPKEQKELLQKLFLKYDALWQHWENQVGHRRIKPHNIATGTLAPRPQKQYPINPKAKPSIQIVIDDLLKQGVLIQQNSTMNTPVYPVPKPDGKWRMVLDYREVNKTIPLIAAQNQHSAGILSSIYRGKYKTTLDLTNGFWAHPITPESYWLTAFTWQGKQYCWTRLPQGFLNSPALFNADVVDLLKEIPNVQAYVDDIYISHDDPQEHLEQLEKIFSILLNAGYVVSLKKSEIAQREVEFLGFNITKEGRGLTDTFKQKLLNITPPKDLKQLQSILGLLNFARNFIPNYSELVKPLYTIVAPANGKFISWTEDNSNQLQHIISVLNQADNLEERNPETRLIIKVNSSPSAGYIRYYNEGSKRPIMYVNYIFSKAEAKFTQTEKLLTTMHKGLIKAMDLAMGQEILVYSPIVSMTKIQRTPLPERKALPVRWITWMTYLEDPRIQFHYDKSLPELQQIPNVTEDVIAKTKHPSEFAMVFYTDGSAIKHPDVNKSHSAGMGIAQVQFIPEYKIVHQWSIPLGDHTAQLAEIAAVEFACKKALKISGPVLIVTDSFYVAESANKELPYWKSNGFLNNKKKPLRHVSKWKSIAECLQLKPDIIIMHEKGHQQPMTTLHTEGNNLADKLATQGSYVVHAGKRTADGSEFEKRTADGSEFESPKKKAKVE

SEQ ID NO: 470 - protein, 2176 aa, synthetic construct
MPAAKRVKLDGGDKKYSIGLDIGTNSVGWAVITDEYKVPSKKFKVLGNTDRHSIKKNLIGALLFDSGETAEATRLKRTARRRYTRRKNRICYLQEIFSNEMAKVDDSFFHRLEESFLVEEDKKHERHPIFGNIVDEVAYHEKYPTIYHLRKKLVDSTDKADLRLIYLALAHMIKFRGHFLIEGDLNPDNSDVDKLFIQLVQTYNQLFEENPINASGVDAKAILSARLSKSRRLENLIAQLPGEKKNGLFGNLIALSLGLTPNFKSNFDLAEDAKLQLSKDTYDDDLDNLLAQIGDQYADLFLAAKNLSDAILLSDILRVNTEITKAPLSASMIKRYDEHHQDLTLLKALVRQQLPEKYKEIFFDQSKNGYAGYIDGGASQEEFYKFIKPILEKMDGTEELLVKLNREDLLRKQRTFDNGSIPHQIHLGELHAILRRQEDFYPFLKDNREKIEKILTFRIPYYVGPLARGNSRFAWMTRKSEETITPWNFEEVVDKGASAQSFIERMTNFDKNLPNEKVLPKHSLLYEYFTVYNELTKVKYVTEGMRKPAFLSGEQKKAIVDLLFKTNRKVTVKQLKEDYFKKIECFDSVEISGVEDRFNASLGTYHDLLKIIKDKDFLDNEENEDILEDIVLTLTLFEDREMIEERLKTYAHLFDDKVMKQLKRRRYTGWGRLSRKLINGIRDKQSGKTILDFLKSDGFANRNFMQLIHDDSLTFKEDIQKAQVSGQGDSLHEHIANLAGSPAIKKGILQTVKVVDELVKVMGRHKPENIVIEMARENQTTQKGQKNSRERMKRIEEGIKELGSQILKEHPVENTQLQNEKLYLYYLQNGRDMYVDQELDINRLSDYDVDHIVPQSFLKDDSIDNKVLTRSDKARGKSDNVPSEEVVKKMKNYWRQLLNAKLITQRKFDNLTKAERGGLSELDKAGFIKRQLVETRQITKHVAQILDSRMNTKYDENDKLIREVKVITLKSKLVSDFRKDFQFYKVREINNYHHAHDAYLNAVVGTALIKKYPKLESEFVYGDYKVYDVRKMIAKSEQEIGKATAKYFFYSNIMNFFKTEITLANGEIRKRPLIETNGETGEIVWDKGRDFATVRKVLSMPQVNIVKKTEVQTGGFSKESILPKRNSDKLIARKKDWDPKKYGGFDSPTVAYSVLVVAKVEKGKSKKLKSVKELLGITIMERSSFEKNPIDFLEAKGYKEVKKDLIIKLPKYSLFELENGRKRMLASAGELQKGNELALPSKYVNFLYLASHYEKLKGSPEDNEQKQLFVEQHKHYLDEIIEQISEFSKRVILADANLDKVLSAYNKHRDKPIREQAENIIHLFTLTNLGAPAAFKYFDTTIDRKRYTSTKEVLDATLIHQSITGLYETRIDLSQLGGDGGGGGEAAAKGGSGGMDPLQLLQPLEAEIKGTKLKAHWNSGATITCVPEAFLEDERPIQTMLIKTIHGEKQQDVYYLTFKVQGRKVEAEVLASPYDYILLNPSDVPWLMKKPLQLTVLVPLHEYQERLLQQTALPKEQKELLQKLFLKYDALWQHWENQVGHRRIKPHNIATGTLAPRPQKQYPINPKAKPSIQIVIDDLLKQGVLIQQNSTMNTPVYPVPKPDGKWRMVLDYREVNKTIPLIAAQNQHSAGILSSIYRGKYKTTLDLTNGFWAHPITPESYWLTAFTWQGKQYCWTRLPQGFLNSPALFNADVVDLLKEIPNVQAYVDDIYISHDDPQEHLEQLEKIFSILLNAGYVVSLKKSEIAQREVEFLGFNITKEGRGLTDTFKQKLLNITPPKDLKQLQSILGLLNFARNFIPNYSELVKPLYTIVAPANGKFISWTEDNSNQLQHIISVLNQADNLEERNPETRLIIKVNSSPSAGYIRYYNEGSKRPIMYVNYIFSKAEAKFTQTEKLLTTMHKGLIKAMDLAMGQEILVYSPIVSMTKIQRTPLPERKALPVRWITWMTYLEDPRIQFHYDKSLPELQQIPNVTEDVIAKTKHPSEFAMVFYTDGSAIKHPDVNKSHSAGMGIAQVQFIPEYKIVHQWSIPLGDHTAQLAEIAAVEFACKKALKISGPVLIVTDSFYVAESANKELPYWKSNGFLNNKKKPLRHVSKWKSIAECLQLKPDIIIMHEKGHQQPMTTLHTEGNNLADKLATQGSYVVHAGKRTADGSEFEKRTADGSEFESPKKKAKVE

SEQ ID NO: 471 - protein, 2174 aa, synthetic construct
MPAAKRVKLDGGDKKYSIGLDIGTNSVGWAVITDEYKVPSKKFKVLGNTDRHSIKKNLIGALLFDSGETAEATRLKRTARRRYTRRKNRICYLQEIFSNEMAKVDDSFFHRLEESFLVEEDKKHERHPIFGNIVDEVAYHEKYPTIYHLRKKLVDSTDKADLRLIYLALAHMIKFRGHFLIEGDLNPDNSDVDKLFIQLVQTYNQLFEENPINASGVDAKAILSARLSKSRRLENLIAQLPGEKKNGLFGNLIALSLGLTPNFKSNFDLAEDAKLQLSKDTYDDDLDNLLAQIGDQYADLFLAAKNLSDAILLSDILRVNTEITKAPLSASMIKRYDEHHQDLTLLKALVRQQLPEKYKEIFFDQSKNGYAGYIDGGASQEEFYKFIKPILEKMDGTEELLVKLNREDLLRKQRTFDNGSIPHQIHLGELHAILRRQEDFYPFLKDNREKIEKILTFRIPYYVGPLARGNSRFAWMTRKSEETITPWNFEEVVDKGASAQSFIERMTNFDKNLPNEKVLPKHSLLYEYFTVYNELTKVKYVTEGMRKPAFLSGEQKKAIVDLLFKTNRKVTVKQLKEDYFKKIECFDSVEISGVEDRFNASLGTYHDLLKIIKDKDFLDNEENEDILEDIVLTLTLFEDREMIEERLKTYAHLFDDKVMKQLKRRRYTGWGRLSRKLINGIRDKQSGKTILDFLKSDGFANRNFMQLIHDDSLTFKEDIQKAQVSGQGDSLHEHIANLAGSPAIKKGILQTVKVVDELVKVMGRHKPENIVIEMARENQTTQKGQKNSRERMKRIEEGIKELGSQILKEHPVENTQLQNEKLYLYYLQNGRDMYVDQELDINRLSDYDVDHIVPQSFLKDDSIDNKVLTRSDKARGKSDNVPSEEVVKKMKNYWRQLLNAKLITQRKFDNLTKAERGGLSELDKAGFIKRQLVETRQITKHVAQILDSRMNTKYDENDKLIREVKVITLKSKLVSDFRKDFQFYKVREINNYHHAHDAYLNAVVGTALIKKYPKLESEFVYGDYKVYDVRKMIAKSEQEIGKATAKYFFYSNIMNFFKTEITLANGEIRKRPLIETNGETGEIVWDKGRDFATVRKVLSMPQVNIVKKTEVQTGGFSKESILPKRNSDKLIARKKDWDPKKYGGFDSPTVAYSVLVVAKVEKGKSKKLKSVKELLGITIMERSSFEKNPIDFLEAKGYKEVKKDLIIKLPKYSLFELENGRKRMLASAGELQKGNELALPSKYVNFLYLASHYEKLKGSPEDNEQKQLFVEQHKHYLDEIIEQISEFSKRVILADANLDKVLSAYNKHRDKPIREQAENIIHLFTLTNLGAPAAFKYFDTTIDRKRYTSTKEVLDATLIHQSITGLYETRIDLSQLGGDGGPAPAPAPAPGGMDPLQLLQPLEAEIKGTKLKAHWNSGATITCVPEAFLEDERPIQTMLIKTIHGEKQQDVYYLTFKVQGRKVEAEVLASPYDYILLNPSDVPWLMKKPLQLTVLVPLHEYQERLLQQTALPKEQKELLQKLFLKYDALWQHWENQVGHRRIKPHNIATGTLAPRPQKQYPINPKAKPSIQIVIDDLLKQGVLIQQNSTMNTPVYPVPKPDGKWRMVLDYREVNKTIPLIAAQNQHSAGILSSIYRGKYKTTLDLTNGFWAHPITPESYWLTAFTWQGKQYCWTRLPQGFLNSPALFNADVVDLLKEIPNVQAYVDDIYISHDDPQEHLEQLEKIFSILLNAGYVVSLKKSEIAQREVEFLGFNITKEGRGLTDTFKQKLLNITPPKDLKQLQSILGLLNFARNFIPNYSELVKPLYTIVAPANGKFISWTEDNSNQLQHIISVLNQADNLEERNPETRLIIKVNSSPSAGYIRYYNEGSKRPIMYVNYIFSKAEAKFTQTEKLLTTMHKGLIKAMDLAMGQEILVYSPIVSMTKIQRTPLPERKALPVRWITWMTYLEDPRIQFHYDKSLPELQQIPNVTEDVIAKTKHPSEFAMVFYTDGSAIKHPDVNKSHSAGMGIAQVQFIPEYKIVHQWSIPLGDHTAQLAEIAAVEFACKKALKISGPVLIVTDSFYVAESANKELPYWKSNGFLNNKKKPLRHVSKWKSIAECLQLKPDIIIMHEKGHQQPMTTLHTEGNNLADKLATQGSYVVHAGKRTADGSEFEKRTADGSEFESPKKKAKVE

SEQ ID NO: 472 - protein, 2174 aa, synthetic construct
MPAAKRVKLDGGDKKYSIGLDIGTNSVGWAVITDEYKVPSKKFKVLGNTDRHSIKKNLIGALLFDSGETAEATRLKRTARRRYTRRKNRICYLQEIFSNEMAKVDDSFFHRLEESFLVEEDKKHERHPIFGNIVDEVAYHEKYPTIYHLRKKLVDSTDKADLRLIYLALAHMIKFRGHFLIEGDLNPDNSDVDKLFIQLVQTYNQLFEENPINASGVDAKAILSARLSKSRRLENLIAQLPGEKKNGLFGNLIALSLGLTPNFKSNFDLAEDAKLQLSKDTYDDDLDNLLAQIGDQYADLFLAAKNLSDAILLSDILRVNTEITKAPLSASMIKRYDEHHQDLTLLKALVRQQLPEKYKEIFFDQSKNGYAGYIDGGASQEEFYKFIKPILEKMDGTEELLVKLNREDLLRKQRTFDNGSIPHQIHLGELHAILRRQEDFYPFLKDNREKIEKILTFRIPYYVGPLARGNSRFAWMTRKSEETITPWNFEEVVDKGASAQSFIERMTNFDKNLPNEKVLPKHSLLYEYFTVYNELTKVKYVTEGMRKPAFLSGEQKKAIVDLLFKTNRKVTVKQLKEDYFKKIECFDSVEISGVEDRFNASLGTYHDLLKIIKDKDFLDNEENEDILEDIVLTLTLFEDREMIEERLKTYAHLFDDKVMKQLKRRRYTGWGRLSRKLINGIRDKQSGKTILDFLKSDGFANRNFMQLIHDDSLTFKEDIQKAQVSGQGDSLHEHIANLAGSPAIKKGILQTVKVVDELVKVMGRHKPENIVIEMARENQTTQKGQKNSRERMKRIEEGIKELGSQILKEHPVENTQLQNEKLYLYYLQNGRDMYVDQELDINRLSDYDVDHIVPQSFLKDDSIDNKVLTRSDKARGKSDNVPSEEVVKKMKNYWRQLLNAKLITQRKFDNLTKAERGGLSELDKAGFIKRQLVETRQITKHVAQILDSRMNTKYDENDKLIREVKVITLKSKLVSDFRKDFQFYKVREINNYHHAHDAYLNAVVGTALIKKYPKLESEFVYGDYKVYDVRKMIAKSEQEIGKATAKYFFYSNIMNFFKTEITLANGEIRKRPLIETNGETGEIVWDKGRDFATVRKVLSMPQVNIVKKTEVQTGGFSKESILPKRNSDKLIARKKDWDPKKYGGFDSPTVAYSVLVVAKVEKGKSKKLKSVKELLGITIMERSSFEKNPIDFLEAKGYKEVKKDLIIKLPKYSLFELENGRKRMLASAGELQKGNELALPSKYVNFLYLASHYEKLKGSPEDNEQKQLFVEQHKHYLDEIIEQISEFSKRVILADANLDKVLSAYNKHRDKPIREQAENIIHLFTLTNLGAPAAFKYFDTTIDRKRYTSTKEVLDATLIHQSITGLYETRIDLSQLGGDGGGSSGGSGGGGGMDPLQLLQPLEAEIKGTKLKAHWNSGATITCVPEAFLEDERPIQTMLIKTIHGEKQQDVYYLTFKVQGRKVEAEVLASPYDYILLNPSDVPWLMKKPLQLTVLVPLHEYQERLLQQTALPKEQKELLQKLFLKYDALWQHWENQVGHRRIKPHNIATGTLAPRPQKQYPINPKAKPSIQIVIDDLLKQGVLIQQNSTMNTPVYPVPKPDGKWRMVLDYREVNKTIPLIAAQNQHSAGILSSIYRGKYKTTLDLTNGFWAHPITPESYWLTAFTWQGKQYCWTRLPQGFLNSPALFNADVVDLLKEIPNVQAYVDDIYISHDDPQEHLEQLEKIFSILLNAGYVVSLKKSEIAQREVEFLGFNITKEGRGLTDTFKQKLLNITPPKDLKQLQSILGLLNFARNFIPNYSELVKPLYTIVAPANGKFISWTEDNSNQLQHIISVLNQADNLEERNPETRLIIKVNSSPSAGYIRYYNEGSKRPIMYVNYIFSKAEAKFTQTEKLLTTMHKGLIKAMDLAMGQEILVYSPIVSMTKIQRTPLPERKALPVRWITWMTYLEDPRIQFHYDKSLPELQQIPNVTEDVIAKTKHPSEFAMVFYTDGSAIKHPDVNKSHSAGMGIAQVQFIPEYKIVHQWSIPLGDHTAQLAEIAAVEFACKKALKISGPVLIVTDSFYVAESANKELPYWKSNGFLNNKKKPLRHVSKWKSIAECLQLKPDIIIMHEKGHQQPMTTLHTEGNNLADKLATQGSYVVHAGKRTADGSEFEKRTADGSEFESPKKKAKVE

SEQ ID NO: 473 - protein, 2174 aa, synthetic construct
MPAAKRVKLDGGDKKYSIGLDIGTNSVGWAVITDEYKVPSKKFKVLGNTDRHSIKKNLIGALLFDSGETAEATRLKRTARRRYTRRKNRICYLQEIFSNEMAKVDDSFFHRLEESFLVEEDKKHERHPIFGNIVDEVAYHEKYPTIYHLRKKLVDSTDKADLRLIYLALAHMIKFRGHFLIEGDLNPDNSDVDKLFIQLVQTYNQLFEENPINASGVDAKAILSARLSKSRRLENLIAQLPGEKKNGLFGNLIALSLGLTPNFKSNFDLAEDAKLQLSKDTYDDDLDNLLAQIGDQYADLFLAAKNLSDAILLSDILRVNTEITKAPLSASMIKRYDEHHQDLTLLKALVRQQLPEKYKEIFFDQSKNGYAGYIDGGASQEEFYKFIKPILEKMDGTEELLVKLNREDLLRKQRTFDNGSIPHQIHLGELHAILRRQEDFYPFLKDNREKIEKILTFRIPYYVGPLARGNSRFAWMTRKSEETITPWNFEEVVDKGASAQSFIERMTNFDKNLPNEKVLPKHSLLYEYFTVYNELTKVKYVTEGMRKPAFLSGEQKKAIVDLLFKTNRKVTVKQLKEDYFKKIECFDSVEISGVEDRFNASLGTYHDLLKIIKDKDFLDNEENEDILEDIVLTLTLFEDREMIEERLKTYAHLFDDKVMKQLKRRRYTGWGRLSRKLINGIRDKQSGKTILDFLKSDGFANRNFMQLIHDDSLTFKEDIQKAQVSGQGDSLHEHIANLAGSPAIKKGILQTVKVVDELVKVMGRHKPENIVIEMARENQTTQKGQKNSRERMKRIEEGIKELGSQILKEHPVENTQLQNEKLYLYYLQNGRDMYVDQELDINRLSDYDVDHIVPQSFLKDDSIDNKVLTRSDKARGKSDNVPSEEVVKKMKNYWRQLLNAKLITQRKFDNLTKAERGGLSELDKAGFIKRQLVETRQITKHVAQILDSRMNTKYDENDKLIREVKVITLKSKLVSDFRKDFQFYKVREINNYHHAHDAYLNAVVGTALIKKYPKLESEFVYGDYKVYDVRKMIAKSEQEIGKATAKYFFYSNIMNFFKTEITLANGEIRKRPLIETNGETGEIVWDKGRDFATVRKVLSMPQVNIVKKTEVQTGGFSKESILPKRNSDKLIARKKDWDPKKYGGFDSPTVAYSVLVVAKVEKGKSKKLKSVKELLGITIMERSSFEKNPIDFLEAKGYKEVKKDLIIKLPKYSLFELENGRKRMLASAGELQKGNELALPSKYVNFLYLASHYEKLKGSPEDNEQKQLFVEQHKHYLDEIIEQISEFSKRVILADANLDKVLSAYNKHRDKPIREQAENIIHLFTLTNLGAPAAFKYFDTTIDRKRYTSTKEVLDATLIHQSITGLYETRIDLSQLGGDGGPAPGSSGGSGGMDPLQLLQPLEAEIKGTKLKAHWNSGATITCVPEAFLEDERPIQTMLIKTIHGEKQQDVYYLTFKVQGRKVEAEVLASPYDYILLNPSDVPWLMKKPLQLTVLVPLHEYQERLLQQTALPKEQKELLQKLFLKYDALWQHWENQVGHRRIKPHNIATGTLAPRPQKQYPINPKAKPSIQIVIDDLLKQGVLIQQNSTMNTPVYPVPKPDGKWRMVLDYREVNKTIPLIAAQNQHSAGILSSIYRGKYKTTLDLTNGFWAHPITPESYWLTAFTWQGKQYCWTRLPQGFLNSPALFNADVVDLLKEIPNVQAYVDDIYISHDDPQEHLEQLEKIFSILLNAGYVVSLKKSEIAQREVEFLGFNITKEGRGLTDTFKQKLLNITPPKDLKQLQSILGLLNFARNFIPNYSELVKPLYTIVAPANGKFISWTEDNSNQLQHIISVLNQADNLEERNPETRLIIKVNSSPSAGYIRYYNEGSKRPIMYVNYIFSKAEAKFTQTEKLLTTMHKGLIKAMDLAMGQEILVYSPIVSMTKIQRTPLPERKALPVRWITWMTYLEDPRIQFHYDKSLPELQQIPNVTEDVIAKTKHPSEFAMVFYTDGSAIKHPDVNKSHSAGMGIAQVQFIPEYKIVHQWSIPLGDHTAQLAEIAAVEFACKKALKISGPVLIVTDSFYVAESANKELPYWKSNGFLNNKKKPLRHVSKWKSIAECLQLKPDIIIMHEKGHQQPMTTLHTEGNNLADKLATQGSYVVHAGKRTADGSEFEKRTADGSEFESPKKKAKVE

SEQ ID NO: 474 - protein, 2176 aa, synthetic construct
MPAAKRVKLDGGDKKYSIGLDIGTNSVGWAVITDEYKVPSKKFKVLGNTDRHSIKKNLIGALLFDSGETAEATRLKRTARRRYTRRKNRICYLQEIFSNEMAKVDDSFFHRLEESFLVEEDKKHERHPIFGNIVDEVAYHEKYPTIYHLRKKLVDSTDKADLRLIYLALAHMIKFRGHFLIEGDLNPDNSDVDKLFIQLVQTYNQLFEENPINASGVDAKAILSARLSKSRRLENLIAQLPGEKKNGLFGNLIALSLGLTPNFKSNFDLAEDAKLQLSKDTYDDDLDNLLAQIGDQYADLFLAAKNLSDAILLSDILRVNTEITKAPLSASMIKRYDEHHQDLTLLKALVRQQLPEKYKEIFFDQSKNGYAGYIDGGASQEEFYKFIKPILEKMDGTEELLVKLNREDLLRKQRTFDNGSIPHQIHLGELHAILRRQEDFYPFLKDNREKIEKILTFRIPYYVGPLARGNSRFAWMTRKSEETITPWNFEEVVDKGASAQSFIERMTNFDKNLPNEKVLPKHSLLYEYFTVYNELTKVKYVTEGMRKPAFLSGEQKKAIVDLLFKTNRKVTVKQLKEDYFKKIECFDSVEISGVEDRFNASLGTYHDLLKIIKDKDFLDNEENEDILEDIVLTLTLFEDREMIEERLKTYAHLFDDKVMKQLKRRRYTGWGRLSRKLINGIRDKQSGKTILDFLKSDGFANRNFMQLIHDDSLTFKEDIQKAQVSGQGDSLHEHIANLAGSPAIKKGILQTVKVVDELVKVMGRHKPENIVIEMARENQTTQKGQKNSRERMKRIEEGIKELGSQILKEHPVENTQLQNEKLYLYYLQNGRDMYVDQELDINRLSDYDVDHIVPQSFLKDDSIDNKVLTRSDKARGKSDNVPSEEVVKKMKNYWRQLLNAKLITQRKFDNLTKAERGGLSELDKAGFIKRQLVETRQITKHVAQILDSRMNTKYDENDKLIREVKVITLKSKLVSDFRKDFQFYKVREINNYHHAHDAYLNAVVGTALIKKYPKLESEFVYGDYKVYDVRKMIAKSEQEIGKATAKYFFYSNIMNFFKTEITLANGEIRKRPLIETNGETGEIVWDKGRDFATVRKVLSMPQVNIVKKTEVQTGGFSKESILPKRNSDKLIARKKDWDPKKYGGFDSPTVAYSVLVVAKVEKGKSKKLKSVKELLGITIMERSSFEKNPIDFLEAKGYKEVKKDLIIKLPKYSLFELENGRKRMLASAGELQKGNELALPSKYVNFLYLASHYEKLKGSPEDNEQKQLFVEQHKHYLDEIIEQISEFSKRVILADANLDKVLSAYNKHRDKPIREQAENIIHLFTLTNLGAPAAFKYFDTTIDRKRYTSTKEVLDATLIHQSITGLYETRIDLSQLGGDGGPAPGGSEAAAKGGMDPLQLLQPLEAEIKGTKLKAHWNSGATITCVPEAFLEDERPIQTMLIKTIHGEKQQDVYYLTFKVQGRKVEAEVLASPYDYILLNPSDVPWLMKKPLQLTVLVPLHEYQERLLQQTALPKEQKELLQKLFLKYDALWQHWENQVGHRRIKPHNIATGTLAPRPQKQYPINPKAKPSIQIVIDDLLKQGVLIQQNSTMNTPVYPVPKPDGKWRMVLDYREVNKTIPLIAAQNQHSAGILSSIYRGKYKTTLDLTNGFWAHPITPESYWLTAFTWQGKQYCWTRLPQGFLNSPALFNADVVDLLKEIPNVQAYVDDIYISHDDPQEHLEQLEKIFSILLNAGYVVSLKKSEIAQREVEFLGFNITKEGRGLTDTFKQKLLNITPPKDLKQLQSILGLLNFARNFIPNYSELVKPLYTIVAPANGKFISWTEDNSNQLQHIISVLNQADNLEERNPETRLIIKVNSSPSAGYIRYYNEGSKRPIMYVNYIFSKAEAKFTQTEKLLTTMHKGLIKAMDLAMGQEILVYSPIVSMTKIQRTPLPERKALPVRWITWMTYLEDPRIQFHYDKSLPELQQIPNVTEDVIAKTKHPSEFAMVFYTDGSAIKHPDVNKSHSAGMGIAQVQFIPEYKIVHQWSIPLGDHTAQLAEIAAVEFACKKALKISGPVLIVTDSFYVAESANKELPYWKSNGFLNNKKKPLRHVSKWKSIAECLQLKPDIIIMHEKGHQQPMTTLHTEGNNLADKLATQGSYVVHAGKRTADGSEFEKRTADGSEFESPKKKAKVE

SEQ ID NO: 475 - protein, 2176 aa, synthetic construct
MPAAKRVKLDGGDKKYSIGLDIGTNSVGWAVITDEYKVPSKKFKVLGNTDRHSIKKNLIGALLFDSGETAEATRLKRTARRRYTRRKNRICYLQEIFSNEMAKVDDSFFHRLEESFLVEEDKKHERHPIFGNIVDEVAYHEKYPTIYHLRKKLVDSTDKADLRLIYLALAHMIKFRGHFLIEGDLNPDNSDVDKLFIQLVQTYNQLFEENPINASGVDAKAILSARLSKSRRLENLIAQLPGEKKNGLFGNLIALSLGLTPNFKSNFDLAEDAKLQLSKDTYDDDLDNLLAQIGDQYADLFLAAKNLSDAILLSDILRVNTEITKAPLSASMIKRYDEHHQDLTLLKALVRQQLPEKYKEIFFDQSKNGYAGYIDGGASQEEFYKFIKPILEKMDGTEELLVKLNREDLLRKQRTFDNGSIPHQIHLGELHAILRRQEDFYPFLKDNREKIEKILTFRIPYYVGPLARGNSRFAWMTRKSEETITPWNFEEVVDKGASAQSFIERMTNFDKNLPNEKVLPKHSLLYEYFTVYNELTKVKYVTEGMRKPAFLSGEQKKAIVDLLFKTNRKVTVKQLKEDYFKKIECFDSVEISGVEDRFNASLGTYHDLLKIIKDKDFLDNEENEDILEDIVLTLTLFEDREMIEERLKTYAHLFDDKVMKQLKRRRYTGWGRLSRKLINGIRDKQSGKTILDFLKSDGFANRNFMQLIHDDSLTFKEDIQKAQVSGQGDSLHEHIANLAGSPAIKKGILQTVKVVDELVKVMGRHKPENIVIEMARENQTTQKGQKNSRERMKRIEEGIKELGSQILKEHPVENTQLQNEKLYLYYLQNGRDMYVDQELDINRLSDYDVDHIVPQSFLKDDSIDNKVLTRSDKARGKSDNVPSEEVVKKMKNYWRQLLNAKLITQRKFDNLTKAERGGLSELDKAGFIKRQLVETRQITKHVAQILDSRMNTKYDENDKLIREVKVITLKSKLVSDFRKDFQFYKVREINNYHHAHDAYLNAVVGTALIKKYPKLESEFVYGDYKVYDVRKMIAKSEQEIGKATAKYFFYSNIMNFFKTEITLANGEIRKRPLIETNGETGEIVWDKGRDFATVRKVLSMPQVNIVKKTEVQTGGFSKESILPKRNSDKLIARKKDWDPKKYGGFDSPTVAYSVLVVAKVEKGKSKKLKSVKELLGITIMERSSFEKNPIDFLEAKGYKEVKKDLIIKLPKYSLFELENGRKRMLASAGELQKGNELALPSKYVNFLYLASHYEKLKGSPEDNEQKQLFVEQHKHYLDEIIEQISEFSKRVILADANLDKVLSAYNKHRDKPIREQAENIIHLFTLTNLGAPAAFKYFDTTIDRKRYTSTKEVLDATLIHQSITGLYETRIDLSQLGGDGGEAAAKGGGGSSGGMDPLQLLQPLEAEIKGTKLKAHWNSGATITCVPEAFLEDERPIQTMLIKTIHGEKQQDVYYLTFKVQGRKVEAEVLASPYDYILLNPSDVPWLMKKPLQLTVLVPLHEYQERLLQQTALPKEQKELLQKLFLKYDALWQHWENQVGHRRIKPHNIATGTLAPRPQKQYPINPKAKPSIQIVIDDLLKQGVLIQQNSTMNTPVYPVPKPDGKWRMVLDYREVNKTIPLIAAQNQHSAGILSSIYRGKYKTTLDLTNGFWAHPITPESYWLTAFTWQGKQYCWTRLPQGFLNSPALFNADVVDLLKEIPNVQAYVDDIYISHDDPQEHLEQLEKIFSILLNAGYVVSLKKSEIAQREVEFLGFNITKEGRGLTDTFKQKLLNITPPKDLKQLQSILGLLNFARNFIPNYSELVKPLYTIVAPANGKFISWTEDNSNQLQHIISVLNQADNLEERNPETRLIIKVNSSPSAGYIRYYNEGSKRPIMYVNYIFSKAEAKFTQTEKLLTTMHKGLIKAMDLAMGQEILVYSPIVSMTKIQRTPLPERKALPVRWITWMTYLEDPRIQFHYDKSLPELQQIPNVTEDVIAKTKHPSEFAMVFYTDGSAIKHPDVNKSHSAGMGIAQVQFIPEYKIVHQWSIPLGDHTAQLAEIAAVEFACKKALKISGPVLIVTDSFYVAESANKELPYWKSNGFLNNKKKPLRHVSKWKSIAECLQLKPDIIIMHEKGHQQPMTTLHTEGNNLADKLATQGSYVVHAGKRTADGSEFEKRTADGSEFESPKKKAKVE

SEQ ID NO: 476 - protein, 2174 aa, synthetic construct
MPAAKRVKLDGGDKKYSIGLDIGTNSVGWAVITDEYKVPSKKFKVLGNTDRHSIKKNLIGALLFDSGETAEATRLKRTARRRYTRRKNRICYLQEIFSNEMAKVDDSFFHRLEESFLVEEDKKHERHPIFGNIVDEVAYHEKYPTIYHLRKKLVDSTDKADLRLIYLALAHMIKFRGHFLIEGDLNPDNSDVDKLFIQLVQTYNQLFEENPINASGVDAKAILSARLSKSRRLENLIAQLPGEKKNGLFGNLIALSLGLTPNFKSNFDLAEDAKLQLSKDTYDDDLDNLLAQIGDQYADLFLAAKNLSDAILLSDILRVNTEITKAPLSASMIKRYDEHHQDLTLLKALVRQQLPEKYKEIFFDQSKNGYAGYIDGGASQEEFYKFIKPILEKMDGTEELLVKLNREDLLRKQRTFDNGSIPHQIHLGELHAILRRQEDFYPFLKDNREKIEKILTFRIPYYVGPLARGNSRFAWMTRKSEETITPWNFEEVVDKGASAQSFIERMTNFDKNLPNEKVLPKHSLLYEYFTVYNELTKVKYVTEGMRKPAFLSGEQKKAIVDLLFKTNRKVTVKQLKEDYFKKIECFDSVEISGVEDRFNASLGTYHDLLKIIKDKDFLDNEENEDILEDIVLTLTLFEDREMIEERLKTYAHLFDDKVMKQLKRRRYTGWGRLSRKLINGIRDKQSGKTILDFLKSDGFANRNFMQLIHDDSLTFKEDIQKAQVSGQGDSLHEHIANLAGSPAIKKGILQTVKVVDELVKVMGRHKPENIVIEMARENQTTQKGQKNSRERMKRIEEGIKELGSQILKEHPVENTQLQNEKLYLYYLQNGRDMYVDQELDINRLSDYDVDHIVPQSFLKDDSIDNKVLTRSDKARGKSDNVPSEEVVKKMKNYWRQLLNAKLITQRKFDNLTKAERGGLSELDKAGFIKRQLVETRQITKHVAQILDSRMNTKYDENDKLIREVKVITLKSKLVSDFRKDFQFYKVREINNYHHAHDAYLNAVVGTALIKKYPKLESEFVYGDYKVYDVRKMIAKSEQEIGKATAKYFFYSNIMNFFKTEITLANGEIRKRPLIETNGETGEIVWDKGRDFATVRKVLSMPQVNIVKKTEVQTGGFSKESILPKRNSDKLIARKKDWDPKKYGGFDSPTVAYSVLVVAKVEKGKSKKLKSVKELLGITIMERSSFEKNPIDFLEAKGYKEVKKDLIIKLPKYSLFELENGRKRMLASAGELQKGNELALPSKYVNFLYLASHYEKLKGSPEDNEQKQLFVEQHKHYLDEIIEQISEFSKRVILADANLDKVLSAYNKHRDKPIREQAENIIHLFTLTNLGAPAAFKYFDTTIDRKRYTSTKEVLDATLIHQSITGLYETRIDLSQLGGDGGGSSGGGGGSGGMDPLQLLQPLEAEIKGTKLKAHWNSGATITCVPEAFLEDERPIQTMLIKTIHGEKQQDVYYLTFKVQGRKVEAEVLASPYDYILLNPSDVPWLMKKPLQLTVLVPLHEYQERLLQQTALPKEQKELLQKLFLKYDALWQHWENQVGHRRIKPHNIATGTLAPRPQKQYPINPKAKPSIQIVIDDLLKQGVLIQQNSTMNTPVYPVPKPDGKWRMVLDYREVNKTIPLIAAQNQHSAGILSSIYRGKYKTTLDLTNGFWAHPITPESYWLTAFTWQGKQYCWTRLPQGFLNSPALFNADVVDLLKEIPNVQAYVDDIYISHDDPQEHLEQLEKIFSILLNAGYVVSLKKSEIAQREVEFLGFNITKEGRGLTDTFKQKLLNITPPKDLKQLQSILGLLNFARNFIPNYSELVKPLYTIVAPANGKFISWTEDNSNQLQHIISVLNQADNLEERNPETRLIIKVNSSPSAGYIRYYNEGSKRPIMYVNYIFSKAEAKFTQTEKLLTTMHKGLIKAMDLAMGQEILVYSPIVSMTKIQRTPLPERKALPVRWITWMTYLEDPRIQFHYDKSLPELQQIPNVTEDVIAKTKHPSEFAMVFYTDGSAIKHPDVNKSHSAGMGIAQVQFIPEYKIVHQWSIPLGDHTAQLAEIAAVEFACKKALKISGPVLIVTDSFYVAESANKELPYWKSNGFLNNKKKPLRHVSKWKSIAECLQLKPDIIIMHEKGHQQPMTTLHTEGNNLADKLATQGSYVVHAGKRTADGSEFEKRTADGSEFESPKKKAKVE

SEQ ID NO: 477 - protein, 2171 aa, synthetic construct
MPAAKRVKLDGGDKKYSIGLDIGTNSVGWAVITDEYKVPSKKFKVLGNTDRHSIKKNLIGALLFDSGETAEATRLKRTARRRYTRRKNRICYLQEIFSNEMAKVDDSFFHRLEESFLVEEDKKHERHPIFGNIVDEVAYHEKYPTIYHLRKKLVDSTDKADLRLIYLALAHMIKFRGHFLIEGDLNPDNSDVDKLFIQLVQTYNQLFEENPINASGVDAKAILSARLSKSRRLENLIAQLPGEKKNGLFGNLIALSLGLTPNFKSNFDLAEDAKLQLSKDTYDDDLDNLLAQIGDQYADLFLAAKNLSDAILLSDILRVNTEITKAPLSASMIKRYDEHHQDLTLLKALVRQQLPEKYKEIFFDQSKNGYAGYIDGGASQEEFYKFIKPILEKMDGTEELLVKLNREDLLRKQRTFDNGSIPHQIHLGELHAILRRQEDFYPFLKDNREKIEKILTFRIPYYVGPLARGNSRFAWMTRKSEETITPWNFEEVVDKGASAQSFIERMTNFDKNLPNEKVLPKHSLLYEYFTVYNELTKVKYVTEGMRKPAFLSGEQKKAIVDLLFKTNRKVTVKQLKEDYFKKIECFDSVEISGVEDRFNASLGTYHDLLKIIKDKDFLDNEENEDILEDIVLTLTLFEDREMIEERLKTYAHLFDDKVMKQLKRRRYTGWGRLSRKLINGIRDKQSGKTILDFLKSDGFANRNFMQLIHDDSLTFKEDIQKAQVSGQGDSLHEHIANLAGSPAIKKGILQTVKVVDELVKVMGRHKPENIVIEMARENQTTQKGQKNSRERMKRIEEGIKELGSQILKEHPVENTQLQNEKLYLYYLQNGRDMYVDQELDINRLSDYDVDHIVPQSFLKDDSIDNKVLTRSDKARGKSDNVPSEEVVKKMKNYWRQLLNAKLITQRKFDNLTKAERGGLSELDKAGFIKRQLVETRQITKHVAQILDSRMNTKYDENDKLIREVKVITLKSKLVSDFRKDFQFYKVREINNYHHAHDAYLNAVVGTALIKKYPKLESEFVYGDYKVYDVRKMIAKSEQEIGKATAKYFFYSNIMNFFKTEITLANGEIRKRPLIETNGETGEIVWDKGRDFATVRKVLSMPQVNIVKKTEVQTGGFSKESILPKRNSDKLIARKKDWDPKKYGGFDSPTVAYSVLVVAKVEKGKSKKLKSVKELLGITIMERSSFEKNPIDFLEAKGYKEVKKDLIIKLPKYSLFELENGRKRMLASAGELQKGNELALPSKYVNFLYLASHYEKLKGSPEDNEQKQLFVEQHKHYLDEIIEQISEFSKRVILADANLDKVLSAYNKHRDKPIREQAENIIHLFTLTNLGAPAAFKYFDTTIDRKRYTSTKEVLDATLIHQSITGLYETRIDLSQLGGDGGGSSPAPGGMDPLQLLQPLEAEIKGTKLKAHWNSGATITCVPEAFLEDERPIQTMLIKTIHGEKQQDVYYLTFKVQGRKVEAEVLASPYDYILLNPSDVPWLMKKPLQLTVLVPLHEYQERLLQQTALPKEQKELLQKLFLKYDALWQHWENQVGHRRIKPHNIATGTLAPRPQKQYPINPKAKPSIQIVIDDLLKQGVLIQQNSTMNTPVYPVPKPDGKWRMVLDYREVNKTIPLIAAQNQHSAGILSSIYRGKYKTTLDLTNGFWAHPITPESYWLTAFTWQGKQYCWTRLPQGFLNSPALFNADVVDLLKEIPNVQAYVDDIYISHDDPQEHLEQLEKIFSILLNAGYVVSLKKSEIAQREVEFLGFNITKEGRGLTDTFKQKLLNITPPKDLKQLQSILGLLNFARNFIPNYSELVKPLYTIVAPANGKFISWTEDNSNQLQHIISVLNQADNLEERNPETRLIIKVNSSPSAGYIRYYNEGSKRPIMYVNYIFSKAEAKFTQTEKLLTTMHKGLIKAMDLAMGQEILVYSPIVSMTKIQRTPLPERKALPVRWITWMTYLEDPRIQFHYDKSLPELQQIPNVTEDVIAKTKHPSEFAMVFYTDGSAIKHPDVNKSHSAGMGIAQVQFIPEYKIVHQWSIPLGDHTAQLAEIAAVEFACKKALKISGPVLIVTDSFYVAESANKELPYWKSNGFLNNKKKPLRHVSKWKSIAECLQLKPDIIIMHEKGHQQPMTTLHTEGNNLADKLATQGSYVVHAGKRTADGSEFEKRTADGSEFESPKKKAKVE

SEQ ID NO: 478 - protein, 2178 aa, synthetic construct
MPAAKRVKLDGGDKKYSIGLDIGTNSVGWAVITDEYKVPSKKFKVLGNTDRHSIKKNLIGALLFDSGETAEATRLKRTARRRYTRRKNRICYLQEIFSNEMAKVDDSFFHRLEESFLVEEDKKHERHPIFGNIVDEVAYHEKYPTIYHLRKKLVDSTDKADLRLIYLALAHMIKFRGHFLIEGDLNPDNSDVDKLFIQLVQTYNQLFEENPINASGVDAKAILSARLSKSRRLENLIAQLPGEKKNGLFGNLIALSLGLTPNFKSNFDLAEDAKLQLSKDTYDDDLDNLLAQIGDQYADLFLAAKNLSDAILLSDILRVNTEITKAPLSASMIKRYDEHHQDLTLLKALVRQQLPEKYKEIFFDQSKNGYAGYIDGGASQEEFYKFIKPILEKMDGTEELLVKLNREDLLRKQRTFDNGSIPHQIHLGELHAILRRQEDFYPFLKDNREKIEKILTFRIPYYVGPLARGNSRFAWMTRKSEETITPWNFEEVVDKGASAQSFIERMTNFDKNLPNEKVLPKHSLLYEYFTVYNELTKVKYVTEGMRKPAFLSGEQKKAIVDLLFKTNRKVTVKQLKEDYFKKIECFDSVEISGVEDRFNASLGTYHDLLKIIKDKDFLDNEENEDILEDIVLTLTLFEDREMIEERLKTYAHLFDDKVMKQLKRRRYTGWGRLSRKLINGIRDKQSGKTILDFLKSDGFANRNFMQLIHDDSLTFKEDIQKAQVSGQGDSLHEHIANLAGSPAIKKGILQTVKVVDELVKVMGRHKPENIVIEMARENQTTQKGQKNSRERMKRIEEGIKELGSQILKEHPVENTQLQNEKLYLYYLQNGRDMYVDQELDINRLSDYDVDHIVPQSFLKDDSIDNKVLTRSDKARGKSDNVPSEEVVKKMKNYWRQLLNAKLITQRKFDNLTKAERGGLSELDKAGFIKRQLVETRQITKHVAQILDSRMNTKYDENDKLIREVKVITLKSKLVSDFRKDFQFYKVREINNYHHAHDAYLNAVVGTALIKKYPKLESEFVYGDYKVYDVRKMIAKSEQEIGKATAKYFFYSNIMNFFKTEITLANGEIRKRPLIETNGETGEIVWDKGRDFATVRKVLSMPQVNIVKKTEVQTGGFSKESILPKRNSDKLIARKKDWDPKKYGGFDSPTVAYSVLVVAKVEKGKSKKLKSVKELLGITIMERSSFEKNPIDFLEAKGYKEVKKDLIIKLPKYSLFELENGRKRMLASAGELQKGNELALPSKYVNFLYLASHYEKLKGSPEDNEQKQLFVEQHKHYLDEIIEQISEFSKRVILADANLDKVLSAYNKHRDKPIREQAENIIHLFTLTNLGAPAAFKYFDTTIDRKRYTSTKEVLDATLIHQSITGLYETRIDLSQLGGDGGPAPAPAPAPAPAPGGMDPLQLLQPLEAEIKGTKLKAHWNSGATITCVPEAFLEDERPIQTMLIKTIHGEKQQDVYYLTFKVQGRKVEAEVLASPYDYILLNPSDVPWLMKKPLQLTVLVPLHEYQERLLQQTALPKEQKELLQKLFLKYDALWQHWENQVGHRRIKPHNIATGTLAPRPQKQYPINPKAKPSIQIVIDDLLKQGVLIQQNSTMNTPVYPVPKPDGKWRMVLDYREVNKTIPLIAAQNQHSAGILSSIYRGKYKTTLDLTNGFWAHPITPESYWLTAFTWQGKQYCWTRLPQGFLNSPALFNADVVDLLKEIPNVQAYVDDIYISHDDPQEHLEQLEKIFSILLNAGYVVSLKKSEIAQREVEFLGFNITKEGRGLTDTFKQKLLNITPPKDLKQLQSILGLLNFARNFIPNYSELVKPLYTIVAPANGKFISWTEDNSNQLQHIISVLNQADNLEERNPETRLIIKVNSSPSAGYIRYYNEGSKRPIMYVNYIFSKAEAKFTQTEKLLTTMHKGLIKAMDLAMGQEILVYSPIVSMTKIQRTPLPERKALPVRWITWMTYLEDPRIQFHYDKSLPELQQIPNVTEDVIAKTKHPSEFAMVFYTDGSAIKHPDVNKSHSAGMGIAQVQFIPEYKIVHQWSIPLGDHTAQLAEIAAVEFACKKALKISGPVLIVTDSFYVAESANKELPYWKSNGFLNNKKKPLRHVSKWKSIAECLQLKPDIIIMHEKGHQQPMTTLHTEGNNLADKLATQGSYVVHAGKRTADGSEFEKRTADGSEFESPKKKAKVE

SEQ ID NO: 479 - protein, 2170 aa, synthetic construct
MPAAKRVKLDGGDKKYSIGLDIGTNSVGWAVITDEYKVPSKKFKVLGNTDRHSIKKNLIGALLFDSGETAEATRLKRTARRRYTRRKNRICYLQEIFSNEMAKVDDSFFHRLEESFLVEEDKKHERHPIFGNIVDEVAYHEKYPTIYHLRKKLVDSTDKADLRLIYLALAHMIKFRGHFLIEGDLNPDNSDVDKLFIQLVQTYNQLFEENPINASGVDAKAILSARLSKSRRLENLIAQLPGEKKNGLFGNLIALSLGLTPNFKSNFDLAEDAKLQLSKDTYDDDLDNLLAQIGDQYADLFLAAKNLSDAILLSDILRVNTEITKAPLSASMIKRYDEHHQDLTLLKALVRQQLPEKYKEIFFDQSKNGYAGYIDGGASQEEFYKFIKPILEKMDGTEELLVKLNREDLLRKQRTFDNGSIPHQIHLGELHAILRRQEDFYPFLKDNREKIEKILTFRIPYYVGPLARGNSRFAWMTRKSEETITPWNFEEVVDKGASAQSFIERMTNFDKNLPNEKVLPKHSLLYEYFTVYNELTKVKYVTEGMRKPAFLSGEQKKAIVDLLFKTNRKVTVKQLKEDYFKKIECFDSVEISGVEDRFNASLGTYHDLLKIIKDKDFLDNEENEDILEDIVLTLTLFEDREMIEERLKTYAHLFDDKVMKQLKRRRYTGWGRLSRKLINGIRDKQSGKTILDFLKSDGFANRNFMQLIHDDSLTFKEDIQKAQVSGQGDSLHEHIANLAGSPAIKKGILQTVKVVDELVKVMGRHKPENIVIEMARENQTTQKGQKNSRERMKRIEEGIKELGSQILKEHPVENTQLQNEKLYLYYLQNGRDMYVDQELDINRLSDYDVDHIVPQSFLKDDSIDNKVLTRSDKARGKSDNVPSEEVVKKMKNYWRQLLNAKLITQRKFDNLTKAERGGLSELDKAGFIKRQLVETRQITKHVAQILDSRMNTKYDENDKLIREVKVITLKSKLVSDFRKDFQFYKVREINNYHHAHDAYLNAVVGTALIKKYPKLESEFVYGDYKVYDVRKMIAKSEQEIGKATAKYFFYSNIMNFFKTEITLANGEIRKRPLIETNGETGEIVWDKGRDFATVRKVLSMPQVNIVKKTEVQTGGFSKESILPKRNSDKLIARKKDWDPKKYGGFDSPTVAYSVLVVAKVEKGKSKKLKSVKELLGITIMERSSFEKNPIDFLEAKGYKEVKKDLIIKLPKYSLFELENGRKRMLASAGELQKGNELALPSKYVNFLYLASHYEKLKGSPEDNEQKQLFVEQHKHYLDEIIEQISEFSKRVILADANLDKVLSAYNKHRDKPIREQAENIIHLFTLTNLGAPAAFKYFDTTIDRKRYTSTKEVLDATLIHQSITGLYETRIDLSQLGGDGGGGGGGGGMDPLQLLQPLEAEIKGTKLKAHWNSGATITCVPEAFLEDERPIQTMLIKTIHGEKQQDVYYLTFKVQGRKVEAEVLASPYDYILLNPSDVPWLMKKPLQLTVLVPLHEYQERLLQQTALPKEQKELLQKLFLKYDALWQHWENQVGHRRIKPHNIATGTLAPRPQKQYPINPKAKPSIQIVIDDLLKQGVLIQQNSTMNTPVYPVPKPDGKWRMVLDYREVNKTIPLIAAQNQHSAGILSSIYRGKYKTTLDLTNGFWAHPITPESYWLTAFTWQGKQYCWTRLPQGFLNSPALFNADVVDLLKEIPNVQAYVDDIYISHDDPQEHLEQLEKIFSILLNAGYVVSLKKSEIAQREVEFLGFNITKEGRGLTDTFKQKLLNITPPKDLKQLQSILGLLNFARNFIPNYSELVKPLYTIVAPANGKFISWTEDNSNQLQHIISVLNQADNLEERNPETRLIIKVNSSPSAGYIRYYNEGSKRPIMYVNYIFSKAEAKFTQTEKLLTTMHKGLIKAMDLAMGQEILVYSPIVSMTKIQRTPLPERKALPVRWITWMTYLEDPRIQFHYDKSLPELQQIPNVTEDVIAKTKHPSEFAMVFYTDGSAIKHPDVNKSHSAGMGIAQVQFIPEYKIVHQWSIPLGDHTAQLAEIAAVEFACKKALKISGPVLIVTDSFYVAESANKELPYWKSNGFLNNKKKPLRHVSKWKSIAECLQLKPDIIIMHEKGHQQPMTTLHTEGNNLADKLATQGSYVVHAGKRTADGSEFEKRTADGSEFESPKKKAKVE

SEQ ID NO: 480 - protein, 2211 aa, synthetic construct
MPAAKRVKLDGGDKKYSIGLDIGTNSVGWAVITDEYKVPSKKFKVLGNTDRHSIKKNLIGALLFDSGETAEATRLKRTARRRYTRRKNRICYLQEIFSNEMAKVDDSFFHRLEESFLVEEDKKHERHPIFGNIVDEVAYHEKYPTIYHLRKKLVDSTDKADLRLIYLALAHMIKFRGHFLIEGDLNPDNSDVDKLFIQLVQTYNQLFEENPINASGVDAKAILSARLSKSRRLENLIAQLPGEKKNGLFGNLIALSLGLTPNFKSNFDLAEDAKLQLSKDTYDDDLDNLLAQIGDQYADLFLAAKNLSDAILLSDILRVNTEITKAPLSASMIKRYDEHHQDLTLLKALVRQQLPEKYKEIFFDQSKNGYAGYIDGGASQEEFYKFIKPILEKMDGTEELLVKLNREDLLRKQRTFDNGSIPHQIHLGELHAILRRQEDFYPFLKDNREKIEKILTFRIPYYVGPLARGNSRFAWMTRKSEETITPWNFEEVVDKGASAQSFIERMTNFDKNLPNEKVLPKHSLLYEYFTVYNELTKVKYVTEGMRKPAFLSGEQKKAIVDLLFKTNRKVTVKQLKEDYFKKIECFDSVEISGVEDRFNASLGTYHDLLKIIKDKDFLDNEENEDILEDIVLTLTLFEDREMIEERLKTYAHLFDDKVMKQLKRRRYTGWGRLSRKLINGIRDKQSGKTILDFLKSDGFANRNFMQLIHDDSLTFKEDIQKAQVSGQGDSLHEHIANLAGSPAIKKGILQTVKVVDELVKVMGRHKPENIVIEMARENQTTQKGQKNSRERMKRIEEGIKELGSQILKEHPVENTQLQNEKLYLYYLQNGRDMYVDQELDINRLSDYDVDHIVPQSFLKDDSIDNKVLTRSDKARGKSDNVPSEEVVKKMKNYWRQLLNAKLITQRKFDNLTKAERGGLSELDKAGFIKRQLVETRQITKHVAQILDSRMNTKYDENDKLIREVKVITLKSKLVSDFRKDFQFYKVREINNYHHAHDAYLNAVVGTALIKKYPKLESEFVYGDYKVYDVRKMIAKSEQEIGKATAKYFFYSNIMNFFKTEITLANGEIRKRPLIETNGETGEIVWDKGRDFATVRKVLSMPQVNIVKKTEVQTGGFSKESILPKRNSDKLIARKKDWDPKKYGGFDSPTVAYSVLVVAKVEKGKSKKLKSVKELLGITIMERSSFEKNPIDFLEAKGYKEVKKDLIIKLPKYSLFELENGRKRMLASAGELQKGNELALPSKYVNFLYLASHYEKLKGSPEDNEQKQLFVEQHKHYLDEIIEQISEFSKRVILADANLDKVLSAYNKHRDKPIREQAENIIHLFTLTNLGAPAAFKYFDTTIDRKRYTSTKEVLDATLIHQSITGLYETRIDLSQLGGDGGAEAAAKEAAAKEAAAKEAAAKALEAEAAAKEAAAKEAAAKEAAAKAGGMDPLQLLQPLEAEIKGTKLKAHWNSGATITCVPEAFLEDERPIQTMLIKTIHGEKQQDVYYLTFKVQGRKVEAEVLASPYDYILLNPSDVPWLMKKPLQLTVLVPLHEYQERLLQQTALPKEQKELLQKLFLKYDALWQHWENQVGHRRIKPHNIATGTLAPRPQKQYPINPKAKPSIQIVIDDLLKQGVLIQQNSTMNTPVYPVPKPDGKWRMVLDYREVNKTIPLIAAQNQHSAGILSSIYRGKYKTTLDLTNGFWAHPITPESYWLTAFTWQGKQYCWTRLPQGFLNSPALFNADVVDLLKEIPNVQAYVDDIYISHDDPQEHLEQLEKIFSILLNAGYVVSLKKSEIAQREVEFLGFNITKEGRGLTDTFKQKLLNITPPKDLKQLQSILGKLNFARNFIPNYSELVKPLYTIVAPANGKFISWTEDNSNQLQHIISVLNQADNLEERNPETRLIIKVNSSPSAGYIRYYNEGSKRPIMYVNYIFSKAEAKFTQTEKLLTTMHKGLIKAMDLAMGQEILVYSPIVSMTKIQRTPLPERKALPVRWITWMTYLEDPRIQFHYDKSLPELQQIPNVTEDVIAKTKHPSEFAMVFYTDGSAIKHPDVNKSHSAGMGIAQVQFIPEYKIVHQWSIPLGDHTAQLAEIAAVEFACKKALKISGPVLIVTDSFYVAESANKELPYWKSNGFLNNKKKPLRHVSKWKSIAECLQLKPDIIIMHEKGHQQPMTTLHTEGNNLADKLATQGSYVVHAGKRTADGSEFEKRTADGSEFESPKKKAKVE

SEQ ID NO: 481 - protein, 2195 aa, synthetic construct
MPAAKRVKLDGGDKKYSIGLDIGTNSVGWAVITDEYKVPSKKFKVLGNTDRHSIKKNLIGALLFDSGETAEATRLKRTARRRYTRRKNRICYLQEIFSNEMAKVDDSFFHRLEESFLVEEDKKHERHPIFGNIVDEVAYHEKYPTIYHLRKKLVDSTDKADLRLIYLALAHMIKFRGHFLIEGDLNPDNSDVDKLFIQLVQTYNQLFEENPINASGVDAKAILSARLSKSRRLENLIAQLPGEKKNGLFGNLIALSLGLTPNFKSNFDLAEDAKLQLSKDTYDDDLDNLLAQIGDQYADLFLAAKNLSDAILLSDILRVNTEITKAPLSASMIKRYDEHHQDLTLLKALVRQQLPEKYKEIFFDQSKNGYAGYIDGGASQEEFYKFIKPILEKMDGTEELLVKLNREDLLRKQRTFDNGSIPHQIHLGELHAILRRQEDFYPFLKDNREKIEKILTFRIPYYVGPLARGNSRFAWMTRKSEETITPWNFEEVVDKGASAQSFIERMTNFDKNLPNEKVLPKHSLLYEYFTVYNELTKVKYVTEGMRKPAFLSGEQKKAIVDLLFKTNRKVTVKQLKEDYFKKIECFDSVEISGVEDRFNASLGTYHDLLKIIKDKDFLDNEENEDILEDIVLTLTLFEDREMIEERLKTYAHLFDDKVMKQLKRRRYTGWGRLSRKLINGIRDKQSGKTILDFLKSDGFANRNFMQLIHDDSLTFKEDIQKAQVSGQGDSLHEHIANLAGSPAIKKGILQTVKVVDELVKVMGRHKPENIVIEMARENQTTQKGQKNSRERMKRIEEGIKELGSQILKEHPVENTQLQNEKLYLYYLQNGRDMYVDQELDINRLSDYDVDHIVPQSFLKDDSIDNKVLTRSDKARGKSDNVPSEEVVKKMKNYWRQLLNAKLITQRKFDNLTKAERGGLSELDKAGFIKRQLVETRQITKHVAQILDSRMNTKYDENDKLIREVKVITLKSKLVSDFRKDFQFYKVREINNYHHAHDAYLNAVVGTALIKKYPKLESEFVYGDYKVYDVRKMIAKSEQEIGKATAKYFFYSNIMNFFKTEITLANGEIRKRPLIETNGETGEIVWDKGRDFATVRKVLSMPQVNIVKKTEVQTGGFSKESILPKRNSDKLIARKKDWDPKKYGGFDSPTVAYSVLVVAKVEKGKSKKLKSVKELLGITIMERSSFEKNPIDFLEAKGYKEVKKDLIIKLPKYSLFELENGRKRMLASAGELQKGNELALPSKYVNFLYLASHYEKLKGSPEDNEQKQLFVEQHKHYLDEIIEQISEFSKRVILADANLDKVLSAYNKHRDKPIREQAENIIHLFTLTNLGAPAAFKYFDTTIDRKRYTSTKEVLDATLIHQSITGLYETRIDLSQLGGDGGEAAAKEAAAKEAAAKEAAAKEAAAKEAAAKGGMDPLQLLQPLEAEIKGTKLKAHWNSGATITCVPEAFLEDERPIQTMLIKTIHGEKQQDVYYLTFKVQGRKVEAEVLASPYDYILLNPSDVPWLMKKPLQLTVLVPLHEYQERLLQQTALPKEQKELLQKLFLKYDALWQHWENQVGHRRIKPHNIATGTLAPRPQKQYPINPKAKPSIQIVIDDLLKQGVLIQQNSTMNTPVYPVPKPDGKWRMVLDYREVNKTIPLIAAQNQHSAGILSSIYRGKYKTTLDLTNGFWAHPITPESYWLTAFTWQGKQYCWTRLPQGFLNSPALFNADVVDLLKEIPNVQAYVDDIYISHDDPQEHLEQLEKIFSILLNAGYVVSLKKSEIAQREVEFLGFNITKEGRGLTDTFKQKLLNITPPKDLKQLQSILGKLNFARNFIPNYSELVKPLYTIVAPANGKFISWTEDNSNQLQHIISVLNQADNLEERNPETRLIIKVNSSPSAGYIRYYNEGSKRPIMYVNYIFSKAEAKFTQTEKLLTTMHKGLIKAMDLAMGQEILVYSPIVSMTKIQRTPLPERKALPVRWITWMTYLEDPRIQFHYDKSLPELQQIPNVTEDVIAKTKHPSEFAMVFYTDGSAIKHPDVNKSHSAGMGIAQVQFIPEYKIVHQWSIPLGDHTAQLAEIAAVEFACKKALKISGPVLIVTDSFYVAESANKELPYWKSNGFLNNKKKPLRHVSKWKSIAECLQLKPDIIIMHEKGHQQPMTTLHTEGNNLADKLATQGSYVVHAGKRTADGSEFEKRTADGSEFESPKKKAKVE

SEQ ID NO: 482 - protein, 2176 aa, synthetic construct
MPAAKRVKLDGGDKKYSIGLDIGTNSVGWAVITDEYKVPSKKFKVLGNTDRHSIKKNLIGALLFDSGETAEATRLKRTARRRYTRRKNRICYLQEIFSNEMAKVDDSFFHRLEESFLVEEDKKHERHPIFGNIVDEVAYHEKYPTIYHLRKKLVDSTDKADLRLIYLALAHMIKFRGHFLIEGDLNPDNSDVDKLFIQLVQTYNQLFEENPINASGVDAKAILSARLSKSRRLENLIAQLPGEKKNGLFGNLIALSLGLTPNFKSNFDLAEDAKLQLSKDTYDDDLDNLLAQIGDQYADLFLAAKNLSDAILLSDILRVNTEITKAPLSASMIKRYDEHHQDLTLLKALVRQQLPEKYKEIFFDQSKNGYAGYIDGGASQEEFYKFIKPILEKMDGTEELLVKLNREDLLRKQRTFDNGSIPHQIHLGELHAILRRQEDFYPFLKDNREKIEKILTFRIPYYVGPLARGNSRFAWMTRKSEETITPWNFEEVVDKGASAQSFIERMTNFDKNLPNEKVLPKHSLLYEYFTVYNELTKVKYVTEGMRKPAFLSGEQKKAIVDLLFKTNRKVTVKQLKEDYFKKIECFDSVEISGVEDRFNASLGTYHDLLKIIKDKDFLDNEENEDILEDIVLTLTLFEDREMIEERLKTYAHLFDDKVMKQLKRRRYTGWGRLSRKLINGIRDKQSGKTILDFLKSDGFANRNFMQLIHDDSLTFKEDIQKAQVSGQGDSLHEHIANLAGSPAIKKGILQTVKVVDELVKVMGRHKPENIVIEMARENQTTQKGQKNSRERMKRIEEGIKELGSQILKEHPVENTQLQNEKLYLYYLQNGRDMYVDQELDINRLSDYDVDHIVPQSFLKDDSIDNKVLTRSDKARGKSDNVPSEEVVKKMKNYWRQLLNAKLITQRKFDNLTKAERGGLSELDKAGFIKRQLVETRQITKHVAQILDSRMNTKYDENDKLIREVKVITLKSKLVSDFRKDFQFYKVREINNYHHAHDAYLNAVVGTALIKKYPKLESEFVYGDYKVYDVRKMIAKSEQEIGKATAKYFFYSNIMNFFKTEITLANGEIRKRPLIETNGETGEIVWDKGRDFATVRKVLSMPQVNIVKKTEVQTGGFSKESILPKRNSDKLIARKKDWDPKKYGGFDSPTVAYSVLVVAKVEKGKSKKLKSVKELLGITIMERSSFEKNPIDFLEAKGYKEVKKDLIIKLPKYSLFELENGRKRMLASAGELQKGNELALPSKYVNFLYLASHYEKLKGSPEDNEQKQLFVEQHKHYLDEIIEQISEFSKRVILADANLDKVLSAYNKHRDKPIREQAENIIHLFTLTNLGAPAAFKYFDTTIDRKRYTSTKEVLDATLIHQSITGLYETRIDLSQLGGDGGEAAAKGGSPAPGGMDPLQLLQPLEAEIKGTKLKAHWNSGATITCVPEAFLEDERPIQTMLIKTIHGEKQQDVYYLTFKVQGRKVEAEVLASPYDYILLNPSDVPWLMKKPLQLTVLVPLHEYQERLLQQTALPKEQKELLQKLFLKYDALWQHWENQVGHRRIKPHNIATGTLAPRPQKQYPINPKAKPSIQIVIDDLLKQGVLIQQNSTMNTPVYPVPKPDGKWRMVLDYREVNKTIPLIAAQNQHSAGILSSIYRGKYKTTLDLTNGFWAHPITPESYWLTAFTWQGKQYCWTRLPQGFLNSPALFNADVVDLLKEIPNVQAYVDDIYISHDDPQEHLEQLEKIFSILLNAGYVVSLKKSEIAQREVEFLGFNITKEGRGLTDTFKQKLLNITPPKDLKQLQSILGKLNFARNFIPNYSELVKPLYTIVAPANGKFISWTEDNSNQLQHIISVLNQADNLEERNPETRLIIKVNSSPSAGYIRYYNEGSKRPIMYVNYIFSKAEAKFTQTEKLLTTMHKGLIKAMDLAMGQEILVYSPIVSMTKIQRTPLPERKALPVRWITWMTYLEDPRIQFHYDKSLPELQQIPNVTEDVIAKTKHPSEFAMVFYTDGSAIKHPDVNKSHSAGMGIAQVQFIPEYKIVHQWSIPLGDHTAQLAEIAAVEFACKKALKISGPVLIVTDSFYVAESANKELPYWKSNGFLNNKKKPLRHVSKWKSIAECLQLKPDIIIMHEKGHQQPMTTLHTEGNNLADKLATQGSYVVHAGKRTADGSEFEKRTADGSEFESPKKKAKVE

SEQ ID NO: 483 - protein, 2174 aa, synthetic construct
MPAAKRVKLDGGDKKYSIGLDIGTNSVGWAVITDEYKVPSKKFKVLGNTDRHSIKKNLIGALLFDSGETAEATRLKRTARRRYTRRKNRICYLQEIFSNEMAKVDDSFFHRLEESFLVEEDKKHERHPIFGNIVDEVAYHEKYPTIYHLRKKLVDSTDKADLRLIYLALAHMIKFRGHFLIEGDLNPDNSDVDKLFIQLVQTYNQLFEENPINASGVDAKAILSARLSKSRRLENLIAQLPGEKKNGLFGNLIALSLGLTPNFKSNFDLAEDAKLQLSKDTYDDDLDNLLAQIGDQYADLFLAAKNLSDAILLSDILRVNTEITKAPLSASMIKRYDEHHQDLTLLKALVRQQLPEKYKEIFFDQSKNGYAGYIDGGASQEEFYKFIKPILEKMDGTEELLVKLNREDLLRKQRTFDNGSIPHQIHLGELHAILRRQEDFYPFLKDNREKIEKILTFRIPYYVGPLARGNSRFAWMTRKSEETITPWNFEEVVDKGASAQSFIERMTNFDKNLPNEKVLPKHSLLYEYFTVYNELTKVKYVTEGMRKPAFLSGEQKKAIVDLLFKTNRKVTVKQLKEDYFKKIECFDSVEISGVEDRFNASLGTYHDLLKIIKDKDFLDNEENEDILEDIVLTLTLFEDREMIEERLKTYAHLFDDKVMKQLKRRRYTGWGRLSRKLINGIRDKQSGKTILDFLKSDGFANRNFMQLIHDDSLTFKEDIQKAQVSGQGDSLHEHIANLAGSPAIKKGILQTVKVVDELVKVMGRHKPENIVIEMARENQTTQKGQKNSRERMKRIEEGIKELGSQILKEHPVENTQLQNEKLYLYYLQNGRDMYVDQELDINRLSDYDVDHIVPQSFLKDDSIDNKVLTRSDKARGKSDNVPSEEVVKKMKNYWRQLLNAKLITQRKFDNLTKAERGGLSELDKAGFIKRQLVETRQITKHVAQILDSRMNTKYDENDKLIREVKVITLKSKLVSDFRKDFQFYKVREINNYHHAHDAYLNAVVGTALIKKYPKLESEFVYGDYKVYDVRKMIAKSEQEIGKATAKYFFYSNIMNFFKTEITLANGEIRKRPLIETNGETGEIVWDKGRDFATVRKVLSMPQVNIVKKTEVQTGGFSKESILPKRNSDKLIARKKDWDPKKYGGFDSPTVAYSVLVVAKVEKGKSKKLKSVKELLGITIMERSSFEKNPIDFLEAKGYKEVKKDLIIKLPKYSLFELENGRKRMLASAGELQKGNELALPSKYVNFLYLASHYEKLKGSPEDNEQKQLFVEQHKHYLDEIIEQISEFSKRVILADANLDKVLSAYNKHRDKPIREQAENIIHLFTLTNLGAPAAFKYFDTTIDRKRYTSTKEVLDATLIHQSITGLYETRIDLSQLGGDGGGGSGSSPAPGGMDPLQLLQPLEAEIKGTKLKAHWNSGATITCVPEAFLEDERPIQTMLIKTIHGEKQQDVYYLTFKVQGRKVEAEVLASPYDYILLNPSDVPWLMKKPLQLTVLVPLHEYQERLLQQTALPKEQKELLQKLFLKYDALWQHWENQVGHRRIKPHNIATGTLAPRPQKQYPINPKAKPSIQIVIDDLLKQGVLIQQNSTMNTPVYPVPKPDGKWRMVLDYREVNKTIPLIAAQNQHSAGILSSIYRGKYKTTLDLTNGFWAHPITPESYWLTAFTWQGKQYCWTRLPQGFLNSPALFNADVVDLLKEIPNVQAYVDDIYISHDDPQEHLEQLEKIFSILLNAGYVVSLKKSEIAQREVEFLGFNITKEGRGLTDTFKQKLLNITPPKDLKQLQSILGKLNFARNFIPNYSELVKPLYTIVAPANGKFISWTEDNSNQLQHIISVLNQADNLEERNPETRLIIKVNSSPSAGYIRYYNEGSKRPIMYVNYIFSKAEAKFTQTEKLLTTMHKGLIKAMDLAMGQEILVYSPIVSMTKIQRTPLPERKALPVRWITWMTYLEDPRIQFHYDKSLPELQQIPNVTEDVIAKTKHPSEFAMVFYTDGSAIKHPDVNKSHSAGMGIAQVQFIPEYKIVHQWSIPLGDHTAQLAEIAAVEFACKKALKISGPVLIVTDSFYVAESANKELPYWKSNGFLNNKKKPLRHVSKWKSIAECLQLKPDIIIMHEKGHQQPMTTLHTEGNNLADKLATQGSYVVHAGKRTADGSEFEKRTADGSEFESPKKKAKVE

SEQ ID NO: 484 - protein, 2171 aa, synthetic construct
MPAAKRVKLDGGDKKYSIGLDIGTNSVGWAVITDEYKVPSKKFKVLGNTDRHSIKKNLIGALLFDSGETAEATRLKRTARRRYTRRKNRICYLQEIFSNEMAKVDDSFFHRLEESFLVEEDKKHERHPIFGNIVDEVAYHEKYPTIYHLRKKLVDSTDKADLRLIYLALAHMIKFRGHFLIEGDLNPDNSDVDKLFIQLVQTYNQLFEENPINASGVDAKAILSARLSKSRRLENLIAQLPGEKKNGLFGNLIALSLGLTPNFKSNFDLAEDAKLQLSKDTYDDDLDNLLAQIGDQYADLFLAAKNLSDAILLSDILRVNTEITKAPLSASMIKRYDEHHQDLTLLKALVRQQLPEKYKEIFFDQSKNGYAGYIDGGASQEEFYKFIKPILEKMDGTEELLVKLNREDLLRKQRTFDNGSIPHQIHLGELHAILRRQEDFYPFLKDNREKIEKILTFRIPYYVGPLARGNSRFAWMTRKSEETITPWNFEEVVDKGASAQSFIERMTNFDKNLPNEKVLPKHSLLYEYFTVYNELTKVKYVTEGMRKPAFLSGEQKKAIVDLLFKTNRKVTVKQLKEDYFKKIECFDSVEISGVEDRFNASLGTYHDLLKIIKDKDFLDNEENEDILEDIVLTLTLFEDREMIEERLKTYAHLFDDKVMKQLKRRRYTGWGRLSRKLINGIRDKQSGKTILDFLKSDGFANRNFMQLIHDDSLTFKEDIQKAQVSGQGDSLHEHIANLAGSPAIKKGILQTVKVVDELVKVMGRHKPENIVIEMARENQTTQKGQKNSRERMKRIEEGIKELGSQILKEHPVENTQLQNEKLYLYYLQNGRDMYVDQELDINRLSDYDVDHIVPQSFLKDDSIDNKVLTRSDKARGKSDNVPSEEVVKKMKNYWRQLLNAKLITQRKFDNLTKAERGGLSELDKAGFIKRQLVETRQITKHVAQILDSRMNTKYDENDKLIREVKVITLKSKLVSDFRKDFQFYKVREINNYHHAHDAYLNAVVGTALIKKYPKLESEFVYGDYKVYDVRKMIAKSEQEIGKATAKYFFYSNIMNFFKTEITLANGEIRKRPLIETNGETGEIVWDKGRDFATVRKVLSMPQVNIVKKTEVQTGGFSKESILPKRNSDKLIARKKDWDPKKYGGFDSPTVAYSVLVVAKVEKGKSKKLKSVKELLGITIMERSSFEKNPIDFLEAKGYKEVKKDLIIKLPKYSLFELENGRKRMLASAGELQKGNELALPSKYVNFLYLASHYEKLKGSPEDNEQKQLFVEQHKHYLDEIIEQISEFSKRVILADANLDKVLSAYNKHRDKPIREQAENIIHLFTLTNLGAPAAFKYFDTTIDRKRYTSTKEVLDATLIHQSITGLYETRIDLSQLGGDGGGGGGGGGGMDPLQLLQPLEAEIKGTKLKAHWNSGATITCVPEAFLEDERPIQTMLIKTIHGEKQQDVYYLTFKVQGRKVEAEVLASPYDYILLNPSDVPWLMKKPLQLTVLVPLHEYQERLLQQTALPKEQKELLQKLFLKYDALWQHWENQVGHRRIKPHNIATGTLAPRPQKQYPINPKAKPSIQIVIDDLLKQGVLIQQNSTMNTPVYPVPKPDGKWRMVLDYREVNKTIPLIAAQNQHSAGILSSIYRGKYKTTLDLTNGFWAHPITPESYWLTAFTWQGKQYCWTRLPQGFLNSPALFNADVVDLLKEIPNVQAYVDDIYISHDDPQEHLEQLEKIFSILLNAGYVVSLKKSEIAQREVEFLGFNITKEGRGLTDTFKQKLLNITPPKDLKQLQSILGKLNFARNFIPNYSELVKPLYTIVAPANGKFISWTEDNSNQLQHIISVLNQADNLEERNPETRLIIKVNSSPSAGYIRYYNEGSKRPIMYVNYIFSKAEAKFTQTEKLLTTMHKGLIKAMDLAMGQEILVYSPIVSMTKIQRTPLPERKALPVRWITWMTYLEDPRIQFHYDKSLPELQQIPNVTEDVIAKTKHPSEFAMVFYTDGSAIKHPDVNKSHSAGMGIAQVQFIPEYKIVHQWSIPLGDHTAQLAEIAAVEFACKKALKISGPVLIVTDSFYVAESANKELPYWKSNGFLNNKKKPLRHVSKWKSIAECLQLKPDIIIMHEKGHQQPMTTLHTEGNNLADKLATQGSYVVHAGKRTADGSEFEKRTADGSEFESPKKKAKVE

SEQ ID NO: 485 - protein, 2176 aa, synthetic construct
MPAAKRVKLDGGDKKYSIGLDIGTNSVGWAVITDEYKVPSKKFKVLGNTDRHSIKKNLIGALLFDSGETAEATRLKRTARRRYTRRKNRICYLQEIFSNEMAKVDDSFFHRLEESFLVEEDKKHERHPIFGNIVDEVAYHEKYPTIYHLRKKLVDSTDKADLRLIYLALAHMIKFRGHFLIEGDLNPDNSDVDKLFIQLVQTYNQLFEENPINASGVDAKAILSARLSKSRRLENLIAQLPGEKKNGLFGNLIALSLGLTPNFKSNFDLAEDAKLQLSKDTYDDDLDNLLAQIGDQYADLFLAAKNLSDAILLSDILRVNTEITKAPLSASMIKRYDEHHQDLTLLKALVRQQLPEKYKEIFFDQSKNGYAGYIDGGASQEEFYKFIKPILEKMDGTEELLVKLNREDLLRKQRTFDNGSIPHQIHLGELHAILRRQEDFYPFLKDNREKIEKILTFRIPYYVGPLARGNSRFAWMTRKSEETITPWNFEEVVDKGASAQSFIERMTNFDKNLPNEKVLPKHSLLYEYFTVYNELTKVKYVTEGMRKPAFLSGEQKKAIVDLLFKTNRKVTVKQLKEDYFKKIECFDSVEISGVEDRFNASLGTYHDLLKIIKDKDFLDNEENEDILEDIVLTLTLFEDREMIEERLKTYAHLFDDKVMKQLKRRRYTGWGRLSRKLINGIRDKQSGKTILDFLKSDGFANRNFMQLIHDDSLTFKEDIQKAQVSGQGDSLHEHIANLAGSPAIKKGILQTVKVVDELVKVMGRHKPENIVIEMARENQTTQKGQKNSRERMKRIEEGIKELGSQILKEHPVENTQLQNEKLYLYYLQNGRDMYVDQELDINRLSDYDVDHIVPQSFLKDDSIDNKVLTRSDKARGKSDNVPSEEVVKKMKNYWRQLLNAKLITQRKFDNLTKAERGGLSELDKAGFIKRQLVETRQITKHVAQILDSRMNTKYDENDKLIREVKVITLKSKLVSDFRKDFQFYKVREINNYHHAHDAYLNAVVGTALIKKYPKLESEFVYGDYKVYDVRKMIAKSEQEIGKATAKYFFYSNIMNFFKTEITLANGEIRKRPLIETNGETGEIVWDKGRDFATVRKVLSMPQVNIVKKTEVQTGGFSKESILPKRNSDKLIARKKDWDPKKYGGFDSPTVAYSVLVVAKVEKGKSKKLKSVKELLGITIMERSSFEKNPIDFLEAKGYKEVKKDLIIKLPKYSLFELENGRKRMLASAGELQKGNELALPSKYVNFLYLASHYEKLKGSPEDNEQKQLFVEQHKHYLDEIIEQISEFSKRVILADANLDKVLSAYNKHRDKPIREQAENIIHLFTLTNLGAPAAFKYFDTTIDRKRYTSTKEVLDATLIHQSITGLYETRIDLSQLGGDGGGSSGGGEAAAKGGMDPLQLLQPLEAEIKGTKLKAHWNSGATITCVPEAFLEDERPIQTMLIKTIHGEKQQDVYYLTFKVQGRKVEAEVLASPYDYILLNPSDVPWLMKKPLQLTVLVPLHEYQERLLQQTALPKEQKELLQKLFLKYDALWQHWENQVGHRRIKPHNIATGTLAPRPQKQYPINPKAKPSIQIVIDDLLKQGVLIQQNSTMNTPVYPVPKPDGKWRMVLDYREVNKTIPLIAAQNQHSAGILSSIYRGKYKTTLDLTNGFWAHPITPESYWLTAFTWQGKQYCWTRLPQGFLNSPALFNADVVDLLKEIPNVQAYVDDIYISHDDPQEHLEQLEKIFSILLNAGYVVSLKKSEIAQREVEFLGFNITKEGRGLTDTFKQKLLNITPPKDLKQLQSILGKLNFARNFIPNYSELVKPLYTIVAPANGKFISWTEDNSNQLQHIISVLNQADNLEERNPETRLIIKVNSSPSAGYIRYYNEGSKRPIMYVNYIFSKAEAKFTQTEKLLTTMHKGLIKAMDLAMGQEILVYSPIVSMTKIQRTPLPERKALPVRWITWMTYLEDPRIQFHYDKSLPELQQIPNVTEDVIAKTKHPSEFAMVFYTDGSAIKHPDVNKSHSAGMGIAQVQFIPEYKIVHQWSIPLGDHTAQLAEIAAVEFACKKALKISGPVLIVTDSFYVAESANKELPYWKSNGFLNNKKKPLRHVSKWKSIAECLQLKPDIIIMHEKGHQQPMTTLHTEGNNLADKLATQGSYVVHAGKRTADGSEFEKRTADGSEFESPKKKAKVE

SEQ ID NO: 486 - protein, 2176 aa, synthetic construct
MPAAKRVKLDGGDKKYSIGLDIGTNSVGWAVITDEYKVPSKKFKVLGNTDRHSIKKNLIGALLFDSGETAEATRLKRTARRRYTRRKNRICYLQEIFSNEMAKVDDSFFHRLEESFLVEEDKKHERHPIFGNIVDEVAYHEKYPTIYHLRKKLVDSTDKADLRLIYLALAHMIKFRGHFLIEGDLNPDNSDVDKLFIQLVQTYNQLFEENPINASGVDAKAILSARLSKSRRLENLIAQLPGEKKNGLFGNLIALSLGLTPNFKSNFDLAEDAKLQLSKDTYDDDLDNLLAQIGDQYADLFLAAKNLSDAILLSDILRVNTEITKAPLSASMIKRYDEHHQDLTLLKALVRQQLPEKYKEIFFDQSKNGYAGYIDGGASQEEFYKFIKPILEKMDGTEELLVKLNREDLLRKQRTFDNGSIPHQIHLGELHAILRRQEDFYPFLKDNREKIEKILTFRIPYYVGPLARGNSRFAWMTRKSEETITPWNFEEVVDKGASAQSFIERMTNFDKNLPNEKVLPKHSLLYEYFTVYNELTKVKYVTEGMRKPAFLSGEQKKAIVDLLFKTNRKVTVKQLKEDYFKKIECFDSVEISGVEDRFNASLGTYHDLLKIIKDKDFLDNEENEDILEDIVLTLTLFEDREMIEERLKTYAHLFDDKVMKQLKRRRYTGWGRLSRKLINGIRDKQSGKTILDFLKSDGFANRNFMQLIHDDSLTFKEDIQKAQVSGQGDSLHEHIANLAGSPAIKKGILQTVKVVDELVKVMGRHKPENIVIEMARENQTTQKGQKNSRERMKRIEEGIKELGSQILKEHPVENTQLQNEKLYLYYLQNGRDMYVDQELDINRLSDYDVDHIVPQSFLKDDSIDNKVLTRSDKARGKSDNVPSEEVVKKMKNYWRQLLNAKLITQRKFDNLTKAERGGLSELDKAGFIKRQLVETRQITKHVAQILDSRMNTKYDENDKLIREVKVITLKSKLVSDFRKDFQFYKVREINNYHHAHDAYLNAVVGTALIKKYPKLESEFVYGDYKVYDVRKMIAKSEQEIGKATAKYFFYSNIMNFFKTEITLANGEIRKRPLIETNGETGEIVWDKGRDFATVRKVLSMPQVNIVKKTEVQTGGFSKESILPKRNSDKLIARKKDWDPKKYGGFDSPTVAYSVLVVAKVEKGKSKKLKSVKELLGITIMERSSFEKNPIDFLEAKGYKEVKKDLIIKLPKYSLFELENGRKRMLASAGELQKGNELALPSKYVNFLYLASHYEKLKGSPEDNEQKQLFVEQHKHYLDEIIEQISEFSKRVILADANLDKVLSAYNKHRDKPIREQAENIIHLFTLTNLGAPAAFKYFDTTIDRKRYTSTKEVLDATLIHQSITGLYETRIDLSQLGGDGGPAPAPAPAPAPGGMDPLQLLQPLEAEIKGTKLKAHWNSGATITCVPEAFLEDERPIQTMLIKTIHGEKQQDVYYLTFKVQGRKVEAEVLASPYDYILLNPSDVPWLMKKPLQLTVLVPLHEYQERLLQQTALPKEQKELLQKLFLKYDALWQHWENQVGHRRIKPHNIATGTLAPRPQKQYPINPKAKPSIQIVIDDLLKQGVLIQQNSTMNTPVYPVPKPDGKWRMVLDYREVNKTIPLIAAQNQHSAGILSSIYRGKYKTTLDLTNGFWAHPITPESYWLTAFTWQGKQYCWTRLPQGFLNSPALFNADVVDLLKEIPNVQAYVDDIYISHDDPQEHLEQLEKIFSILLNAGYVVSLKKSEIAQREVEFLGFNITKEGRGLTDTFKQKLLNITPPKDLKQLQSILGKLNFARNFIPNYSELVKPLYTIVAPANGKFISWTEDNSNQLQHIISVLNQADNLEERNPETRLIIKVNSSPSAGYIRYYNEGSKRPIMYVNYIFSKAEAKFTQTEKLLTTMHKGLIKAMDLAMGQEILVYSPIVSMTKIQRTPLPERKALPVRWITWMTYLEDPRIQFHYDKSLPELQQIPNVTEDVIAKTKHPSEFAMVFYTDGSAIKHPDVNKSHSAGMGIAQVQFIPEYKIVHQWSIPLGDHTAQLAEIAAVEFACKKALKISGPVLIVTDSFYVAESANKELPYWKSNGFLNNKKKPLRHVSKWKSIAECLQLKPDIIIMHEKGHQQPMTTLHTEGNNLADKLATQGSYVVHAGKRTADGSEFEKRTADGSEFESPKKKAKVE

SEQ ID NO: 487 - protein, 2177 aa, synthetic construct
MPAAKRVKLDGGDKKYSIGLDIGTNSVGWAVITDEYKVPSKKFKVLGNTDRHSIKKNLIGALLFDSGETAEATRLKRTARRRYTRRKNRICYLQEIFSNEMAKVDDSFFHRLEESFLVEEDKKHERHPIFGNIVDEVAYHEKYPTIYHLRKKLVDSTDKADLRLIYLALAHMIKFRGHFLIEGDLNPDNSDVDKLFIQLVQTYNQLFEENPINASGVDAKAILSARLSKSRRLENLIAQLPGEKKNGLFGNLIALSLGLTPNFKSNFDLAEDAKLQLSKDTYDDDLDNLLAQIGDQYADLFLAAKNLSDAILLSDILRVNTEITKAPLSASMIKRYDEHHQDLTLLKALVRQQLPEKYKEIFFDQSKNGYAGYIDGGASQEEFYKFIKPILEKMDGTEELLVKLNREDLLRKQRTFDNGSIPHQIHLGELHAILRRQEDFYPFLKDNREKIEKILTFRIPYYVGPLARGNSRFAWMTRKSEETITPWNFEEVVDKGASAQSFIERMTNFDKNLPNEKVLPKHSLLYEYFTVYNELTKVKYVTEGMRKPAFLSGEQKKAIVDLLFKTNRKVTVKQLKEDYFKKIECFDSVEISGVEDRFNASLGTYHDLLKIIKDKDFLDNEENEDILEDIVLTLTLFEDREMIEERLKTYAHLFDDKVMKQLKRRRYTGWGRLSRKLINGIRDKQSGKTILDFLKSDGFANRNFMQLIHDDSLTFKEDIQKAQVSGQGDSLHEHIANLAGSPAIKKGILQTVKVVDELVKVMGRHKPENIVIEMARENQTTQKGQKNSRERMKRIEEGIKELGSQILKEHPVENTQLQNEKLYLYYLQNGRDMYVDQELDINRLSDYDVDHIVPQSFLKDDSIDNKVLTRSDKARGKSDNVPSEEVVKKMKNYWRQLLNAKLITQRKFDNLTKAERGGLSELDKAGFIKRQLVETRQITKHVAQILDSRMNTKYDENDKLIREVKVITLKSKLVSDFRKDFQFYKVREINNYHHAHDAYLNAVVGTALIKKYPKLESEFVYGDYKVYDVRKMIAKSEQEIGKATAKYFFYSNIMNFFKTEITLANGEIRKRPLIETNGETGEIVWDKGRDFATVRKVLSMPQVNIVKKTEVQTGGFSKESILPKRNSDKLIARKKDWDPKKYGGFDSPTVAYSVLVVAKVEKGKSKKLKSVKELLGITIMERSSFEKNPIDFLEAKGYKEVKKDLIIKLPKYSLFELENGRKRMLASAGELQKGNELALPSKYVNFLYLASHYEKLKGSPEDNEQKQLFVEQHKHYLDEIIEQISEFSKRVILADANLDKVLSAYNKHRDKPIREQAENIIHLFTLTNLGAPAAFKYFDTTIDRKRYTSTKEVLDATLIHQSITGLYETRIDLSQLGGDGGGGSGGSGGSGGSGGMDPLQLLQPLEAEIKGTKLKAHWNSGATITCVPEAFLEDERPIQTMLIKTIHGEKQQDVYYLTFKVQGRKVEAEVLASPYDYILLNPSDVPWLMKKPLQLTVLVPLHEYQERLLQQTALPKEQKELLQKLFLKYDALWQHWENQVGHRRIKPHNIATGTLAPRPQKQYPINPKAKPSIQIVIDDLLKQGVLIQQNSTMNTPVYPVPKPDGKWRMVLDYREVNKTIPLIAAQNQHSAGILSSIYRGKYKTTLDLTNGFWAHPITPESYWLTAFTWQGKQYCWTRLPQGFLNSPALFNADVVDLLKEIPNVQAYVDDIYISHDDPQEHLEQLEKIFSILLNAGYVVSLKKSEIAQREVEFLGFNITKEGRGLTDTFKQKLLNITPPKDLKQLQSILGKLNFARNFIPNYSELVKPLYTIVAPANGKFISWTEDNSNQLQHIISVLNQADNLEERNPETRLIIKVNSSPSAGYIRYYNEGSKRPIMYVNYIFSKAEAKFTQTEKLLTTMHKGLIKAMDLAMGQEILVYSPIVSMTKIQRTPLPERKALPVRWITWMTYLEDPRIQFHYDKSLPELQQIPNVTEDVIAKTKHPSEFAMVFYTDGSAIKHPDVNKSHSAGMGIAQVQFIPEYKIVHQWSIPLGDHTAQLAEIAAVEFACKKALKISGPVLIVTDSFYVAESANKELPYWKSNGFLNNKKKPLRHVSKWKSIAECLQLKPDIIIMHEKGHQQPMTTLHTEGNNLADKLATQGSYVVHAGKRTADGSEFEKRTADGSEFESPKKKAKVE

SEQ ID NO: 488 - protein, 2171 aa, synthetic construct
MPAAKRVKLDGGDKKYSIGLDIGTNSVGWAVITDEYKVPSKKFKVLGNTDRHSIKKNLIGALLFDSGETAEATRLKRTARRRYTRRKNRICYLQEIFSNEMAKVDDSFFHRLEESFLVEEDKKHERHPIFGNIVDEVAYHEKYPTIYHLRKKLVDSTDKADLRLIYLALAHMIKFRGHFLIEGDLNPDNSDVDKLFIQLVQTYNQLFEENPINASGVDAKAILSARLSKSRRLENLIAQLPGEKKNGLFGNLIALSLGLTPNFKSNFDLAEDAKLQLSKDTYDDDLDNLLAQIGDQYADLFLAAKNLSDAILLSDILRVNTEITKAPLSASMIKRYDEHHQDLTLLKALVRQQLPEKYKEIFFDQSKNGYAGYIDGGASQEEFYKFIKPILEKMDGTEELLVKLNREDLLRKQRTFDNGSIPHQIHLGELHAILRRQEDFYPFLKDNREKIEKILTFRIPYYVGPLARGNSRFAWMTRKSEETITPWNFEEVVDKGASAQSFIERMTNFDKNLPNEKVLPKHSLLYEYFTVYNELTKVKYVTEGMRKPAFLSGEQKKAIVDLLFKTNRKVTVKQLKEDYFKKIECFDSVEISGVEDRFNASLGTYHDLLKIIKDKDFLDNEENEDILEDIVLTLTLFEDREMIEERLKTYAHLFDDKVMKQLKRRRYTGWGRLSRKLINGIRDKQSGKTILDFLKSDGFANRNFMQLIHDDSLTFKEDIQKAQVSGQGDSLHEHIANLAGSPAIKKGILQTVKVVDELVKVMGRHKPENIVIEMARENQTTQKGQKNSRERMKRIEEGIKELGSQILKEHPVENTQLQNEKLYLYYLQNGRDMYVDQELDINRLSDYDVDHIVPQSFLKDDSIDNKVLTRSDKARGKSDNVPSEEVVKKMKNYWRQLLNAKLITQRKFDNLTKAERGGLSELDKAGFIKRQLVETRQITKHVAQILDSRMNTKYDENDKLIREVKVITLKSKLVSDFRKDFQFYKVREINNYHHAHDAYLNAVVGTALIKKYPKLESEFVYGDYKVYDVRKMIAKSEQEIGKATAKYFFYSNIMNFFKTEITLANGEIRKRPLIETNGETGEIVWDKGRDFATVRKVLSMPQVNIVKKTEVQTGGFSKESILPKRNSDKLIARKKDWDPKKYGGFDSPTVAYSVLVVAKVEKGKSKKLKSVKELLGITIMERSSFEKNPIDFLEAKGYKEVKKDLIIKLPKYSLFELENGRKRMLASAGELQKGNELALPSKYVNFLYLASHYEKLKGSPEDNEQKQLFVEQHKHYLDEIIEQISEFSKRVILADANLDKVLSAYNKHRDKPIREQAENIIHLFTLTNLGAPAAFKYFDTTIDRKRYTSTKEVLDATLIHQSITGLYETRIDLSQLGGDGGGGGGGSGGMDPLQLLQPLEAEIKGTKLKAHWNSGATITCVPEAFLEDERPIQTMLIKTIHGEKQQDVYYLTFKVQGRKVEAEVLASPYDYILLNPSDVPWLMKKPLQLTVLVPLHEYQERLLQQTALPKEQKELLQKLFLKYDALWQHWENQVGHRRIKPHNIATGTLAPRPQKQYPINPKAKPSIQIVIDDLLKQGVLIQQNSTMNTPVYPVPKPDGKWRMVLDYREVNKTIPLIAAQNQHSAGILSSIYRGKYKTTLDLTNGFWAHPITPESYWLTAFTWQGKQYCWTRLPQGFLNSPALFNADVVDLLKEIPNVQAYVDDIYISHDDPQEHLEQLEKIFSILLNAGYVVSLKKSEIAQREVEFLGFNITKEGRGLTDTFKQKLLNITPPKDLKQLQSILGKLNFARNFIPNYSELVKPLYTIVAPANGKFISWTEDNSNQLQHIISVLNQADNLEERNPETRLIIKVNSSPSAGYIRYYNEGSKRPIMYVNYIFSKAEAKFTQTEKLLTTMHKGLIKAMDLAMGQEILVYSPIVSMTKIQRTPLPERKALPVRWITWMTYLEDPRIQFHYDKSLPELQQIPNVTEDVIAKTKHPSEFAMVFYTDGSAIKHPDVNKSHSAGMGIAQVQFIPEYKIVHQWSIPLGDHTAQLAEIAAVEFACKKALKISGPVLIVTDSFYVAESANKELPYWKSNGFLNNKKKPLRHVSKWKSIAECLQLKPDIIIMHEKGHQQPMTTLHTEGNNLADKLATQGSYVVHAGKRTADGSEFEKRTADGSEFESPKKKAKVE

SEQ ID NO: 489 - protein, 2211 aa, synthetic construct
MPAAKRVKLDGGDKKYSIGLDIGTNSVGWAVITDEYKVPSKKFKVLGNTDRHSIKKNLIGALLFDSGETAEATRLKRTARRRYTRRKNRICYLQEIFSNEMAKVDDSFFHRLEESFLVEEDKKHERHPIFGNIVDEVAYHEKYPTIYHLRKKLVDSTDKADLRLIYLALAHMIKFRGHFLIEGDLNPDNSDVDKLFIQLVQTYNQLFEENPINASGVDAKAILSARLSKSRRLENLIAQLPGEKKNGLFGNLIALSLGLTPNFKSNFDLAEDAKLQLSKDTYDDDLDNLLAQIGDQYADLFLAAKNLSDAILLSDILRVNTEITKAPLSASMIKRYDEHHQDLTLLKALVRQQLPEKYKEIFFDQSKNGYAGYIDGGASQEEFYKFIKPILEKMDGTEELLVKLNREDLLRKQRTFDNGSIPHQIHLGELHAILRRQEDFYPFLKDNREKIEKILTFRIPYYVGPLARGNSRFAWMTRKSEETITPWNFEEVVDKGASAQSFIERMTNFDKNLPNEKVLPKHSLLYEYFTVYNELTKVKYVTEGMRKPAFLSGEQKKAIVDLLFKTNRKVTVKQLKEDYFKKIECFDSVEISGVEDRFNASLGTYHDLLKIIKDKDFLDNEENEDILEDIVLTLTLFEDREMIEERLKTYAHLFDDKVMKQLKRRRYTGWGRLSRKLINGIRDKQSGKTILDFLKSDGFANRNFMQLIHDDSLTFKEDIQKAQVSGQGDSLHEHIANLAGSPAIKKGILQTVKVVDELVKVMGRHKPENIVIEMARENQTTQKGQKNSRERMKRIEEGIKELGSQILKEHPVENTQLQNEKLYLYYLQNGRDMYVDQELDINRLSDYDVDHIVPQSFLKDDSIDNKVLTRSDKARGKSDNVPSEEVVKKMKNYWRQLLNAKLITQRKFDNLTKAERGGLSELDKAGFIKRQLVETRQITKHVAQILDSRMNTKYDENDKLIREVKVITLKSKLVSDFRKDFQFYKVREINNYHHAHDAYLNAVVGTALIKKYPKLESEFVYGDYKVYDVRKMIAKSEQEIGKATAKYFFYSNIMNFFKTEITLANGEIRKRPLIETNGETGEIVWDKGRDFATVRKVLSMPQVNIVKKTEVQTGGFSKESILPKRNSDKLIARKKDWDPKKYGGFDSPTVAYSVLVVAKVEKGKSKKLKSVKELLGITIMERSSFEKNPIDFLEAKGYKEVKKDLIIKLPKYSLFELENGRKRMLASAGELQKGNELALPSKYVNFLYLASHYEKLKGSPEDNEQKQLFVEQHKHYLDEIIEQISEFSKRVILADANLDKVLSAYNKHRDKPIREQAENIIHLFTLTNLGAPAAFKYFDTTIDRKRYTSTKEVLDATLIHQSITGLYETRIDLSQLGGDGGAEAAAKEAAAKEAAAKEAAAKALEAEAAAKEAAAKEAAAKEAAAKAGGMDPLQLLQPLEAEIKGTKLKAHWNSGATITCVPQAFLEEEVPIKNIWIKTIHGEKEQPVYYLTFKIQGRKVEAEVISSPYDYILVSPSDIPWLMKKPLQLTTLVPLQEYEERLLKQTMLTGSYKEKLQSLFLKYDALWQHWENQVGHRRIKPHHIATGTVNPRPQKQYPINPKAKASIQTVINDLLKQGVLIQQNSIMNTPVYPVPKPDGKWRMVLDYREVNKTIPLIAAQNQHSAGILSSIFRGKYKTTLDLSNGFWAHSITPESYWLTAFTWLGQQYCWTRLPQGFLNSPALFTADVVDLLKEVPNVQVYVDDIYISHDDPREHLEQLEKVFSLLLNAGYVVSLKKSEIAQHEVEFLGFNITKEGRGLTETFKQKLLNITPPRDLKQLQSILGLLNFARNFIPNFSELVKPLYNIIATANGKYITWTTDNSQQLQNIISMLNSAENLEERNPEVRLIMKVNTSPSAGYIRFYNEFAKRPIMYLNYVYTKAEVKFTNTEKLLTTIHKGLIKALDLGMGQEILVYSPIVSMTKIQKTPLPERKALPIRWITWMSYLEDPRIQFHYDKTLPELQQVPTVTDDIIAKIKHPSEFSMVFYTDGSAIKHPNVNKSHNAGMGIAQVQFKPEFTVINTWSIPLGDHTAQLAEVAAVEFACKKALKIDGPVLIVTDSFYVAESVNKELPYWQSNGFFNNKKKPLKHVSKWKSIADCIQLKPDIIIIHEKGHQPTASTFHTEGNNLADKLATQGSYVVNAGKRTADGSEFEKRTADGSEFESPKKKAKVE

SEQ ID NO: 490 - protein, 2190 aa, synthetic construct
MPAAKRVKLDGGDKKYSIGLDIGTNSVGWAVITDEYKVPSKKFKVLGNTDRHSIKKNLIGALLFDSGETAEATRLKRTARRRYTRRKNRICYLQEIFSNEMAKVDDSFFHRLEESFLVEEDKKHERHPIFGNIVDEVAYHEKYPTIYHLRKKLVDSTDKADLRLIYLALAHMIKFRGHFLIEGDLNPDNSDVDKLFIQLVQTYNQLFEENPINASGVDAKAILSARLSKSRRLENLIAQLPGEKKNGLFGNLIALSLGLTPNFKSNFDLAEDAKLQLSKDTYDDDLDNLLAQIGDQYADLFLAAKNLSDAILLSDILRVNTEITKAPLSASMIKRYDEHHQDLTLLKALVRQQLPEKYKEIFFDQSKNGYAGYIDGGASQEEFYKFIKPILEKMDGTEELLVKLNREDLLRKQRTFDNGSIPHQIHLGELHAILRRQEDFYPFLKDNREKIEKILTFRIPYYVGPLARGNSRFAWMTRKSEETITPWNFEEVVDKGASAQSFIERMTNFDKNLPNEKVLPKHSLLYEYFTVYNELTKVKYVTEGMRKPAFLSGEQKKAIVDLLFKTNRKVTVKQLKEDYFKKIECFDSVEISGVEDRFNASLGTYHDLLKIIKDKDFLDNEENEDILEDIVLTLTLFEDREMIEERLKTYAHLFDDKVMKQLKRRRYTGWGRLSRKLINGIRDKQSGKTILDFLKSDGFANRNFMQLIHDDSLTFKEDIQKAQVSGQGDSLHEHIANLAGSPAIKKGILQTVKVVDELVKVMGRHKPENIVIEMARENQTTQKGQKNSRERMKRIEEGIKELGSQILKEHPVENTQLQNEKLYLYYLQNGRDMYVDQELDINRLSDYDVDHIVPQSFLKDDSIDNKVLTRSDKARGKSDNVPSEEVVKKMKNYWRQLLNAKLITQRKFDNLTKAERGGLSELDKAGFIKRQLVETRQITKHVAQILDSRMNTKYDENDKLIREVKVITLKSKLVSDFRKDFQFYKVREINNYHHAHDAYLNAVVGTALIKKYPKLESEFVYGDYKVYDVRKMIAKSEQEIGKATAKYFFYSNIMNFFKTEITLANGEIRKRPLIETNGETGEIVWDKGRDFATVRKVLSMPQVNIVKKTEVQTGGFSKESILPKRNSDKLIARKKDWDPKKYGGFDSPTVAYSVLVVAKVEKGKSKKLKSVKELLGITIMERSSFEKNPIDFLEAKGYKEVKKDLIIKLPKYSLFELENGRKRMLASAGELQKGNELALPSKYVNFLYLASHYEKLKGSPEDNEQKQLFVEQHKHYLDEIIEQISEFSKRVILADANLDKVLSAYNKHRDKPIREQAENIIHLFTLTNLGAPAAFKYFDTTIDRKRYTSTKEVLDATLIHQSITGLYETRIDLSQLGGDGGEAAAKEAAAKEAAAKEAAAKEAAAKGGMDPLQLLQPLEAEIKGTKLKAHWNSGATITCVPQAFLEEEVPIKNIWIKTIHGEKEQPVYYLTFKIQGRKVEAEVISSPYDYILVSPSDIPWLMKKPLQLTTLVPLQEYEERLLKQTMLTGSYKEKLQSLFLKYDALWQHWENQVGHRRIKPHHIATGTVNPRPQKQYPINPKAKASIQTVINDLLKQGVLIQQNSIMNTPVYPVPKPDGKWRMVLDYREVNKTIPLIAAQNQHSAGILSSIFRGKYKTTLDLSNGFWAHSITPESYWLTAFTWLGQQYCWTRLPQGFLNSPALFTADVVDLLKEVPNVQVYVDDIYISHDDPREHLEQLEKVFSLLLNAGYVVSLKKSEIAQHEVEFLGFNITKEGRGLTETFKQKLLNITPPRDLKQLQSILGLLNFARNFIPNFSELVKPLYNIIATANGKYITWTTDNSQQLQNIISMLNSAENLEERNPEVRLIMKVNTSPSAGYIRFYNEFAKRPIMYLNYVYTKAEVKFTNTEKLLTTIHKGLIKALDLGMGQEILVYSPIVSMTKIQKTPLPERKALPIRWITWMSYLEDPRIQFHYDKTLPELQQVPTVTDDIIAKIKHPSEFSMVFYTDGSAIKHPNVNKSHNAGMGIAQVQFKPEFTVINTWSIPLGDHTAQLAEVAAVEFACKKALKIDGPVLIVTDSFYVAESVNKELPYWQSNGFFNNKKKPLKHVSKWKSIADCIQLKPDIIIIHEKGHQPTASTFHTEGNNLADKLATQGSYVVNAGKRTADGSEFEKRTADGSEFESPKKKAKVE

SEQ ID NO: 491 - protein, 2176 aa, synthetic construct
MPAAKRVKLDGGDKKYSIGLDIGTNSVGWAVITDEYKVPSKKFKVLGNTDRHSIKKNLIGALLFDSGETAEATRLKRTARRRYTRRKNRICYLQEIFSNEMAKVDDSFFHRLEESFLVEEDKKHERHPIFGNIVDEVAYHEKYPTIYHLRKKLVDSTDKADLRLIYLALAHMIKFRGHFLIEGDLNPDNSDVDKLFIQLVQTYNQLFEENPINASGVDAKAILSARLSKSRRLENLIAQLPGEKKNGLFGNLIALSLGLTPNFKSNFDLAEDAKLQLSKDTYDDDLDNLLAQIGDQYADLFLAAKNLSDAILLSDILRVNTEITKAPLSASMIKRYDEHHQDLTLLKALVRQQLPEKYKEIFFDQSKNGYAGYIDGGASQEEFYKFIKPILEKMDGTEELLVKLNREDLLRKQRTFDNGSIPHQIHLGELHAILRRQEDFYPFLKDNREKIEKILTFRIPYYVGPLARGNSRFAWMTRKSEETITPWNFEEVVDKGASAQSFIERMTNFDKNLPNEKVLPKHSLLYEYFTVYNELTKVKYVTEGMRKPAFLSGEQKKAIVDLLFKTNRKVTVKQLKEDYFKKIECFDSVEISGVEDRFNASLGTYHDLLKIIKDKDFLDNEENEDILEDIVLTLTLFEDREMIEERLKTYAHLFDDKVMKQLKRRRYTGWGRLSRKLINGIRDKQSGKTILDFLKSDGFANRNFMQLIHDDSLTFKEDIQKAQVSGQGDSLHEHIANLAGSPAIKKGILQTVKVVDELVKVMGRHKPENIVIEMARENQTTQKGQKNSRERMKRIEEGIKELGSQILKEHPVENTQLQNEKLYLYYLQNGRDMYVDQELDINRLSDYDVDHIVPQSFLKDDSIDNKVLTRSDKARGKSDNVPSEEVVKKMKNYWRQLLNAKLITQRKFDNLTKAERGGLSELDKAGFIKRQLVETRQITKHVAQILDSRMNTKYDENDKLIREVKVITLKSKLVSDFRKDFQFYKVREINNYHHAHDAYLNAVVGTALIKKYPKLESEFVYGDYKVYDVRKMIAKSEQEIGKATAKYFFYSNIMNFFKTEITLANGEIRKRPLIETNGETGEIVWDKGRDFATVRKVLSMPQVNIVKKTEVQTGGFSKESILPKRNSDKLIARKKDWDPKKYGGFDSPTVAYSVLVVAKVEKGKSKKLKSVKELLGITIMERSSFEKNPIDFLEAKGYKEVKKDLIIKLPKYSLFELENGRKRMLASAGELQKGNELALPSKYVNFLYLASHYEKLKGSPEDNEQKQLFVEQHKHYLDEIIEQISEFSKRVILADANLDKVLSAYNKHRDKPIREQAENIIHLFTLTNLGAPAAFKYFDTTIDRKRYTSTKEVLDATLIHQSITGLYETRIDLSQLGGDGGEAAAKGGGPAPGGMDPLQLLQPLEAEIKGTKLKAHWNSGATITCVPQAFLEEEVPIKNIWIKTIHGEKEQPVYYLTFKIQGRKVEAEVISSPYDYILVSPSDIPWLMKKPLQLTTLVPLQEYEERLLKQTMLTGSYKEKLQSLFLKYDALWQHWENQVGHRRIKPHHIATGTVNPRPQKQYPINPKAKASIQTVINDLLKQGVLIQQNSIMNTPVYPVPKPDGKWRMVLDYREVNKTIPLIAAQNQHSAGILSSIFRGKYKTTLDLSNGFWAHSITPESYWLTAFTWLGQQYCWTRLPQGFLNSPALFTADVVDLLKEVPNVQVYVDDIYISHDDPREHLEQLEKVFSLLLNAGYVVSLKKSEIAQHEVEFLGFNITKEGRGLTETFKQKLLNITPPRDLKQLQSILGLLNFARNFIPNFSELVKPLYNIIATANGKYITWTTDNSQQLQNIISMLNSAENLEERNPEVRLIMKVNTSPSAGYIRFYNEFAKRPIMYLNYVYTKAEVKFTNTEKLLTTIHKGLIKALDLGMGQEILVYSPIVSMTKIQKTPLPERKALPIRWITWMSYLEDPRIQFHYDKTLPELQQVPTVTDDIIAKIKHPSEFSMVFYTDGSAIKHPNVNKSHNAGMGIAQVQFKPEFTVINTWSIPLGDHTAQLAEVAAVEFACKKALKIDGPVLIVTDSFYVAESVNKELPYWQSNGFFNNKKKPLKHVSKWKSIADCIQLKPDIIIIHEKGHQPTASTFHTEGNNLADKLATQGSYVVNAGKRTADGSEFEKRTADGSEFESPKKKAKVE

SEQ ID NO: 492 - protein, 2180 aa, synthetic construct
MPAAKRVKLDGGDKKYSIGLDIGTNSVGWAVITDEYKVPSKKFKVLGNTDRHSIKKNLIGALLFDSGETAEATRLKRTARRRYTRRKNRICYLQEIFSNEMAKVDDSFFHRLEESFLVEEDKKHERHPIFGNIVDEVAYHEKYPTIYHLRKKLVDSTDKADLRLIYLALAHMIKFRGHFLIEGDLNPDNSDVDKLFIQLVQTYNQLFEENPINASGVDAKAILSARLSKSRRLENLIAQLPGEKKNGLFGNLIALSLGLTPNFKSNFDLAEDAKLQLSKDTYDDDLDNLLAQIGDQYADLFLAAKNLSDAILLSDILRVNTEITKAPLSASMIKRYDEHHQDLTLLKALVRQQLPEKYKEIFFDQSKNGYAGYIDGGASQEEFYKFIKPILEKMDGTEELLVKLNREDLLRKQRTFDNGSIPHQIHLGELHAILRRQEDFYPFLKDNREKIEKILTFRIPYYVGPLARGNSRFAWMTRKSEETITPWNFEEVVDKGASAQSFIERMTNFDKNLPNEKVLPKHSLLYEYFTVYNELTKVKYVTEGMRKPAFLSGEQKKAIVDLLFKTNRKVTVKQLKEDYFKKIECFDSVEISGVEDRFNASLGTYHDLLKIIKDKDFLDNEENEDILEDIVLTLTLFEDREMIEERLKTYAHLFDDKVMKQLKRRRYTGWGRLSRKLINGIRDKQSGKTILDFLKSDGFANRNFMQLIHDDSLTFKEDIQKAQVSGQGDSLHEHIANLAGSPAIKKGILQTVKVVDELVKVMGRHKPENIVIEMARENQTTQKGQKNSRERMKRIEEGIKELGSQILKEHPVENTQLQNEKLYLYYLQNGRDMYVDQELDINRLSDYDVDHIVPQSFLKDDSIDNKVLTRSDKARGKSDNVPSEEVVKKMKNYWRQLLNAKLITQRKFDNLTKAERGGLSELDKAGFIKRQLVETRQITKHVAQILDSRMNTKYDENDKLIREVKVITLKSKLVSDFRKDFQFYKVREINNYHHAHDAYLNAVVGTALIKKYPKLESEFVYGDYKVYDVRKMIAKSEQEIGKATAKYFFYSNIMNFFKTEITLANGEIRKRPLIETNGETGEIVWDKGRDFATVRKVLSMPQVNIVKKTEVQTGGFSKESILPKRNSDKLIARKKDWDPKKYGGFDSPTVAYSVLVVAKVEKGKSKKLKSVKELLGITIMERSSFEKNPIDFLEAKGYKEVKKDLIIKLPKYSLFELENGRKRMLASAGELQKGNELALPSKYVNFLYLASHYEKLKGSPEDNEQKQLFVEQHKHYLDEIIEQISEFSKRVILADANLDKVLSAYNKHRDKPIREQAENIIHLFTLTNLGAPAAFKYFDTTIDRKRYTSTKEVLDATLIHQSITGLYETRIDLSQLGGDGGGSSGSSGSSGSSGSSGGMDPLQLLQPLEAEIKGTKLKAHWNSGATITCVPQAFLEEEVPIKNIWIKTIHGEKEQPVYYLTFKIQGRKVEAEVISSPYDYILVSPSDIPWLMKKPLQLTTLVPLQEYEERLLKQTMLTGSYKEKLQSLFLKYDALWQHWENQVGHRRIKPHHIATGTVNPRPQKQYPINPKAKASIQTVINDLLKQGVLIQQNSIMNTPVYPVPKPDGKWRMVLDYREVNKTIPLIAAQNQHSAGILSSIFRGKYKTTLDLSNGFWAHSITPESYWLTAFTWLGQQYCWTRLPQGFLNSPALFTADVVDLLKEVPNVQVYVDDIYISHDDPREHLEQLEKVFSLLLNAGYVVSLKKSEIAQHEVEFLGFNITKEGRGLTETFKQKLLNITPPRDLKQLQSILGLLNFARNFIPNFSELVKPLYNIIATANGKYITWTTDNSQQLQNIISMLNSAENLEERNPEVRLIMKVNTSPSAGYIRFYNEFAKRPIMYLNYVYTKAEVKFTNTEKLLTTIHKGLIKALDLGMGQEILVYSPIVSMTKIQKTPLPERKALPIRWITWMSYLEDPRIQFHYDKTLPELQQVPTVTDDIIAKIKHPSEFSMVFYTDGSAIKHPNVNKSHNAGMGIAQVQFKPEFTVINTWSIPLGDHTAQLAEVAAVEFACKKALKIDGPVLIVTDSFYVAESVNKELPYWQSNGFFNNKKKPLKHVSKWKSIADCIQLKPDIIIIHEKGHQPTASTFHTEGNNLADKLATQGSYVVNAGKRTADGSEFEKRTADGSEFESPKKKAKVE

SEQ ID NO: 493 - protein, 2176 aa, synthetic construct
MPAAKRVKLDGGDKKYSIGLDIGTNSVGWAVITDEYKVPSKKFKVLGNTDRHSIKKNLIGALLFDSGETAEATRLKRTARRRYTRRKNRICYLQEIFSNEMAKVDDSFFHRLEESFLVEEDKKHERHPIFGNIVDEVAYHEKYPTIYHLRKKLVDSTDKADLRLIYLALAHMIKFRGHFLIEGDLNPDNSDVDKLFIQLVQTYNQLFEENPINASGVDAKAILSARLSKSRRLENLIAQLPGEKKNGLFGNLIALSLGLTPNFKSNFDLAEDAKLQLSKDTYDDDLDNLLAQIGDQYADLFLAAKNLSDAILLSDILRVNTEITKAPLSASMIKRYDEHHQDLTLLKALVRQQLPEKYKEIFFDQSKNGYAGYIDGGASQEEFYKFIKPILEKMDGTEELLVKLNREDLLRKQRTFDNGSIPHQIHLGELHAILRRQEDFYPFLKDNREKIEKILTFRIPYYVGPLARGNSRFAWMTRKSEETITPWNFEEVVDKGASAQSFIERMTNFDKNLPNEKVLPKHSLLYEYFTVYNELTKVKYVTEGMRKPAFLSGEQKKAIVDLLFKTNRKVTVKQLKEDYFKKIECFDSVEISGVEDRFNASLGTYHDLLKIIKDKDFLDNEENEDILEDIVLTLTLFEDREMIEERLKTYAHLFDDKVMKQLKRRRYTGWGRLSRKLINGIRDKQSGKTILDFLKSDGFANRNFMQLIHDDSLTFKEDIQKAQVSGQGDSLHEHIANLAGSPAIKKGILQTVKVVDELVKVMGRHKPENIVIEMARENQTTQKGQKNSRERMKRIEEGIKELGSQILKEHPVENTQLQNEKLYLYYLQNGRDMYVDQELDINRLSDYDVDHIVPQSFLKDDSIDNKVLTRSDKARGKSDNVPSEEVVKKMKNYWRQLLNAKLITQRKFDNLTKAERGGLSELDKAGFIKRQLVETRQITKHVAQILDSRMNTKYDENDKLIREVKVITLKSKLVSDFRKDFQFYKVREINNYHHAHDAYLNAVVGTALIKKYPKLESEFVYGDYKVYDVRKMIAKSEQEIGKATAKYFFYSNIMNFFKTEITLANGEIRKRPLIETNGETGEIVWDKGRDFATVRKVLSMPQVNIVKKTEVQTGGFSKESILPKRNSDKLIARKKDWDPKKYGGFDSPTVAYSVLVVAKVEKGKSKKLKSVKELLGITIMERSSFEKNPIDFLEAKGYKEVKKDLIIKLPKYSLFELENGRKRMLASAGELQKGNELALPSKYVNFLYLASHYEKLKGSPEDNEQKQLFVEQHKHYLDEIIEQISEFSKRVILADANLDKVLSAYNKHRDKPIREQAENIIHLFTLTNLGAPAAFKYFDTTIDRKRYTSTKEVLDATLIHQSITGLYETRIDLSQLGGDGGEAAAKGGSPAPGGMDPLQLLQPLEAEIKGTKLKAHWNSGATITCVPQAFLEEEVPIKNIWIKTIHGEKEQPVYYLTFKIQGRKVEAEVISSPYDYILVSPSDIPWLMKKPLQLTTLVPLQEYEERLLKQTMLTGSYKEKLQSLFLKYDALWQHWENQVGHRRIKPHHIATGTVNPRPQKQYPINPKAKASIQTVINDLLKQGVLIQQNSIMNTPVYPVPKPDGKWRMVLDYREVNKTIPLIAAQNQHSAGILSSIFRGKYKTTLDLSNGFWAHSITPESYWLTAFTWLGQQYCWTRLPQGFLNSPALFTADVVDLLKEVPNVQVYVDDIYISHDDPREHLEQLEKVFSLLLNAGYVVSLKKSEIAQHEVEFLGFNITKEGRGLTETFKQKLLNITPPRDLKQLQSILGLLNFARNFIPNFSELVKPLYNIIATANGKYITWTTDNSQQLQNIISMLNSAENLEERNPEVRLIMKVNTSPSAGYIRFYNEFAKRPIMYLNYVYTKAEVKFTNTEKLLTTIHKGLIKALDLGMGQEILVYSPIVSMTKIQKTPLPERKALPIRWITWMSYLEDPRIQFHYDKTLPELQQVPTVTDDIIAKIKHPSEFSMVFYTDGSAIKHPNVNKSHNAGMGIAQVQFKPEFTVINTWSIPLGDHTAQLAEVAAVEFACKKALKIDGPVLIVTDSFYVAESVNKELPYWQSNGFFNNKKKPLKHVSKWKSIADCIQLKPDIIIIHEKGHQPTASTFHTEGNNLADKLATQGSYVVNAGKRTADGSEFEKRTADGSEFESPKKKAKVE

SEQ ID NO: 494 - protein, 2181 aa, synthetic construct
MPAAKRVKLDGGDKKYSIGLDIGTNSVGWAVITDEYKVPSKKFKVLGNTDRHSIKKNLIGALLFDSGETAEATRLKRTARRRYTRRKNRICYLQEIFSNEMAKVDDSFFHRLEESFLVEEDKKHERHPIFGNIVDEVAYHEKYPTIYHLRKKLVDSTDKADLRLIYLALAHMIKFRGHFLIEGDLNPDNSDVDKLFIQLVQTYNQLFEENPINASGVDAKAILSARLSKSRRLENLIAQLPGEKKNGLFGNLIALSLGLTPNFKSNFDLAEDAKLQLSKDTYDDDLDNLLAQIGDQYADLFLAAKNLSDAILLSDILRVNTEITKAPLSASMIKRYDEHHQDLTLLKALVRQQLPEKYKEIFFDQSKNGYAGYIDGGASQEEFYKFIKPILEKMDGTEELLVKLNREDLLRKQRTFDNGSIPHQIHLGELHAILRRQEDFYPFLKDNREKIEKILTFRIPYYVGPLARGNSRFAWMTRKSEETITPWNFEEVVDKGASAQSFIERMTNFDKNLPNEKVLPKHSLLYEYFTVYNELTKVKYVTEGMRKPAFLSGEQKKAIVDLLFKTNRKVTVKQLKEDYFKKIECFDSVEISGVEDRFNASLGTYHDLLKIIKDKDFLDNEENEDILEDIVLTLTLFEDREMIEERLKTYAHLFDDKVMKQLKRRRYTGWGRLSRKLINGIRDKQSGKTILDFLKSDGFANRNFMQLIHDDSLTFKEDIQKAQVSGQGDSLHEHIANLAGSPAIKKGILQTVKVVDELVKVMGRHKPENIVIEMARENQTTQKGQKNSRERMKRIEEGIKELGSQILKEHPVENTQLQNEKLYLYYLQNGRDMYVDQELDINRLSDYDVDHIVPQSFLKDDSIDNKVLTRSDKARGKSDNVPSEEVVKKMKNYWRQLLNAKLITQRKFDNLTKAERGGLSELDKAGFIKRQLVETRQITKHVAQILDSRMNTKYDENDKLIREVKVITLKSKLVSDFRKDFQFYKVREINNYHHAHDAYLNAVVGTALIKKYPKLESEFVYGDYKVYDVRKMIAKSEQEIGKATAKYFFYSNIMNFFKTEITLANGEIRKRPLIETNGETGEIVWDKGRDFATVRKVLSMPQVNIVKKTEVQTGGFSKESILPKRNSDKLIARKKDWDPKKYGGFDSPTVAYSVLVVAKVEKGKSKKLKSVKELLGITIMERSSFEKNPIDFLEAKGYKEVKKDLIIKLPKYSLFELENGRKRMLASAGELQKGNELALPSKYVNFLYLASHYEKLKGSPEDNEQKQLFVEQHKHYLDEIIEQISEFSKRVILADANLDKVLSAYNKHRDKPIREQAENIIHLFTLTNLGAPAAFKYFDTTIDRKRYTSTKEVLDATLIHQSITGLYETRIDLSQLGGDGGSGSETPGTSESATPESGGMDPLQLLQPLEAEIKGTKLKAHWNSGATITCVPQAFLEEEVPIKNIWIKTIHGEKEQPVYYLTFKIQGRKVEAEVISSPYDYILVSPSDIPWLMKKPLQLTTLVPLQEYEERLLKQTMLTGSYKEKLQSLFLKYDALWQHWENQVGHRRIKPHHIATGTVNPRPQKQYPINPKAKASIQTVINDLLKQGVLIQQNSIMNTPVYPVPKPDGKWRMVLDYREVNKTIPLIAAQNQHSAGILSSIFRGKYKTTLDLSNGFWAHSITPESYWLTAFTWLGQQYCWTRLPQGFLNSPALFTADVVDLLKEVPNVQVYVDDIYISHDDPREHLEQLEKVFSLLLNAGYVVSLKKSEIAQHEVEFLGFNITKEGRGLTETFKQKLLNITPPRDLKQLQSILGLLNFARNFIPNFSELVKPLYNIIATANGKYITWTTDNSQQLQNIISMLNSAENLEERNPEVRLIMKVNTSPSAGYIRFYNEFAKRPIMYLNYVYTKAEVKFTNTEKLLTTIHKGLIKALDLGMGQEILVYSPIVSMTKIQKTPLPERKALPIRWITWMSYLEDPRIQFHYDKTLPELQQVPTVTDDIIAKIKHPSEFSMVFYTDGSAIKHPNVNKSHNAGMGIAQVQFKPEFTVINTWSIPLGDHTAQLAEVAAVEFACKKALKIDGPVLIVTDSFYVAESVNKELPYWQSNGFFNNKKKPLKHVSKWKSIADCIQLKPDIIIIHEKGHQPTASTFHTEGNNLADKLATQGSYVVNAGKRTADGSEFEKRTADGSEFESPKKKAKVE

SEQ ID NO: 495 - protein, 2176 aa, synthetic construct
MPAAKRVKLDGGDKKYSIGLDIGTNSVGWAVITDEYKVPSKKFKVLGNTDRHSIKKNLIGALLFDSGETAEATRLKRTARRRYTRRKNRICYLQEIFSNEMAKVDDSFFHRLEESFLVEEDKKHERHPIFGNIVDEVAYHEKYPTIYHLRKKLVDSTDKADLRLIYLALAHMIKFRGHFLIEGDLNPDNSDVDKLFIQLVQTYNQLFEENPINASGVDAKAILSARLSKSRRLENLIAQLPGEKKNGLFGNLIALSLGLTPNFKSNFDLAEDAKLQLSKDTYDDDLDNLLAQIGDQYADLFLAAKNLSDAILLSDILRVNTEITKAPLSASMIKRYDEHHQDLTLLKALVRQQLPEKYKEIFFDQSKNGYAGYIDGGASQEEFYKFIKPILEKMDGTEELLVKLNREDLLRKQRTFDNGSIPHQIHLGELHAILRRQEDFYPFLKDNREKIEKILTFRIPYYVGPLARGNSRFAWMTRKSEETITPWNFEEVVDKGASAQSFIERMTNFDKNLPNEKVLPKHSLLYEYFTVYNELTKVKYVTEGMRKPAFLSGEQKKAIVDLLFKTNRKVTVKQLKEDYFKKIECFDSVEISGVEDRFNASLGTYHDLLKIIKDKDFLDNEENEDILEDIVLTLTLFEDREMIEERLKTYAHLFDDKVMKQLKRRRYTGWGRLSRKLINGIRDKQSGKTILDFLKSDGFANRNFMQLIHDDSLTFKEDIQKAQVSGQGDSLHEHIANLAGSPAIKKGILQTVKVVDELVKVMGRHKPENIVIEMARENQTTQKGQKNSRERMKRIEEGIKELGSQILKEHPVENTQLQNEKLYLYYLQNGRDMYVDQELDINRLSDYDVDHIVPQSFLKDDSIDNKVLTRSDKARGKSDNVPSEEVVKKMKNYWRQLLNAKLITQRKFDNLTKAERGGLSELDKAGFIKRQLVETRQITKHVAQILDSRMNTKYDENDKLIREVKVITLKSKLVSDFRKDFQFYKVREINNYHHAHDAYLNAVVGTALIKKYPKLESEFVYGDYKVYDVRKMIAKSEQEIGKATAKYFFYSNIMNFFKTEITLANGEIRKRPLIETNGETGEIVWDKGRDFATVRKVLSMPQVNIVKKTEVQTGGFSKESILPKRNSDKLIARKKDWDPKKYGGFDSPTVAYSVLVVAKVEKGKSKKLKSVKELLGITIMERSSFEKNPIDFLEAKGYKEVKKDLIIKLPKYSLFELENGRKRMLASAGELQKGNELALPSKYVNFLYLASHYEKLKGSPEDNEQKQLFVEQHKHYLDEIIEQISEFSKRVILADANLDKVLSAYNKHRDKPIREQAENIIHLFTLTNLGAPAAFKYFDTTIDRKRYTSTKEVLDATLIHQSITGLYETRIDLSQLGGDGGEAAAKPAPGSSGGMDPLQLLQPLEAEIKGTKLKAHWNSGATITCVPQAFLEEEVPIKNIWIKTIHGEKEQPVYYLTFKIQGRKVEAEVISSPYDYILVSPSDIPWLMKKPLQLTTLVPLQEYEERLLKQTMLTGSYKEKLQSLFLKYDALWQHWENQVGHRRIKPHHIATGTVNPRPQKQYPINPKAKASIQTVINDLLKQGVLIQQNSIMNTPVYPVPKPDGKWRMVLDYREVNKTIPLIAAQNQHSAGILSSIFRGKYKTTLDLSNGFWAHSITPESYWLTAFTWLGQQYCWTRLPQGFLNSPALFTADVVDLLKEVPNVQVYVDDIYISHDDPREHLEQLEKVFSLLLNAGYVVSLKKSEIAQHEVEFLGFNITKEGRGLTETFKQKLLNITPPRDLKQLQSILGLLNFARNFIPNFSELVKPLYNIIATANGKYITWTTDNSQQLQNIISMLNSAENLEERNPEVRLIMKVNTSPSAGYIRFYNEFAKRPIMYLNYVYTKAEVKFTNTEKLLTTIHKGLIKALDLGMGQEILVYSPIVSMTKIQKTPLPERKALPIRWITWMSYLEDPRIQFHYDKTLPELQQVPTVTDDIIAKIKHPSEFSMVFYTDGSAIKHPNVNKSHNAGMGIAQVQFKPEFTVINTWSIPLGDHTAQLAEVAAVEFACKKALKIDGPVLIVTDSFYVAESVNKELPYWQSNGFFNNKKKPLKHVSKWKSIADCIQLKPDIIIIHEKGHQPTASTFHTEGNNLADKLATQGSYVVNAGKRTADGSEFEKRTADGSEFESPKKKAKVE

SEQ ID NO: 496 - protein, 2176 aa, synthetic construct
MPAAKRVKLDGGDKKYSIGLDIGTNSVGWAVITDEYKVPSKKFKVLGNTDRHSIKKNLIGALLFDSGETAEATRLKRTARRRYTRRKNRICYLQEIFSNEMAKVDDSFFHRLEESFLVEEDKKHERHPIFGNIVDEVAYHEKYPTIYHLRKKLVDSTDKADLRLIYLALAHMIKFRGHFLIEGDLNPDNSDVDKLFIQLVQTYNQLFEENPINASGVDAKAILSARLSKSRRLENLIAQLPGEKKNGLFGNLIALSLGLTPNFKSNFDLAEDAKLQLSKDTYDDDLDNLLAQIGDQYADLFLAAKNLSDAILLSDILRVNTEITKAPLSASMIKRYDEHHQDLTLLKALVRQQLPEKYKEIFFDQSKNGYAGYIDGGASQEEFYKFIKPILEKMDGTEELLVKLNREDLLRKQRTFDNGSIPHQIHLGELHAILRRQEDFYPFLKDNREKIEKILTFRIPYYVGPLARGNSRFAWMTRKSEETITPWNFEEVVDKGASAQSFIERMTNFDKNLPNEKVLPKHSLLYEYFTVYNELTKVKYVTEGMRKPAFLSGEQKKAIVDLLFKTNRKVTVKQLKEDYFKKIECFDSVEISGVEDRFNASLGTYHDLLKIIKDKDFLDNEENEDILEDIVLTLTLFEDREMIEERLKTYAHLFDDKVMKQLKRRRYTGWGRLSRKLINGIRDKQSGKTILDFLKSDGFANRNFMQLIHDDSLTFKEDIQKAQVSGQGDSLHEHIANLAGSPAIKKGILQTVKVVDELVKVMGRHKPENIVIEMARENQTTQKGQKNSRERMKRIEEGIKELGSQILKEHPVENTQLQNEKLYLYYLQNGRDMYVDQELDINRLSDYDVDHIVPQSFLKDDSIDNKVLTRSDKARGKSDNVPSEEVVKKMKNYWRQLLNAKLITQRKFDNLTKAERGGLSELDKAGFIKRQLVETRQITKHVAQILDSRMNTKYDENDKLIREVKVITLKSKLVSDFRKDFQFYKVREINNYHHAHDAYLNAVVGTALIKKYPKLESEFVYGDYKVYDVRKMIAKSEQEIGKATAKYFFYSNIMNFFKTEITLANGEIRKRPLIETNGETGEIVWDKGRDFATVRKVLSMPQVNIVKKTEVQTGGFSKESILPKRNSDKLIARKKDWDPKKYGGFDSPTVAYSVLVVAKVEKGKSKKLKSVKELLGITIMERSSFEKNPIDFLEAKGYKEVKKDLIIKLPKYSLFELENGRKRMLASAGELQKGNELALPSKYVNFLYLASHYEKLKGSPEDNEQKQLFVEQHKHYLDEIIEQISEFSKRVILADANLDKVLSAYNKHRDKPIREQAENIIHLFTLTNLGAPAAFKYFDTTIDRKRYTSTKEVLDATLIHQSITGLYETRIDLSQLGGDGGEAAAKGSSPAPGGMDPLQLLQPLEAEIKGTKLKAHWNSGATITCVPQAFLEEEVPIKNIWIKTIHGEKEQPVYYLTFKIQGRKVEAEVISSPYDYILVSPSDIPWLMKKPLQLTTLVPLQEYEERLLKQTMLTGSYKEKLQSLFLKYDALWQHWENQVGHRRIKPHHIATGTVNPRPQKQYPINPKAKASIQTVINDLLKQGVLIQQNSIMNTPVYPVPKPDGKWRMVLDYREVNKTIPLIAAQNQHSAGILSSIFRGKYKTTLDLSNGFWAHSITPESYWLTAFTWLGQQYCWTRLPQGFLNSPALFTADVVDLLKEVPNVQVYVDDIYISHDDPREHLEQLEKVFSLLLNAGYVVSLKKSEIAQHEVEFLGFNITKEGRGLTETFKQKLLNITPPRDLKQLQSILGLLNFARNFIPNFSELVKPLYNIIATANGKYITWTTDNSQQLQNIISMLNSAENLEERNPEVRLIMKVNTSPSAGYIRFYNEFAKRPIMYLNYVYTKAEVKFTNTEKLLTTIHKGLIKALDLGMGQEILVYSPIVSMTKIQKTPLPERKALPIRWITWMSYLEDPRIQFHYDKTLPELQQVPTVTDDIIAKIKHPSEFSMVFYTDGSAIKHPNVNKSHNAGMGIAQVQFKPEFTVINTWSIPLGDHTAQLAEVAAVEFACKKALKIDGPVLIVTDSFYVAESVNKELPYWQSNGFFNNKKKPLKHVSKWKSIADCIQLKPDIIIIHEKGHQPTASTFHTEGNNLADKLATQGSYVVNAGKRTADGSEFEKRTADGSEFESPKKKAKVE

SEQ ID NO: 497 - protein, 2176 aa, synthetic construct
MPAAKRVKLDGGDKKYSIGLDIGTNSVGWAVITDEYKVPSKKFKVLGNTDRHSIKKNLIGALLFDSGETAEATRLKRTARRRYTRRKNRICYLQEIFSNEMAKVDDSFFHRLEESFLVEEDKKHERHPIFGNIVDEVAYHEKYPTIYHLRKKLVDSTDKADLRLIYLALAHMIKFRGHFLIEGDLNPDNSDVDKLFIQLVQTYNQLFEENPINASGVDAKAILSARLSKSRRLENLIAQLPGEKKNGLFGNLIALSLGLTPNFKSNFDLAEDAKLQLSKDTYDDDLDNLLAQIGDQYADLFLAAKNLSDAILLSDILRVNTEITKAPLSASMIKRYDEHHQDLTLLKALVRQQLPEKYKEIFFDQSKNGYAGYIDGGASQEEFYKFIKPILEKMDGTEELLVKLNREDLLRKQRTFDNGSIPHQIHLGELHAILRRQEDFYPFLKDNREKIEKILTFRIPYYVGPLARGNSRFAWMTRKSEETITPWNFEEVVDKGASAQSFIERMTNFDKNLPNEKVLPKHSLLYEYFTVYNELTKVKYVTEGMRKPAFLSGEQKKAIVDLLFKTNRKVTVKQLKEDYFKKIECFDSVEISGVEDRFNASLGTYHDLLKIIKDKDFLDNEENEDILEDIVLTLTLFEDREMIEERLKTYAHLFDDKVMKQLKRRRYTGWGRLSRKLINGIRDKQSGKTILDFLKSDGFANRNFMQLIHDDSLTFKEDIQKAQVSGQGDSLHEHIANLAGSPAIKKGILQTVKVVDELVKVMGRHKPENIVIEMARENQTTQKGQKNSRERMKRIEEGIKELGSQILKEHPVENTQLQNEKLYLYYLQNGRDMYVDQELDINRLSDYDVDHIVPQSFLKDDSIDNKVLTRSDKARGKSDNVPSEEVVKKMKNYWRQLLNAKLITQRKFDNLTKAERGGLSELDKAGFIKRQLVETRQITKHVAQILDSRMNTKYDENDKLIREVKVITLKSKLVSDFRKDFQFYKVREINNYHHAHDAYLNAVVGTALIKKYPKLESEFVYGDYKVYDVRKMIAKSEQEIGKATAKYFFYSNIMNFFKTEITLANGEIRKRPLIETNGETGEIVWDKGRDFATVRKVLSMPQVNIVKKTEVQTGGFSKESILPKRNSDKLIARKKDWDPKKYGGFDSPTVAYSVLVVAKVEKGKSKKLKSVKELLGITIMERSSFEKNPIDFLEAKGYKEVKKDLIIKLPKYSLFELENGRKRMLASAGELQKGNELALPSKYVNFLYLASHYEKLKGSPEDNEQKQLFVEQHKHYLDEIIEQISEFSKRVILADANLDKVLSAYNKHRDKPIREQAENIIHLFTLTNLGAPAAFKYFDTTIDRKRYTSTKEVLDATLIHQSITGLYETRIDLSQLGGDGGPAPGGGEAAAKGGMDPLQLLQPLEAEIKGTKLKAHWNSGATITCVPQAFLEEEVPIKNIWIKTIHGEKEQPVYYLTFKIQGRKVEAEVISSPYDYILVSPSDIPWLMKKPLQLTTLVPLQEYEERLLKQTMLTGSYKEKLQSLFLKYDALWQHWENQVGHRRIKPHHIATGTVNPRPQKQYPINPKAKASIQTVINDLLKQGVLIQQNSIMNTPVYPVPKPDGKWRMVLDYREVNKTIPLIAAQNQHSAGILSSIFRGKYKTTLDLSNGFWAHSITPESYWLTAFTWLGQQYCWTRLPQGFLNSPALFTADVVDLLKEVPNVQVYVDDIYISHDDPREHLEQLEKVFSLLLNAGYVVSLKKSEIAQHEVEFLGFNITKEGRGLTETFKQKLLNITPPRDLKQLQSILGLLNFARNFIPNFSELVKPLYNIIATANGKYITWTTDNSQQLQNIISMLNSAENLEERNPEVRLIMKVNTSPSAGYIRFYNEFAKRPIMYLNYVYTKAEVKFTNTEKLLTTIHKGLIKALDLGMGQEILVYSPIVSMTKIQKTPLPERKALPIRWITWMSYLEDPRIQFHYDKTLPELQQVPTVTDDIIAKIKHPSEFSMVFYTDGSAIKHPNVNKSHNAGMGIAQVQFKPEFTVINTWSIPLGDHTAQLAEVAAVEFACKKALKIDGPVLIVTDSFYVAESVNKELPYWQSNGFFNNKKKPLKHVSKWKSIADCIQLKPDIIIIHEKGHQPTASTFHTEGNNLADKLATQGSYVVNAGKRTADGSEFEKRTADGSEFESPKKKAKVE

SEQ ID NO: 498 - protein, 2180 aa, synthetic construct
MPAAKRVKLDGGDKKYSIGLDIGTNSVGWAVITDEYKVPSKKFKVLGNTDRHSIKKNLIGALLFDSGETAEATRLKRTARRRYTRRKNRICYLQEIFSNEMAKVDDSFFHRLEESFLVEEDKKHERHPIFGNIVDEVAYHEKYPTIYHLRKKLVDSTDKADLRLIYLALAHMIKFRGHFLIEGDLNPDNSDVDKLFIQLVQTYNQLFEENPINASGVDAKAILSARLSKSRRLENLIAQLPGEKKNGLFGNLIALSLGLTPNFKSNFDLAEDAKLQLSKDTYDDDLDNLLAQIGDQYADLFLAAKNLSDAILLSDILRVNTEITKAPLSASMIKRYDEHHQDLTLLKALVRQQLPEKYKEIFFDQSKNGYAGYIDGGASQEEFYKFIKPILEKMDGTEELLVKLNREDLLRKQRTFDNGSIPHQIHLGELHAILRRQEDFYPFLKDNREKIEKILTFRIPYYVGPLARGNSRFAWMTRKSEETITPWNFEEVVDKGASAQSFIERMTNFDKNLPNEKVLPKHSLLYEYFTVYNELTKVKYVTEGMRKPAFLSGEQKKAIVDLLFKTNRKVTVKQLKEDYFKKIECFDSVEISGVEDRFNASLGTYHDLLKIIKDKDFLDNEENEDILEDIVLTLTLFEDREMIEERLKTYAHLFDDKVMKQLKRRRYTGWGRLSRKLINGIRDKQSGKTILDFLKSDGFANRNFMQLIHDDSLTFKEDIQKAQVSGQGDSLHEHIANLAGSPAIKKGILQTVKVVDELVKVMGRHKPENIVIEMARENQTTQKGQKNSRERMKRIEEGIKELGSQILKEHPVENTQLQNEKLYLYYLQNGRDMYVDQELDINRLSDYDVDHIVPQSFLKDDSIDNKVLTRSDKARGKSDNVPSEEVVKKMKNYWRQLLNAKLITQRKFDNLTKAERGGLSELDKAGFIKRQLVETRQITKHVAQILDSRMNTKYDENDKLIREVKVITLKSKLVSDFRKDFQFYKVREINNYHHAHDAYLNAVVGTALIKKYPKLESEFVYGDYKVYDVRKMIAKSEQEIGKATAKYFFYSNIMNFFKTEITLANGEIRKRPLIETNGETGEIVWDKGRDFATVRKVLSMPQVNIVKKTEVQTGGFSKESILPKRNSDKLIARKKDWDPKKYGGFDSPTVAYSVLVVAKVEKGKSKKLKSVKELLGITIMERSSFEKNPIDFLEAKGYKEVKKDLIIKLPKYSLFELENGRKRMLASAGELQKGNELALPSKYVNFLYLASHYEKLKGSPEDNEQKQLFVEQHKHYLDEIIEQISEFSKRVILADANLDKVLSAYNKHRDKPIREQAENIIHLFTLTNLGAPAAFKYFDTTIDRKRYTSTKEVLDATLIHQSITGLYETRIDLSQLGGDGGEAAAKEAAAKEAAAKGGMDPLQLLQPLEAEIKGTKLKAHWNSGATITCVPQAFLEEEVPIKNIWIKTIHGEKEQPVYYLTFKIQGRKVEAEVISSPYDYILVSPSDIPWLMKKPLQLTTLVPLQEYEERLLKQTMLTGSYKEKLQSLFLKYDALWQHWENQVGHRRIKPHHIATGTVNPRPQKQYPINPKAKASIQTVINDLLKQGVLIQQNSIMNTPVYPVPKPDGKWRMVLDYREVNKTIPLIAAQNQHSAGILSSIFRGKYKTTLDLSNGFWAHSITPESYWLTAFTWLGQQYCWTRLPQGFLNSPALFTADVVDLLKEVPNVQVYVDDIYISHDDPREHLEQLEKVFSLLLNAGYVVSLKKSEIAQHEVEFLGFNITKEGRGLTETFKQKLLNITPPRDLKQLQSILGLLNFARNFIPNFSELVKPLYNIIATANGKYITWTTDNSQQLQNIISMLNSAENLEERNPEVRLIMKVNTSPSAGYIRFYNEFAKRPIMYLNYVYTKAEVKFTNTEKLLTTIHKGLIKALDLGMGQEILVYSPIVSMTKIQKTPLPERKALPIRWITWMSYLEDPRIQFHYDKTLPELQQVPTVTDDIIAKIKHPSEFSMVFYTDGSAIKHPNVNKSHNAGMGIAQVQFKPEFTVINTWSIPLGDHTAQLAEVAAVEFACKKALKIDGPVLIVTDSFYVAESVNKELPYWQSNGFFNNKKKPLKHVSKWKSIADCIQLKPDIIIIHEKGHQPTASTFHTEGNNLADKLATQGSYVVNAGKRTADGSEFEKRTADGSEFESPKKKAKVE

SEQ ID NO: 499 - protein, 2176 aa, synthetic construct
MPAAKRVKLDGGDKKYSIGLDIGTNSVGWAVITDEYKVPSKKFKVLGNTDRHSIKKNLIGALLFDSGETAEATRLKRTARRRYTRRKNRICYLQEIFSNEMAKVDDSFFHRLEESFLVEEDKKHERHPIFGNIVDEVAYHEKYPTIYHLRKKLVDSTDKADLRLIYLALAHMIKFRGHFLIEGDLNPDNSDVDKLFIQLVQTYNQLFEENPINASGVDAKAILSARLSKSRRLENLIAQLPGEKKNGLFGNLIALSLGLTPNFKSNFDLAEDAKLQLSKDTYDDDLDNLLAQIGDQYADLFLAAKNLSDAILLSDILRVNTEITKAPLSASMIKRYDEHHQDLTLLKALVRQQLPEKYKEIFFDQSKNGYAGYIDGGASQEEFYKFIKPILEKMDGTEELLVKLNREDLLRKQRTFDNGSIPHQIHLGELHAILRRQEDFYPFLKDNREKIEKILTFRIPYYVGPLARGNSRFAWMTRKSEETITPWNFEEVVDKGASAQSFIERMTNFDKNLPNEKVLPKHSLLYEYFTVYNELTKVKYVTEGMRKPAFLSGEQKKAIVDLLFKTNRKVTVKQLKEDYFKKIECFDSVEISGVEDRFNASLGTYHDLLKIIKDKDFLDNEENEDILEDIVLTLTLFEDREMIEERLKTYAHLFDDKVMKQLKRRRYTGWGRLSRKLINGIRDKQSGKTILDFLKSDGFANRNFMQLIHDDSLTFKEDIQKAQVSGQGDSLHEHIANLAGSPAIKKGILQTVKVVDELVKVMGRHKPENIVIEMARENQTTQKGQKNSRERMKRIEEGIKELGSQILKEHPVENTQLQNEKLYLYYLQNGRDMYVDQELDINRLSDYDVDHIVPQSFLKDDSIDNKVLTRSDKARGKSDNVPSEEVVKKMKNYWRQLLNAKLITQRKFDNLTKAERGGLSELDKAGFIKRQLVETRQITKHVAQILDSRMNTKYDENDKLIREVKVITLKSKLVSDFRKDFQFYKVREINNYHHAHDAYLNAVVGTALIKKYPKLESEFVYGDYKVYDVRKMIAKSEQEIGKATAKYFFYSNIMNFFKTEITLANGEIRKRPLIETNGETGEIVWDKGRDFATVRKVLSMPQVNIVKKTEVQTGGFSKESILPKRNSDKLIARKKDWDPKKYGGFDSPTVAYSVLVVAKVEKGKSKKLKSVKELLGITIMERSSFEKNPIDFLEAKGYKEVKKDLIIKLPKYSLFELENGRKRMLASAGELQKGNELALPSKYVNFLYLASHYEKLKGSPEDNEQKQLFVEQHKHYLDEIIEQISEFSKRVILADANLDKVLSAYNKHRDKPIREQAENIIHLFTLTNLGAPAAFKYFDTTIDRKRYTSTKEVLDATLIHQSITGLYETRIDLSQLGGDGGEAAAKPAPGGSGGMDPLQLLQPLEAEIKGTKLKAHWNSGATITCVPQAFLEEEVPIKNIWIKTIHGEKEQPVYYLTFKIQGRKVEAEVISSPYDYILVSPSDIPWLMKKPLQLTTLVPLQEYEERLLKQTMLTGSYKEKLQSLFLKYDALWQHWENQVGHRRIKPHHIATGTVNPRPQKQYPINPKAKASIQTVINDLLKQGVLIQQNSIMNTPVYPVPKPDGKWRMVLDYREVNKTIPLIAAQNQHSAGILSSIFRGKYKTTLDLSNGFWAHSITPESYWLTAFTWLGQQYCWTRLPQGFLNSPALFTADVVDLLKEVPNVQVYVDDIYISHDDPREHLEQLEKVFSLLLNAGYVVSLKKSEIAQHEVEFLGFNITKEGRGLTETFKQKLLNITPPRDLKQLQSILGLLNFARNFIPNFSELVKPLYNIIATANGKYITWTTDNSQQLQNIISMLNSAENLEERNPEVRLIMKVNTSPSAGYIRFYNEFAKRPIMYLNYVYTKAEVKFTNTEKLLTTIHKGLIKALDLGMGQEILVYSPIVSMTKIQKTPLPERKALPIRWITWMSYLEDPRIQFHYDKTLPELQQVPTVTDDIIAKIKHPSEFSMVFYTDGSAIKHPNVNKSHNAGMGIAQVQFKPEFTVINTWSIPLGDHTAQLAEVAAVEFACKKALKIDGPVLIVTDSFYVAESVNKELPYWQSNGFFNNKKKPLKHVSKWKSIADCIQLKPDIIIIHEKGHQPTASTFHTEGNNLADKLATQGSYVVNAGKRTADGSEFEKRTADGSEFESPKKKAKVE

SEQ ID NO: 500 - protein, 2178 aa, synthetic construct
MPAAKRVKLDGGDKKYSIGLDIGTNSVGWAVITDEYKVPSKKFKVLGNTDRHSIKKNLIGALLFDSGETAEATRLKRTARRRYTRRKNRICYLQEIFSNEMAKVDDSFFHRLEESFLVEEDKKHERHPIFGNIVDEVAYHEKYPTIYHLRKKLVDSTDKADLRLIYLALAHMIKFRGHFLIEGDLNPDNSDVDKLFIQLVQTYNQLFEENPINASGVDAKAILSARLSKSRRLENLIAQLPGEKKNGLFGNLIALSLGLTPNFKSNFDLAEDAKLQLSKDTYDDDLDNLLAQIGDQYADLFLAAKNLSDAILLSDILRVNTEITKAPLSASMIKRYDEHHQDLTLLKALVRQQLPEKYKEIFFDQSKNGYAGYIDGGASQEEFYKFIKPILEKMDGTEELLVKLNREDLLRKQRTFDNGSIPHQIHLGELHAILRRQEDFYPFLKDNREKIEKILTFRIPYYVGPLARGNSRFAWMTRKSEETITPWNFEEVVDKGASAQSFIERMTNFDKNLPNEKVLPKHSLLYEYFTVYNELTKVKYVTEGMRKPAFLSGEQKKAIVDLLFKTNRKVTVKQLKEDYFKKIECFDSVEISGVEDRFNASLGTYHDLLKIIKDKDFLDNEENEDILEDIVLTLTLFEDREMIEERLKTYAHLFDDKVMKQLKRRRYTGWGRLSRKLINGIRDKQSGKTILDFLKSDGFANRNFMQLIHDDSLTFKEDIQKAQVSGQGDSLHEHIANLAGSPAIKKGILQTVKVVDELVKVMGRHKPENIVIEMARENQTTQKGQKNSRERMKRIEEGIKELGSQILKEHPVENTQLQNEKLYLYYLQNGRDMYVDQELDINRLSDYDVDHIVPQSFLKDDSIDNKVLTRSDKARGKSDNVPSEEVVKKMKNYWRQLLNAKLITQRKFDNLTKAERGGLSELDKAGFIKRQLVETRQITKHVAQILDSRMNTKYDENDKLIREVKVITLKSKLVSDFRKDFQFYKVREINNYHHAHDAYLNAVVGTALIKKYPKLESEFVYGDYKVYDVRKMIAKSEQEIGKATAKYFFYSNIMNFFKTEITLANGEIRKRPLIETNGETGEIVWDKGRDFATVRKVLSMPQVNIVKKTEVQTGGFSKESILPKRNSDKLIARKKDWDPKKYGGFDSPTVAYSVLVVAKVEKGKSKKLKSVKELLGITIMERSSFEKNPIDFLEAKGYKEVKKDLIIKLPKYSLFELENGRKRMLASAGELQKGNELALPSKYVNFLYLASHYEKLKGSPEDNEQKQLFVEQHKHYLDEIIEQISEFSKRVILADANLDKVLSAYNKHRDKPIREQAENIIHLFTLTNLGAPAAFKYFDTTIDRKRYTSTKEVLDATLIHQSITGLYETRIDLSQLGGDGGPAPAPAPAPAPAPGGMDPLQLLQPLEAEIKGTKLKAHWNSGATITCVPQAFLEEEVPIKNIWIKTIHGEKEQPVYYLTFKIQGRKVEAEVISSPYDYILVSPSDIPWLMKKPLQLTTLVPLQEYEERLLKQTMLTGSYKEKLQSLFLKYDALWQHWENQVGHRRIKPHHIATGTVNPRPQKQYPINPKAKASIQTVINDLLKQGVLIQQNSIMNTPVYPVPKPDGKWRMVLDYREVNKTIPLIAAQNQHSAGILSSIFRGKYKTTLDLSNGFWAHSITPESYWLTAFTWLGQQYCWTRLPQGFLNSPALFTADVVDLLKEVPNVQVYVDDIYISHDDPREHLEQLEKVFSLLLNAGYVVSLKKSEIAQHEVEFLGFNITKEGRGLTETFKQKLLNITPPRDLKQLQSILGLLNFARNFIPNFSELVKPLYNIIATANGKYITWTTDNSQQLQNIISMLNSAENLEERNPEVRLIMKVNTSPSAGYIRFYNEFAKRPIMYLNYVYTKAEVKFTNTEKLLTTIHKGLIKALDLGMGQEILVYSPIVSMTKIQKTPLPERKALPIRWITWMSYLEDPRIQFHYDKTLPELQQVPTVTDDIIAKIKHPSEFSMVFYTDGSAIKHPNVNKSHNAGMGIAQVQFKPEFTVINTWSIPLGDHTAQLAEVAAVEFACKKALKIDGPVLIVTDSFYVAESVNKELPYWQSNGFFNNKKKPLKHVSKWKSIADCIQLKPDIIIIHEKGHQPTASTFHTEGNNLADKLATQGSYVVNAGKRTADGSEFEKRTADGSEFESPKKKAKVE

SEQ ID NO: 501 - protein, 2176 aa, synthetic construct
MPAAKRVKLDGGDKKYSIGLDIGTNSVGWAVITDEYKVPSKKFKVLGNTDRHSIKKNLIGALLFDSGETAEATRLKRTARRRYTRRKNRICYLQEIFSNEMAKVDDSFFHRLEESFLVEEDKKHERHPIFGNIVDEVAYHEKYPTIYHLRKKLVDSTDKADLRLIYLALAHMIKFRGHFLIEGDLNPDNSDVDKLFIQLVQTYNQLFEENPINASGVDAKAILSARLSKSRRLENLIAQLPGEKKNGLFGNLIALSLGLTPNFKSNFDLAEDAKLQLSKDTYDDDLDNLLAQIGDQYADLFLAAKNLSDAILLSDILRVNTEITKAPLSASMIKRYDEHHQDLTLLKALVRQQLPEKYKEIFFDQSKNGYAGYIDGGASQEEFYKFIKPILEKMDGTEELLVKLNREDLLRKQRTFDNGSIPHQIHLGELHAILRRQEDFYPFLKDNREKIEKILTFRIPYYVGPLARGNSRFAWMTRKSEETITPWNFEEVVDKGASAQSFIERMTNFDKNLPNEKVLPKHSLLYEYFTVYNELTKVKYVTEGMRKPAFLSGEQKKAIVDLLFKTNRKVTVKQLKEDYFKKIECFDSVEISGVEDRFNASLGTYHDLLKIIKDKDFLDNEENEDILEDIVLTLTLFEDREMIEERLKTYAHLFDDKVMKQLKRRRYTGWGRLSRKLINGIRDKQSGKTILDFLKSDGFANRNFMQLIHDDSLTFKEDIQKAQVSGQGDSLHEHIANLAGSPAIKKGILQTVKVVDELVKVMGRHKPENIVIEMARENQTTQKGQKNSRERMKRIEEGIKELGSQILKEHPVENTQLQNEKLYLYYLQNGRDMYVDQELDINRLSDYDVDHIVPQSFLKDDSIDNKVLTRSDKARGKSDNVPSEEVVKKMKNYWRQLLNAKLITQRKFDNLTKAERGGLSELDKAGFIKRQLVETRQITKHVAQILDSRMNTKYDENDKLIREVKVITLKSKLVSDFRKDFQFYKVREINNYHHAHDAYLNAVVGTALIKKYPKLESEFVYGDYKVYDVRKMIAKSEQEIGKATAKYFFYSNIMNFFKTEITLANGEIRKRPLIETNGETGEIVWDKGRDFATVRKVLSMPQVNIVKKTEVQTGGFSKESILPKRNSDKLIARKKDWDPKKYGGFDSPTVAYSVLVVAKVEKGKSKKLKSVKELLGITIMERSSFEKNPIDFLEAKGYKEVKKDLIIKLPKYSLFELENGRKRMLASAGELQKGNELALPSKYVNFLYLASHYEKLKGSPEDNEQKQLFVEQHKHYLDEIIEQISEFSKRVILADANLDKVLSAYNKHRDKPIREQAENIIHLFTLTNLGAPAAFKYFDTTIDRKRYTSTKEVLDATLIHQSITGLYETRIDLSQLGGDGGGGGEAAAKGGSGGMDPLQLLQPLEAEIKGTKLKAHWNSGATITCVPQAFLEEEVPIKNIWIKTIHGEKEQPVYYLTFKIQGRKVEAEVISSPYDYILVSPSDIPWLMKKPLQLTTLVPLQEYEERLLKQTMLTGSYKEKLQSLFLKYDALWQHWENQVGHRRIKPHHIATGTVNPRPQKQYPINPKAKASIQTVINDLLKQGVLIQQNSIMNTPVYPVPKPDGKWRMVLDYREVNKTIPLIAAQNQHSAGILSSIFRGKYKTTLDLSNGFWAHSITPESYWLTAFTWLGQQYCWTRLPQGFLNSPALFTADVVDLLKEVPNVQVYVDDIYISHDDPREHLEQLEKVFSLLLNAGYVVSLKKSEIAQHEVEFLGFNITKEGRGLTETFKQKLLNITPPRDLKQLQSILGLLNFARNFIPNFSELVKPLYNIIATANGKYITWTTDNSQQLQNIISMLNSAENLEERNPEVRLIMKVNTSPSAGYIRFYNEFAKRPIMYLNYVYTKAEVKFTNTEKLLTTIHKGLIKALDLGMGQEILVYSPIVSMTKIQKTPLPERKALPIRWITWMSYLEDPRIQFHYDKTLPELQQVPTVTDDIIAKIKHPSEFSMVFYTDGSAIKHPNVNKSHNAGMGIAQVQFKPEFTVINTWSIPLGDHTAQLAEVAAVEFACKKALKIDGPVLIVTDSFYVAESVNKELPYWQSNGFFNNKKKPLKHVSKWKSIADCIQLKPDIIIIHEKGHQPTASTFHTEGNNLADKLATQGSYVVNAGKRTADGSEFEKRTADGSEFESPKKKAKVE

SEQ ID NO: 502 - protein, 2176 aa, synthetic construct
MPAAKRVKLDGGDKKYSIGLDIGTNSVGWAVITDEYKVPSKKFKVLGNTDRHSIKKNLIGALLFDSGETAEATRLKRTARRRYTRRKNRICYLQEIFSNEMAKVDDSFFHRLEESFLVEEDKKHERHPIFGNIVDEVAYHEKYPTIYHLRKKLVDSTDKADLRLIYLALAHMIKFRGHFLIEGDLNPDNSDVDKLFIQLVQTYNQLFEENPINASGVDAKAILSARLSKSRRLENLIAQLPGEKKNGLFGNLIALSLGLTPNFKSNFDLAEDAKLQLSKDTYDDDLDNLLAQIGDQYADLFLAAKNLSDAILLSDILRVNTEITKAPLSASMIKRYDEHHQDLTLLKALVRQQLPEKYKEIFFDQSKNGYAGYIDGGASQEEFYKFIKPILEKMDGTEELLVKLNREDLLRKQRTFDNGSIPHQIHLGELHAILRRQEDFYPFLKDNREKIEKILTFRIPYYVGPLARGNSRFAWMTRKSEETITPWNFEEVVDKGASAQSFIERMTNFDKNLPNEKVLPKHSLLYEYFTVYNELTKVKYVTEGMRKPAFLSGEQKKAIVDLLFKTNRKVTVKQLKEDYFKKIECFDSVEISGVEDRFNASLGTYHDLLKIIKDKDFLDNEENEDILEDIVLTLTLFEDREMIEERLKTYAHLFDDKVMKQLKRRRYTGWGRLSRKLINGIRDKQSGKTILDFLKSDGFANRNFMQLIHDDSLTFKEDIQKAQVSGQGDSLHEHIANLAGSPAIKKGILQTVKVVDELVKVMGRHKPENIVIEMARENQTTQKGQKNSRERMKRIEEGIKELGSQILKEHPVENTQLQNEKLYLYYLQNGRDMYVDQELDINRLSDYDVDHIVPQSFLKDDSIDNKVLTRSDKARGKSDNVPSEEVVKKMKNYWRQLLNAKLITQRKFDNLTKAERGGLSELDKAGFIKRQLVETRQITKHVAQILDSRMNTKYDENDKLIREVKVITLKSKLVSDFRKDFQFYKVREINNYHHAHDAYLNAVVGTALIKKYPKLESEFVYGDYKVYDVRKMIAKSEQEIGKATAKYFFYSNIMNFFKTEITLANGEIRKRPLIETNGETGEIVWDKGRDFATVRKVLSMPQVNIVKKTEVQTGGFSKESILPKRNSDKLIARKKDWDPKKYGGFDSPTVAYSVLVVAKVEKGKSKKLKSVKELLGITIMERSSFEKNPIDFLEAKGYKEVKKDLIIKLPKYSLFELENGRKRMLASAGELQKGNELALPSKYVNFLYLASHYEKLKGSPEDNEQKQLFVEQHKHYLDEIIEQISEFSKRVILADANLDKVLSAYNKHRDKPIREQAENIIHLFTLTNLGAPAAFKYFDTTIDRKRYTSTKEVLDATLIHQSITGLYETRIDLSQLGGDGGGGSPAPEAAAKGGMDPLQLLQPLEAEIKGTKLKAHWNSGATITCVPQAFLEEEVPIKNIWIKTIHGEKEQPVYYLTFKIQGRKVEAEVISSPYDYILVSPSDIPWLMKKPLQLTTLVPLQEYEERLLKQTMLTGSYKEKLQSLFLKYDALWQHWENQVGHRRIKPHHIATGTVNPRPQKQYPINPKAKASIQTVINDLLKQGVLIQQNSIMNTPVYPVPKPDGKWRMVLDYREVNKTIPLIAAQNQHSAGILSSIFRGKYKTTLDLSNGFWAHSITPESYWLTAFTWLGQQYCWTRLPQGFLNSPALFTADVVDLLKEVPNVQVYVDDIYISHDDPREHLEQLEKVFSLLLNAGYVVSLKKSEIAQHEVEFLGFNITKEGRGLTETFKQKLLNITPPRDLKQLQSILGLLNFARNFIPNFSELVKPLYNIIATANGKYITWTTDNSQQLQNIISMLNSAENLEERNPEVRLIMKVNTSPSAGYIRFYNEFAKRPIMYLNYVYTKAEVKFTNTEKLLTTIHKGLIKALDLGMGQEILVYSPIVSMTKIQKTPLPERKALPIRWITWMSYLEDPRIQFHYDKTLPELQQVPTVTDDIIAKIKHPSEFSMVFYTDGSAIKHPNVNKSHNAGMGIAQVQFKPEFTVINTWSIPLGDHTAQLAEVAAVEFACKKALKIDGPVLIVTDSFYVAESVNKELPYWQSNGFFNNKKKPLKHVSKWKSIADCIQLKPDIIIIHEKGHQPTASTFHTEGNNLADKLATQGSYVVNAGKRTADGSEFEKRTADGSEFESPKKKAKVE

SEQ ID NO: 503 - protein, 2174 aa, synthetic construct
MPAAKRVKLDGGDKKYSIGLDIGTNSVGWAVITDEYKVPSKKFKVLGNTDRHSIKKNLIGALLFDSGETAEATRLKRTARRRYTRRKNRICYLQEIFSNEMAKVDDSFFHRLEESFLVEEDKKHERHPIFGNIVDEVAYHEKYPTIYHLRKKLVDSTDKADLRLIYLALAHMIKFRGHFLIEGDLNPDNSDVDKLFIQLVQTYNQLFEENPINASGVDAKAILSARLSKSRRLENLIAQLPGEKKNGLFGNLIALSLGLTPNFKSNFDLAEDAKLQLSKDTYDDDLDNLLAQIGDQYADLFLAAKNLSDAILLSDILRVNTEITKAPLSASMIKRYDEHHQDLTLLKALVRQQLPEKYKEIFFDQSKNGYAGYIDGGASQEEFYKFIKPILEKMDGTEELLVKLNREDLLRKQRTFDNGSIPHQIHLGELHAILRRQEDFYPFLKDNREKIEKILTFRIPYYVGPLARGNSRFAWMTRKSEETITPWNFEEVVDKGASAQSFIERMTNFDKNLPNEKVLPKHSLLYEYFTVYNELTKVKYVTEGMRKPAFLSGEQKKAIVDLLFKTNRKVTVKQLKEDYFKKIECFDSVEISGVEDRFNASLGTYHDLLKIIKDKDFLDNEENEDILEDIVLTLTLFEDREMIEERLKTYAHLFDDKVMKQLKRRRYTGWGRLSRKLINGIRDKQSGKTILDFLKSDGFANRNFMQLIHDDSLTFKEDIQKAQVSGQGDSLHEHIANLAGSPAIKKGILQTVKVVDELVKVMGRHKPENIVIEMARENQTTQKGQKNSRERMKRIEEGIKELGSQILKEHPVENTQLQNEKLYLYYLQNGRDMYVDQELDINRLSDYDVDHIVPQSFLKDDSIDNKVLTRSDKARGKSDNVPSEEVVKKMKNYWRQLLNAKLITQRKFDNLTKAERGGLSELDKAGFIKRQLVETRQITKHVAQILDSRMNTKYDENDKLIREVKVITLKSKLVSDFRKDFQFYKVREINNYHHAHDAYLNAVVGTALIKKYPKLESEFVYGDYKVYDVRKMIAKSEQEIGKATAKYFFYSNIMNFFKTEITLANGEIRKRPLIETNGETGEIVWDKGRDFATVRKVLSMPQVNIVKKTEVQTGGFSKESILPKRNSDKLIARKKDWDPKKYGGFDSPTVAYSVLVVAKVEKGKSKKLKSVKELLGITIMERSSFEKNPIDFLEAKGYKEVKKDLIIKLPKYSLFELENGRKRMLASAGELQKGNELALPSKYVNFLYLASHYEKLKGSPEDNEQKQLFVEQHKHYLDEIIEQISEFSKRVILADANLDKVLSAYNKHRDKPIREQAENIIHLFTLTNLGAPAAFKYFDTTIDRKRYTSTKEVLDATLIHQSITGLYETRIDLSQLGGDGGPAPAPAPAPGGMDPLQLLQPLEAEIKGTKLKAHWNSGATITCVPQAFLEEEVPIKNIWIKTIHGEKEQPVYYLTFKIQGRKVEAEVISSPYDYILVSPSDIPWLMKKPLQLTTLVPLQEYEERLLKQTMLTGSYKEKLQSLFLKYDALWQHWENQVGHRRIKPHHIATGTVNPRPQKQYPINPKAKASIQTVINDLLKQGVLIQQNSIMNTPVYPVPKPDGKWRMVLDYREVNKTIPLIAAQNQHSAGILSSIFRGKYKTTLDLSNGFWAHSITPESYWLTAFTWLGQQYCWTRLPQGFLNSPALFTADVVDLLKEVPNVQVYVDDIYISHDDPREHLEQLEKVFSLLLNAGYVVSLKKSEIAQHEVEFLGFNITKEGRGLTETFKQKLLNITPPRDLKQLQSILGLLNFARNFIPNFSELVKPLYNIIATANGKYITWTTDNSQQLQNIISMLNSAENLEERNPEVRLIMKVNTSPSAGYIRFYNEFAKRPIMYLNYVYTKAEVKFTNTEKLLTTIHKGLIKALDLGMGQEILVYSPIVSMTKIQKTPLPERKALPIRWITWMSYLEDPRIQFHYDKTLPELQQVPTVTDDIIAKIKHPSEFSMVFYTDGSAIKHPNVNKSHNAGMGIAQVQFKPEFTVINTWSIPLGDHTAQLAEVAAVEFACKKALKIDGPVLIVTDSFYVAESVNKELPYWQSNGFFNNKKKPLKHVSKWKSIADCIQLKPDIIIIHEKGHQPTASTFHTEGNNLADKLATQGSYVVNAGKRTADGSEFEKRTADGSEFESPKKKAKVE

SEQ ID NO: 504 - protein, 2176 aa, synthetic construct
MPAAKRVKLDGGDKKYSIGLDIGTNSVGWAVITDEYKVPSKKFKVLGNTDRHSIKKNLIGALLFDSGETAEATRLKRTARRRYTRRKNRICYLQEIFSNEMAKVDDSFFHRLEESFLVEEDKKHERHPIFGNIVDEVAYHEKYPTIYHLRKKLVDSTDKADLRLIYLALAHMIKFRGHFLIEGDLNPDNSDVDKLFIQLVQTYNQLFEENPINASGVDAKAILSARLSKSRRLENLIAQLPGEKKNGLFGNLIALSLGLTPNFKSNFDLAEDAKLQLSKDTYDDDLDNLLAQIGDQYADLFLAAKNLSDAILLSDILRVNTEITKAPLSASMIKRYDEHHQDLTLLKALVRQQLPEKYKEIFFDQSKNGYAGYIDGGASQEEFYKFIKPILEKMDGTEELLVKLNREDLLRKQRTFDNGSIPHQIHLGELHAILRRQEDFYPFLKDNREKIEKILTFRIPYYVGPLARGNSRFAWMTRKSEETITPWNFEEVVDKGASAQSFIERMTNFDKNLPNEKVLPKHSLLYEYFTVYNELTKVKYVTEGMRKPAFLSGEQKKAIVDLLFKTNRKVTVKQLKEDYFKKIECFDSVEISGVEDRFNASLGTYHDLLKIIKDKDFLDNEENEDILEDIVLTLTLFEDREMIEERLKTYAHLFDDKVMKQLKRRRYTGWGRLSRKLINGIRDKQSGKTILDFLKSDGFANRNFMQLIHDDSLTFKEDIQKAQVSGQGDSLHEHIANLAGSPAIKKGILQTVKVVDELVKVMGRHKPENIVIEMARENQTTQKGQKNSRERMKRIEEGIKELGSQILKEHPVENTQLQNEKLYLYYLQNGRDMYVDQELDINRLSDYDVDHIVPQSFLKDDSIDNKVLTRSDKARGKSDNVPSEEVVKKMKNYWRQLLNAKLITQRKFDNLTKAERGGLSELDKAGFIKRQLVETRQITKHVAQILDSRMNTKYDENDKLIREVKVITLKSKLVSDFRKDFQFYKVREINNYHHAHDAYLNAVVGTALIKKYPKLESEFVYGDYKVYDVRKMIAKSEQEIGKATAKYFFYSNIMNFFKTEITLANGEIRKRPLIETNGETGEIVWDKGRDFATVRKVLSMPQVNIVKKTEVQTGGFSKESILPKRNSDKLIARKKDWDPKKYGGFDSPTVAYSVLVVAKVEKGKSKKLKSVKELLGITIMERSSFEKNPIDFLEAKGYKEVKKDLIIKLPKYSLFELENGRKRMLASAGELQKGNELALPSKYVNFLYLASHYEKLKGSPEDNEQKQLFVEQHKHYLDEIIEQISEFSKRVILADANLDKVLSAYNKHRDKPIREQAENIIHLFTLTNLGAPAAFKYFDTTIDRKRYTSTKEVLDATLIHQSITGLYETRIDLSQLGGDGGGGGEAAAKGSSGGMDPLQLLQPLEAEIKGTKLKAHWNSGATITCVPQAFLEEEVPIKNIWIKTIHGEKEQPVYYLTFKIQGRKVEAEVISSPYDYILVSPSDIPWLMKKPLQLTTLVPLQEYEERLLKQTMLTGSYKEKLQSLFLKYDALWQHWENQVGHRRIKPHHIATGTVNPRPQKQYPINPKAKASIQTVINDLLKQGVLIQQNSIMNTPVYPVPKPDGKWRMVLDYREVNKTIPLIAAQNQHSAGILSSIFRGKYKTTLDLSNGFWAHSITPESYWLTAFTWLGQQYCWTRLPQGFLNSPALFTADVVDLLKEVPNVQVYVDDIYISHDDPREHLEQLEKVFSLLLNAGYVVSLKKSEIAQHEVEFLGFNITKEGRGLTETFKQKLLNITPPRDLKQLQSILGLLNFARNFIPNFSELVKPLYNIIATANGKYITWTTDNSQQLQNIISMLNSAENLEERNPEVRLIMKVNTSPSAGYIRFYNEFAKRPIMYLNYVYTKAEVKFTNTEKLLTTIHKGLIKALDLGMGQEILVYSPIVSMTKIQKTPLPERKALPIRWITWMSYLEDPRIQFHYDKTLPELQQVPTVTDDIIAKIKHPSEFSMVFYTDGSAIKHPNVNKSHNAGMGIAQVQFKPEFTVINTWSIPLGDHTAQLAEVAAVEFACKKALKIDGPVLIVTDSFYVAESVNKELPYWQSNGFFNNKKKPLKHVSKWKSIADCIQLKPDIIIIHEKGHQPTASTFHTEGNNLADKLATQGSYVVNAGKRTADGSEFEKRTADGSEFESPKKKAKVE

SEQ ID NO: 505 - protein, 2176 aa, synthetic construct
MPAAKRVKLDGGDKKYSIGLDIGTNSVGWAVITDEYKVPSKKFKVLGNTDRHSIKKNLIGALLFDSGETAEATRLKRTARRRYTRRKNRICYLQEIFSNEMAKVDDSFFHRLEESFLVEEDKKHERHPIFGNIVDEVAYHEKYPTIYHLRKKLVDSTDKADLRLIYLALAHMIKFRGHFLIEGDLNPDNSDVDKLFIQLVQTYNQLFEENPINASGVDAKAILSARLSKSRRLENLIAQLPGEKKNGLFGNLIALSLGLTPNFKSNFDLAEDAKLQLSKDTYDDDLDNLLAQIGDQYADLFLAAKNLSDAILLSDILRVNTEITKAPLSASMIKRYDEHHQDLTLLKALVRQQLPEKYKEIFFDQSKNGYAGYIDGGASQEEFYKFIKPILEKMDGTEELLVKLNREDLLRKQRTFDNGSIPHQIHLGELHAILRRQEDFYPFLKDNREKIEKILTFRIPYYVGPLARGNSRFAWMTRKSEETITPWNFEEVVDKGASAQSFIERMTNFDKNLPNEKVLPKHSLLYEYFTVYNELTKVKYVTEGMRKPAFLSGEQKKAIVDLLFKTNRKVTVKQLKEDYFKKIECFDSVEISGVEDRFNASLGTYHDLLKIIKDKDFLDNEENEDILEDIVLTLTLFEDREMIEERLKTYAHLFDDKVMKQLKRRRYTGWGRLSRKLINGIRDKQSGKTILDFLKSDGFANRNFMQLIHDDSLTFKEDIQKAQVSGQGDSLHEHIANLAGSPAIKKGILQTVKVVDELVKVMGRHKPENIVIEMARENQTTQKGQKNSRERMKRIEEGIKELGSQILKEHPVENTQLQNEKLYLYYLQNGRDMYVDQELDINRLSDYDVDHIVPQSFLKDDSIDNKVLTRSDKARGKSDNVPSEEVVKKMKNYWRQLLNAKLITQRKFDNLTKAERGGLSELDKAGFIKRQLVETRQITKHVAQILDSRMNTKYDENDKLIREVKVITLKSKLVSDFRKDFQFYKVREINNYHHAHDAYLNAVVGTALIKKYPKLESEFVYGDYKVYDVRKMIAKSEQEIGKATAKYFFYSNIMNFFKTEITLANGEIRKRPLIETNGETGEIVWDKGRDFATVRKVLSMPQVNIVKKTEVQTGGFSKESILPKRNSDKLIARKKDWDPKKYGGFDSPTVAYSVLVVAKVEKGKSKKLKSVKELLGITIMERSSFEKNPIDFLEAKGYKEVKKDLIIKLPKYSLFELENGRKRMLASAGELQKGNELALPSKYVNFLYLASHYEKLKGSPEDNEQKQLFVEQHKHYLDEIIEQISEFSKRVILADANLDKVLSAYNKHRDKPIREQAENIIHLFTLTNLGAPAAFKYFDTTIDRKRYTSTKEVLDATLIHQSITGLYETRIDLSQLGGDGGEAAAKGGSGSSGGMDPLQLLQPLEAEIKGTKLKAHWNSGATITCVPQAFLEEEVPIKNIWIKTIHGEKEQPVYYLTFKIQGRKVEAEVISSPYDYILVSPSDIPWLMKKPLQLTTLVPLQEYEERLLKQTMLTGSYKEKLQSLFLKYDALWQHWENQVGHRRIKPHHIATGTVNPRPQKQYPINPKAKASIQTVINDLLKQGVLIQQNSIMNTPVYPVPKPDGKWRMVLDYREVNKTIPLIAAQNQHSAGILSSIFRGKYKTTLDLSNGFWAHSITPESYWLTAFTWLGQQYCWTRLPQGFLNSPALFTADVVDLLKEVPNVQVYVDDIYISHDDPREHLEQLEKVFSLLLNAGYVVSLKKSEIAQHEVEFLGFNITKEGRGLTETFKQKLLNITPPRDLKQLQSILGLLNFARNFIPNFSELVKPLYNIIATANGKYITWTTDNSQQLQNIISMLNSAENLEERNPEVRLIMKVNTSPSAGYIRFYNEFAKRPIMYLNYVYTKAEVKFTNTEKLLTTIHKGLIKALDLGMGQEILVYSPIVSMTKIQKTPLPERKALPIRWITWMSYLEDPRIQFHYDKTLPELQQVPTVTDDIIAKIKHPSEFSMVFYTDGSAIKHPNVNKSHNAGMGIAQVQFKPEFTVINTWSIPLGDHTAQLAEVAAVEFACKKALKIDGPVLIVTDSFYVAESVNKELPYWQSNGFFNNKKKPLKHVSKWKSIADCIQLKPDIIIIHEKGHQPTASTFHTEGNNLADKLATQGSYVVNAGKRTADGSEFEKRTADGSEFESPKKKAKVE

SEQ ID NO: 506 - protein, 2176 aa, synthetic construct
MPAAKRVKLDGGDKKYSIGLDIGTNSVGWAVITDEYKVPSKKFKVLGNTDRHSIKKNLIGALLFDSGETAEATRLKRTARRRYTRRKNRICYLQEIFSNEMAKVDDSFFHRLEESFLVEEDKKHERHPIFGNIVDEVAYHEKYPTIYHLRKKLVDSTDKADLRLIYLALAHMIKFRGHFLIEGDLNPDNSDVDKLFIQLVQTYNQLFEENPINASGVDAKAILSARLSKSRRLENLIAQLPGEKKNGLFGNLIALSLGLTPNFKSNFDLAEDAKLQLSKDTYDDDLDNLLAQIGDQYADLFLAAKNLSDAILLSDILRVNTEITKAPLSASMIKRYDEHHQDLTLLKALVRQQLPEKYKEIFFDQSKNGYAGYIDGGASQEEFYKFIKPILEKMDGTEELLVKLNREDLLRKQRTFDNGSIPHQIHLGELHAILRRQEDFYPFLKDNREKIEKILTFRIPYYVGPLARGNSRFAWMTRKSEETITPWNFEEVVDKGASAQSFIERMTNFDKNLPNEKVLPKHSLLYEYFTVYNELTKVKYVTEGMRKPAFLSGEQKKAIVDLLFKTNRKVTVKQLKEDYFKKIECFDSVEISGVEDRFNASLGTYHDLLKIIKDKDFLDNEENEDILEDIVLTLTLFEDREMIEERLKTYAHLFDDKVMKQLKRRRYTGWGRLSRKLINGIRDKQSGKTILDFLKSDGFANRNFMQLIHDDSLTFKEDIQKAQVSGQGDSLHEHIANLAGSPAIKKGILQTVKVVDELVKVMGRHKPENIVIEMARENQTTQKGQKNSRERMKRIEEGIKELGSQILKEHPVENTQLQNEKLYLYYLQNGRDMYVDQELDINRLSDYDVDHIVPQSFLKDDSIDNKVLTRSDKARGKSDNVPSEEVVKKMKNYWRQLLNAKLITQRKFDNLTKAERGGLSELDKAGFIKRQLVETRQITKHVAQILDSRMNTKYDENDKLIREVKVITLKSKLVSDFRKDFQFYKVREINNYHHAHDAYLNAVVGTALIKKYPKLESEFVYGDYKVYDVRKMIAKSEQEIGKATAKYFFYSNIMNFFKTEITLANGEIRKRPLIETNGETGEIVWDKGRDFATVRKVLSMPQVNIVKKTEVQTGGFSKESILPKRNSDKLIARKKDWDPKKYGGFDSPTVAYSVLVVAKVEKGKSKKLKSVKELLGITIMERSSFEKNPIDFLEAKGYKEVKKDLIIKLPKYSLFELENGRKRMLASAGELQKGNELALPSKYVNFLYLASHYEKLKGSPEDNEQKQLFVEQHKHYLDEIIEQISEFSKRVILADANLDKVLSAYNKHRDKPIREQAENIIHLFTLTNLGAPAAFKYFDTTIDRKRYTSTKEVLDATLIHQSITGLYETRIDLSQLGGDGGGSSEAAAKPAPGGMDPLQLLQPLEAEIKGTKLKAHWNSGATITCVPQAFLEEEVPIKNIWIKTIHGEKEQPVYYLTFKIQGRKVEAEVISSPYDYILVSPSDIPWLMKKPLQLTTLVPLQEYEERLLKQTMLTGSYKEKLQSLFLKYDALWQHWENQVGHRRIKPHHIATGTVNPRPQKQYPINPKAKASIQTVINDLLKQGVLIQQNSIMNTPVYPVPKPDGKWRMVLDYREVNKTIPLIAAQNQHSAGILSSIFRGKYKTTLDLSNGFWAHSITPESYWLTAFTWLGQQYCWTRLPQGFLNSPALFTADVVDLLKEVPNVQVYVDDIYISHDDPREHLEQLEKVFSLLLNAGYVVSLKKSEIAQHEVEFLGFNITKEGRGLTETFKQKLLNITPPRDLKQLQSILGLLNFARNFIPNFSELVKPLYNIIATANGKYITWTTDNSQQLQNIISMLNSAENLEERNPEVRLIMKVNTSPSAGYIRFYNEFAKRPIMYLNYVYTKAEVKFTNTEKLLTTIHKGLIKALDLGMGQEILVYSPIVSMTKIQKTPLPERKALPIRWITWMSYLEDPRIQFHYDKTLPELQQVPTVTDDIIAKIKHPSEFSMVFYTDGSAIKHPNVNKSHNAGMGIAQVQFKPEFTVINTWSIPLGDHTAQLAEVAAVEFACKKALKIDGPVLIVTDSFYVAESVNKELPYWQSNGFFNNKKKPLKHVSKWKSIADCIQLKPDIIIIHEKGHQPTASTFHTEGNNLADKLATQGSYVVNAGKRTADGSEFEKRTADGSEFESPKKKAKVE

SEQ ID NO: 507 - protein, 2176 aa, synthetic construct
MPAAKRVKLDGGDKKYSIGLDIGTNSVGWAVITDEYKVPSKKFKVLGNTDRHSIKKNLIGALLFDSGETAEATRLKRTARRRYTRRKNRICYLQEIFSNEMAKVDDSFFHRLEESFLVEEDKKHERHPIFGNIVDEVAYHEKYPTIYHLRKKLVDSTDKADLRLIYLALAHMIKFRGHFLIEGDLNPDNSDVDKLFIQLVQTYNQLFEENPINASGVDAKAILSARLSKSRRLENLIAQLPGEKKNGLFGNLIALSLGLTPNFKSNFDLAEDAKLQLSKDTYDDDLDNLLAQIGDQYADLFLAAKNLSDAILLSDILRVNTEITKAPLSASMIKRYDEHHQDLTLLKALVRQQLPEKYKEIFFDQSKNGYAGYIDGGASQEEFYKFIKPILEKMDGTEELLVKLNREDLLRKQRTFDNGSIPHQIHLGELHAILRRQEDFYPFLKDNREKIEKILTFRIPYYVGPLARGNSRFAWMTRKSEETITPWNFEEVVDKGASAQSFIERMTNFDKNLPNEKVLPKHSLLYEYFTVYNELTKVKYVTEGMRKPAFLSGEQKKAIVDLLFKTNRKVTVKQLKEDYFKKIECFDSVEISGVEDRFNASLGTYHDLLKIIKDKDFLDNEENEDILEDIVLTLTLFEDREMIEERLKTYAHLFDDKVMKQLKRRRYTGWGRLSRKLINGIRDKQSGKTILDFLKSDGFANRNFMQLIHDDSLTFKEDIQKAQVSGQGDSLHEHIANLAGSPAIKKGILQTVKVVDELVKVMGRHKPENIVIEMARENQTTQKGQKNSRERMKRIEEGIKELGSQILKEHPVENTQLQNEKLYLYYLQNGRDMYVDQELDINRLSDYDVDHIVPQSFLKDDSIDNKVLTRSDKARGKSDNVPSEEVVKKMKNYWRQLLNAKLITQRKFDNLTKAERGGLSELDKAGFIKRQLVETRQITKHVAQILDSRMNTKYDENDKLIREVKVITLKSKLVSDFRKDFQFYKVREINNYHHAHDAYLNAVVGTALIKKYPKLESEFVYGDYKVYDVRKMIAKSEQEIGKATAKYFFYSNIMNFFKTEITLANGEIRKRPLIETNGETGEIVWDKGRDFATVRKVLSMPQVNIVKKTEVQTGGFSKESILPKRNSDKLIARKKDWDPKKYGGFDSPTVAYSVLVVAKVEKGKSKKLKSVKELLGITIMERSSFEKNPIDFLEAKGYKEVKKDLIIKLPKYSLFELENGRKRMLASAGELQKGNELALPSKYVNFLYLASHYEKLKGSPEDNEQKQLFVEQHKHYLDEIIEQISEFSKRVILADANLDKVLSAYNKHRDKPIREQAENIIHLFTLTNLGAPAAFKYFDTTIDRKRYTSTKEVLDATLIHQSITGLYETRIDLSQLGGDGGGGGPAPEAAAKGGMDPLQLLQPLEAEIKGTKLKAHWNSGATITCVPQAFLEEEVPIKNIWIKTIHGEKEQPVYYLTFKIQGRKVEAEVISSPYDYILVSPSDIPWLMKKPLQLTTLVPLQEYEERLLKQTMLTGSYKEKLQSLFLKYDALWQHWENQVGHRRIKPHHIATGTVNPRPQKQYPINPKAKASIQTVINDLLKQGVLIQQNSIMNTPVYPVPKPDGKWRMVLDYREVNKTIPLIAAQNQHSAGILSSIFRGKYKTTLDLSNGFWAHSITPESYWLTAFTWLGQQYCWTRLPQGFLNSPALFTADVVDLLKEVPNVQVYVDDIYISHDDPREHLEQLEKVFSLLLNAGYVVSLKKSEIAQHEVEFLGFNITKEGRGLTETFKQKLLNITPPRDLKQLQSILGLLNFARNFIPNFSELVKPLYNIIATANGKYITWTTDNSQQLQNIISMLNSAENLEERNPEVRLIMKVNTSPSAGYIRFYNEFAKRPIMYLNYVYTKAEVKFTNTEKLLTTIHKGLIKALDLGMGQEILVYSPIVSMTKIQKTPLPERKALPIRWITWMSYLEDPRIQFHYDKTLPELQQVPTVTDDIIAKIKHPSEFSMVFYTDGSAIKHPNVNKSHNAGMGIAQVQFKPEFTVINTWSIPLGDHTAQLAEVAAVEFACKKALKIDGPVLIVTDSFYVAESVNKELPYWQSNGFFNNKKKPLKHVSKWKSIADCIQLKPDIIIIHEKGHQPTASTFHTEGNNLADKLATQGSYVVNAGKRTADGSEFEKRTADGSEFESPKKKAKVE

SEQ ID NO: 508 - protein, 2174 aa, synthetic construct
MPAAKRVKLDGGDKKYSIGLDIGTNSVGWAVITDEYKVPSKKFKVLGNTDRHSIKKNLIGALLFDSGETAEATRLKRTARRRYTRRKNRICYLQEIFSNEMAKVDDSFFHRLEESFLVEEDKKHERHPIFGNIVDEVAYHEKYPTIYHLRKKLVDSTDKADLRLIYLALAHMIKFRGHFLIEGDLNPDNSDVDKLFIQLVQTYNQLFEENPINASGVDAKAILSARLSKSRRLENLIAQLPGEKKNGLFGNLIALSLGLTPNFKSNFDLAEDAKLQLSKDTYDDDLDNLLAQIGDQYADLFLAAKNLSDAILLSDILRVNTEITKAPLSASMIKRYDEHHQDLTLLKALVRQQLPEKYKEIFFDQSKNGYAGYIDGGASQEEFYKFIKPILEKMDGTEELLVKLNREDLLRKQRTFDNGSIPHQIHLGELHAILRRQEDFYPFLKDNREKIEKILTFRIPYYVGPLARGNSRFAWMTRKSEETITPWNFEEVVDKGASAQSFIERMTNFDKNLPNEKVLPKHSLLYEYFTVYNELTKVKYVTEGMRKPAFLSGEQKKAIVDLLFKTNRKVTVKQLKEDYFKKIECFDSVEISGVEDRFNASLGTYHDLLKIIKDKDFLDNEENEDILEDIVLTLTLFEDREMIEERLKTYAHLFDDKVMKQLKRRRYTGWGRLSRKLINGIRDKQSGKTILDFLKSDGFANRNFMQLIHDDSLTFKEDIQKAQVSGQGDSLHEHIANLAGSPAIKKGILQTVKVVDELVKVMGRHKPENIVIEMARENQTTQKGQKNSRERMKRIEEGIKELGSQILKEHPVENTQLQNEKLYLYYLQNGRDMYVDQELDINRLSDYDVDHIVPQSFLKDDSIDNKVLTRSDKARGKSDNVPSEEVVKKMKNYWRQLLNAKLITQRKFDNLTKAERGGLSELDKAGFIKRQLVETRQITKHVAQILDSRMNTKYDENDKLIREVKVITLKSKLVSDFRKDFQFYKVREINNYHHAHDAYLNAVVGTALIKKYPKLESEFVYGDYKVYDVRKMIAKSEQEIGKATAKYFFYSNIMNFFKTEITLANGEIRKRPLIETNGETGEIVWDKGRDFATVRKVLSMPQVNIVKKTEVQTGGFSKESILPKRNSDKLIARKKDWDPKKYGGFDSPTVAYSVLVVAKVEKGKSKKLKSVKELLGITIMERSSFEKNPIDFLEAKGYKEVKKDLIIKLPKYSLFELENGRKRMLASAGELQKGNELALPSKYVNFLYLASHYEKLKGSPEDNEQKQLFVEQHKHYLDEIIEQISEFSKRVILADANLDKVLSAYNKHRDKPIREQAENIIHLFTLTNLGAPAAFKYFDTTIDRKRYTSTKEVLDATLIHQSITGLYETRIDLSQLGGDGGGSSGGGGGSGGMDPLQLLQPLEAEIKGTKLKAHWNSGATITCVPQAFLEEEVPIKNIWIKTIHGEKEQPVYYLTFKIQGRKVEAEVISSPYDYILVSPSDIPWLMKKPLQLTTLVPLQEYEERLLKQTMLTGSYKEKLQSLFLKYDALWQHWENQVGHRRIKPHHIATGTVNPRPQKQYPINPKAKASIQTVINDLLKQGVLIQQNSIMNTPVYPVPKPDGKWRMVLDYREVNKTIPLIAAQNQHSAGILSSIFRGKYKTTLDLSNGFWAHSITPESYWLTAFTWLGQQYCWTRLPQGFLNSPALFTADVVDLLKEVPNVQVYVDDIYISHDDPREHLEQLEKVFSLLLNAGYVVSLKKSEIAQHEVEFLGFNITKEGRGLTETFKQKLLNITPPRDLKQLQSILGLLNFARNFIPNFSELVKPLYNIIATANGKYITWTTDNSQQLQNIISMLNSAENLEERNPEVRLIMKVNTSPSAGYIRFYNEFAKRPIMYLNYVYTKAEVKFTNTEKLLTTIHKGLIKALDLGMGQEILVYSPIVSMTKIQKTPLPERKALPIRWITWMSYLEDPRIQFHYDKTLPELQQVPTVTDDIIAKIKHPSEFSMVFYTDGSAIKHPNVNKSHNAGMGIAQVQFKPEFTVINTWSIPLGDHTAQLAEVAAVEFACKKALKIDGPVLIVTDSFYVAESVNKELPYWQSNGFFNNKKKPLKHVSKWKSIADCIQLKPDIIIIHEKGHQPTASTFHTEGNNLADKLATQGSYVVNAGKRTADGSEFEKRTADGSEFESPKKKAKVE

SEQ ID NO: 509 - protein, 2183 aa, synthetic construct
MPAAKRVKLDGGDKKYSIGLDIGTNSVGWAVITDEYKVPSKKFKVLGNTDRHSIKKNLIGALLFDSGETAEATRLKRTARRRYTRRKNRICYLQEIFSNEMAKVDDSFFHRLEESFLVEEDKKHERHPIFGNIVDEVAYHEKYPTIYHLRKKLVDSTDKADLRLIYLALAHMIKFRGHFLIEGDLNPDNSDVDKLFIQLVQTYNQLFEENPINASGVDAKAILSARLSKSRRLENLIAQLPGEKKNGLFGNLIALSLGLTPNFKSNFDLAEDAKLQLSKDTYDDDLDNLLAQIGDQYADLFLAAKNLSDAILLSDILRVNTEITKAPLSASMIKRYDEHHQDLTLLKALVRQQLPEKYKEIFFDQSKNGYAGYIDGGASQEEFYKFIKPILEKMDGTEELLVKLNREDLLRKQRTFDNGSIPHQIHLGELHAILRRQEDFYPFLKDNREKIEKILTFRIPYYVGPLARGNSRFAWMTRKSEETITPWNFEEVVDKGASAQSFIERMTNFDKNLPNEKVLPKHSLLYEYFTVYNELTKVKYVTEGMRKPAFLSGEQKKAIVDLLFKTNRKVTVKQLKEDYFKKIECFDSVEISGVEDRFNASLGTYHDLLKIIKDKDFLDNEENEDILEDIVLTLTLFEDREMIEERLKTYAHLFDDKVMKQLKRRRYTGWGRLSRKLINGIRDKQSGKTILDFLKSDGFANRNFMQLIHDDSLTFKEDIQKAQVSGQGDSLHEHIANLAGSPAIKKGILQTVKVVDELVKVMGRHKPENIVIEMARENQTTQKGQKNSRERMKRIEEGIKELGSQILKEHPVENTQLQNEKLYLYYLQNGRDMYVDQELDINRLSDYDVDHIVPQSFLKDDSIDNKVLTRSDKARGKSDNVPSEEVVKKMKNYWRQLLNAKLITQRKFDNLTKAERGGLSELDKAGFIKRQLVETRQITKHVAQILDSRMNTKYDENDKLIREVKVITLKSKLVSDFRKDFQFYKVREINNYHHAHDAYLNAVVGTALIKKYPKLESEFVYGDYKVYDVRKMIAKSEQEIGKATAKYFFYSNIMNFFKTEITLANGEIRKRPLIETNGETGEIVWDKGRDFATVRKVLSMPQVNIVKKTEVQTGGFSKESILPKRNSDKLIARKKDWDPKKYGGFDSPTVAYSVLVVAKVEKGKSKKLKSVKELLGITIMERSSFEKNPIDFLEAKGYKEVKKDLIIKLPKYSLFELENGRKRMLASAGELQKGNELALPSKYVNFLYLASHYEKLKGSPEDNEQKQLFVEQHKHYLDEIIEQISEFSKRVILADANLDKVLSAYNKHRDKPIREQAENIIHLFTLTNLGAPAAFKYFDTTIDRKRYTSTKEVLDATLIHQSITGLYETRIDLSQLGGDGGGSSGSSGSSGSSGSSGSSGGMDPLQLLQPLEAEIKGTKLKAHWNSGATITCVPQAFLEEEVPIKNIWIKTIHGEKEQPVYYLTFKIQGRKVEAEVISSPYDYILVSPSDIPWLMKKPLQLTTLVPLQEYEERLLKQTMLTGSYKEKLQSLFLKYDALWQHWENQVGHRRIKPHHIATGTVNPRPQKQYPINPKAKASIQTVINDLLKQGVLIQQNSIMNTPVYPVPKPDGKWRMVLDYREVNKTIPLIAAQNQHSAGILSSIFRGKYKTTLDLSNGFWAHSITPESYWLTAFTWLGQQYCWTRLPQGFLNSPALFTADVVDLLKEVPNVQVYVDDIYISHDDPREHLEQLEKVFSLLLNAGYVVSLKKSEIAQHEVEFLGFNITKEGRGLTETFKQKLLNITPPRDLKQLQSILGLLNFARNFIPNFSELVKPLYNIIATANGKYITWTTDNSQQLQNIISMLNSAENLEERNPEVRLIMKVNTSPSAGYIRFYNEFAKRPIMYLNYVYTKAEVKFTNTEKLLTTIHKGLIKALDLGMGQEILVYSPIVSMTKIQKTPLPERKALPIRWITWMSYLEDPRIQFHYDKTLPELQQVPTVTDDIIAKIKHPSEFSMVFYTDGSAIKHPNVNKSHNAGMGIAQVQFKPEFTVINTWSIPLGDHTAQLAEVAAVEFACKKALKIDGPVLIVTDSFYVAESVNKELPYWQSNGFFNNKKKPLKHVSKWKSIADCIQLKPDIIIIHEKGHQPTASTFHTEGNNLADKLATQGSYVVNAGKRTADGSEFEKRTADGSEFESPKKKAKVE

SEQ ID NO: 510 - protein, 2176 aa, synthetic construct
MPAAKRVKLDGGDKKYSIGLDIGTNSVGWAVITDEYKVPSKKFKVLGNTDRHSIKKNLIGALLFDSGETAEATRLKRTARRRYTRRKNRICYLQEIFSNEMAKVDDSFFHRLEESFLVEEDKKHERHPIFGNIVDEVAYHEKYPTIYHLRKKLVDSTDKADLRLIYLALAHMIKFRGHFLIEGDLNPDNSDVDKLFIQLVQTYNQLFEENPINASGVDAKAILSARLSKSRRLENLIAQLPGEKKNGLFGNLIALSLGLTPNFKSNFDLAEDAKLQLSKDTYDDDLDNLLAQIGDQYADLFLAAKNLSDAILLSDILRVNTEITKAPLSASMIKRYDEHHQDLTLLKALVRQQLPEKYKEIFFDQSKNGYAGYIDGGASQEEFYKFIKPILEKMDGTEELLVKLNREDLLRKQRTFDNGSIPHQIHLGELHAILRRQEDFYPFLKDNREKIEKILTFRIPYYVGPLARGNSRFAWMTRKSEETITPWNFEEVVDKGASAQSFIERMTNFDKNLPNEKVLPKHSLLYEYFTVYNELTKVKYVTEGMRKPAFLSGEQKKAIVDLLFKTNRKVTVKQLKEDYFKKIECFDSVEISGVEDRFNASLGTYHDLLKIIKDKDFLDNEENEDILEDIVLTLTLFEDREMIEERLKTYAHLFDDKVMKQLKRRRYTGWGRLSRKLINGIRDKQSGKTILDFLKSDGFANRNFMQLIHDDSLTFKEDIQKAQVSGQGDSLHEHIANLAGSPAIKKGILQTVKVVDELVKVMGRHKPENIVIEMARENQTTQKGQKNSRERMKRIEEGIKELGSQILKEHPVENTQLQNEKLYLYYLQNGRDMYVDQELDINRLSDYDVDHIVPQSFLKDDSIDNKVLTRSDKARGKSDNVPSEEVVKKMKNYWRQLLNAKLITQRKFDNLTKAERGGLSELDKAGFIKRQLVETRQITKHVAQILDSRMNTKYDENDKLIREVKVITLKSKLVSDFRKDFQFYKVREINNYHHAHDAYLNAVVGTALIKKYPKLESEFVYGDYKVYDVRKMIAKSEQEIGKATAKYFFYSNIMNFFKTEITLANGEIRKRPLIETNGETGEIVWDKGRDFATVRKVLSMPQVNIVKKTEVQTGGFSKESILPKRNSDKLIARKKDWDPKKYGGFDSPTVAYSVLVVAKVEKGKSKKLKSVKELLGITIMERSSFEKNPIDFLEAKGYKEVKKDLIIKLPKYSLFELENGRKRMLASAGELQKGNELALPSKYVNFLYLASHYEKLKGSPEDNEQKQLFVEQHKHYLDEIIEQISEFSKRVILADANLDKVLSAYNKHRDKPIREQAENIIHLFTLTNLGAPAAFKYFDTTIDRKRYTSTKEVLDATLIHQSITGLYETRIDLSQLGGDGGPAPEAAAKGGGGGMDPLQLLQPLEAEIKGTKLKAHWNSGATITCVPQAFLEEEVPIKNIWIKTIHGEKEQPVYYLTFKIQGRKVEAEVISSPYDYILVSPSDIPWLMKKPLQLTTLVPLQEYEERLLKQTMLTGSYKEKLQSLFLKYDALWQHWENQVGHRRIKPHHIATGTVNPRPQKQYPINPKAKASIQTVINDLLKQGVLIQQNSIMNTPVYPVPKPDGKWRMVLDYREVNKTIPLIAAQNQHSAGILSSIFRGKYKTTLDLSNGFWAHSITPESYWLTAFTWLGQQYCWTRLPQGFLNSPALFTADVVDLLKEVPNVQVYVDDIYISHDDPREHLEQLEKVFSLLLNAGYVVSLKKSEIAQHEVEFLGFNITKEGRGLTETFKQKLLNITPPRDLKQLQSILGLLNFARNFIPNFSELVKPLYNIIATANGKYITWTTDNSQQLQNIISMLNSAENLEERNPEVRLIMKVNTSPSAGYIRFYNEFAKRPIMYLNYVYTKAEVKFTNTEKLLTTIHKGLIKALDLGMGQEILVYSPIVSMTKIQKTPLPERKALPIRWITWMSYLEDPRIQFHYDKTLPELQQVPTVTDDIIAKIKHPSEFSMVFYTDGSAIKHPNVNKSHNAGMGIAQVQFKPEFTVINTWSIPLGDHTAQLAEVAAVEFACKKALKIDGPVLIVTDSFYVAESVNKELPYWQSNGFFNNKKKPLKHVSKWKSIADCIQLKPDIIIIHEKGHQPTASTFHTEGNNLADKLATQGSYVVNAGKRTADGSEFEKRTADGSEFESPKKKAKVE

SEQ ID NO: 511 - protein, 2176 aa, synthetic construct
MPAAKRVKLDGGDKKYSIGLDIGTNSVGWAVITDEYKVPSKKFKVLGNTDRHSIKKNLIGALLFDSGETAEATRLKRTARRRYTRRKNRICYLQEIFSNEMAKVDDSFFHRLEESFLVEEDKKHERHPIFGNIVDEVAYHEKYPTIYHLRKKLVDSTDKADLRLIYLALAHMIKFRGHFLIEGDLNPDNSDVDKLFIQLVQTYNQLFEENPINASGVDAKAILSARLSKSRRLENLIAQLPGEKKNGLFGNLIALSLGLTPNFKSNFDLAEDAKLQLSKDTYDDDLDNLLAQIGDQYADLFLAAKNLSDAILLSDILRVNTEITKAPLSASMIKRYDEHHQDLTLLKALVRQQLPEKYKEIFFDQSKNGYAGYIDGGASQEEFYKFIKPILEKMDGTEELLVKLNREDLLRKQRTFDNGSIPHQIHLGELHAILRRQEDFYPFLKDNREKIEKILTFRIPYYVGPLARGNSRFAWMTRKSEETITPWNFEEVVDKGASAQSFIERMTNFDKNLPNEKVLPKHSLLYEYFTVYNELTKVKYVTEGMRKPAFLSGEQKKAIVDLLFKTNRKVTVKQLKEDYFKKIECFDSVEISGVEDRFNASLGTYHDLLKIIKDKDFLDNEENEDILEDIVLTLTLFEDREMIEERLKTYAHLFDDKVMKQLKRRRYTGWGRLSRKLINGIRDKQSGKTILDFLKSDGFANRNFMQLIHDDSLTFKEDIQKAQVSGQGDSLHEHIANLAGSPAIKKGILQTVKVVDELVKVMGRHKPENIVIEMARENQTTQKGQKNSRERMKRIEEGIKELGSQILKEHPVENTQLQNEKLYLYYLQNGRDMYVDQELDINRLSDYDVDHIVPQSFLKDDSIDNKVLTRSDKARGKSDNVPSEEVVKKMKNYWRQLLNAKLITQRKFDNLTKAERGGLSELDKAGFIKRQLVETRQITKHVAQILDSRMNTKYDENDKLIREVKVITLKSKLVSDFRKDFQFYKVREINNYHHAHDAYLNAVVGTALIKKYPKLESEFVYGDYKVYDVRKMIAKSEQEIGKATAKYFFYSNIMNFFKTEITLANGEIRKRPLIETNGETGEIVWDKGRDFATVRKVLSMPQVNIVKKTEVQTGGFSKESILPKRNSDKLIARKKDWDPKKYGGFDSPTVAYSVLVVAKVEKGKSKKLKSVKELLGITIMERSSFEKNPIDFLEAKGYKEVKKDLIIKLPKYSLFELENGRKRMLASAGELQKGNELALPSKYVNFLYLASHYEKLKGSPEDNEQKQLFVEQHKHYLDEIIEQISEFSKRVILADANLDKVLSAYNKHRDKPIREQAENIIHLFTLTNLGAPAAFKYFDTTIDRKRYTSTKEVLDATLIHQSITGLYETRIDLSQLGGDGGEAAAKGGGGSSGGMDPLQLLQPLEAEIKGTKLKAHWNSGATITCVPQAFLEEEVPIKNIWIKTIHGEKEQPVYYLTFKIQGRKVEAEVISSPYDYILVSPSDIPWLMKKPLQLTTLVPLQEYEERLLKQTMLTGSYKEKLQSLFLKYDALWQHWENQVGHRRIKPHHIATGTVNPRPQKQYPINPKAKASIQTVINDLLKQGVLIQQNSIMNTPVYPVPKPDGKWRMVLDYREVNKTIPLIAAQNQHSAGILSSIFRGKYKTTLDLSNGFWAHSITPESYWLTAFTWLGQQYCWTRLPQGFLNSPALFTADVVDLLKEVPNVQVYVDDIYISHDDPREHLEQLEKVFSLLLNAGYVVSLKKSEIAQHEVEFLGFNITKEGRGLTETFKQKLLNITPPRDLKQLQSILGLLNFARNFIPNFSELVKPLYNIIATANGKYITWTTDNSQQLQNIISMLNSAENLEERNPEVRLIMKVNTSPSAGYIRFYNEFAKRPIMYLNYVYTKAEVKFTNTEKLLTTIHKGLIKALDLGMGQEILVYSPIVSMTKIQKTPLPERKALPIRWITWMSYLEDPRIQFHYDKTLPELQQVPTVTDDIIAKIKHPSEFSMVFYTDGSAIKHPNVNKSHNAGMGIAQVQFKPEFTVINTWSIPLGDHTAQLAEVAAVEFACKKALKIDGPVLIVTDSFYVAESVNKELPYWQSNGFFNNKKKPLKHVSKWKSIADCIQLKPDIIIIHEKGHQPTASTFHTEGNNLADKLATQGSYVVNAGKRTADGSEFEKRTADGSEFESPKKKAKVE

SEQ ID NO: 512 - protein, 2171 aa, synthetic construct
MPAAKRVKLDGGDKKYSIGLDIGTNSVGWAVITDEYKVPSKKFKVLGNTDRHSIKKNLIGALLFDSGETAEATRLKRTARRRYTRRKNRICYLQEIFSNEMAKVDDSFFHRLEESFLVEEDKKHERHPIFGNIVDEVAYHEKYPTIYHLRKKLVDSTDKADLRLIYLALAHMIKFRGHFLIEGDLNPDNSDVDKLFIQLVQTYNQLFEENPINASGVDAKAILSARLSKSRRLENLIAQLPGEKKNGLFGNLIALSLGLTPNFKSNFDLAEDAKLQLSKDTYDDDLDNLLAQIGDQYADLFLAAKNLSDAILLSDILRVNTEITKAPLSASMIKRYDEHHQDLTLLKALVRQQLPEKYKEIFFDQSKNGYAGYIDGGASQEEFYKFIKPILEKMDGTEELLVKLNREDLLRKQRTFDNGSIPHQIHLGELHAILRRQEDFYPFLKDNREKIEKILTFRIPYYVGPLARGNSRFAWMTRKSEETITPWNFEEVVDKGASAQSFIERMTNFDKNLPNEKVLPKHSLLYEYFTVYNELTKVKYVTEGMRKPAFLSGEQKKAIVDLLFKTNRKVTVKQLKEDYFKKIECFDSVEISGVEDRFNASLGTYHDLLKIIKDKDFLDNEENEDILEDIVLTLTLFEDREMIEERLKTYAHLFDDKVMKQLKRRRYTGWGRLSRKLINGIRDKQSGKTILDFLKSDGFANRNFMQLIHDDSLTFKEDIQKAQVSGQGDSLHEHIANLAGSPAIKKGILQTVKVVDELVKVMGRHKPENIVIEMARENQTTQKGQKNSRERMKRIEEGIKELGSQILKEHPVENTQLQNEKLYLYYLQNGRDMYVDQELDINRLSDYDVDHIVPQSFLKDDSIDNKVLTRSDKARGKSDNVPSEEVVKKMKNYWRQLLNAKLITQRKFDNLTKAERGGLSELDKAGFIKRQLVETRQITKHVAQILDSRMNTKYDENDKLIREVKVITLKSKLVSDFRKDFQFYKVREINNYHHAHDAYLNAVVGTALIKKYPKLESEFVYGDYKVYDVRKMIAKSEQEIGKATAKYFFYSNIMNFFKTEITLANGEIRKRPLIETNGETGEIVWDKGRDFATVRKVLSMPQVNIVKKTEVQTGGFSKESILPKRNSDKLIARKKDWDPKKYGGFDSPTVAYSVLVVAKVEKGKSKKLKSVKELLGITIMERSSFEKNPIDFLEAKGYKEVKKDLIIKLPKYSLFELENGRKRMLASAGELQKGNELALPSKYVNFLYLASHYEKLKGSPEDNEQKQLFVEQHKHYLDEIIEQISEFSKRVILADANLDKVLSAYNKHRDKPIREQAENIIHLFTLTNLGAPAAFKYFDTTIDRKRYTSTKEVLDATLIHQSITGLYETRIDLSQLGGDGGGGGPAPGGMDPLQLLQPLEAEIKGTKLKAHWNSGATITCVPQAFLEEEVPIKNIWIKTIHGEKEQPVYYLTFKIQGRKVEAEVISSPYDYILVSPSDIPWLMKKPLQLTTLVPLQEYEERLLKQTMLTGSYKEKLQSLFLKYDALWQHWENQVGHRRIKPHHIATGTVNPRPQKQYPINPKAKASIQTVINDLLKQGVLIQQNSIMNTPVYPVPKPDGKWRMVLDYREVNKTIPLIAAQNQHSAGILSSIFRGKYKTTLDLSNGFWAHSITPESYWLTAFTWLGQQYCWTRLPQGFLNSPALFTADVVDLLKEVPNVQVYVDDIYISHDDPREHLEQLEKVFSLLLNAGYVVSLKKSEIAQHEVEFLGFNITKEGRGLTETFKQKLLNITPPRDLKQLQSILGLLNFARNFIPNFSELVKPLYNIIATANGKYITWTTDNSQQLQNIISMLNSAENLEERNPEVRLIMKVNTSPSAGYIRFYNEFAKRPIMYLNYVYTKAEVKFTNTEKLLTTIHKGLIKALDLGMGQEILVYSPIVSMTKIQKTPLPERKALPIRWITWMSYLEDPRIQFHYDKTLPELQQVPTVTDDIIAKIKHPSEFSMVFYTDGSAIKHPNVNKSHNAGMGIAQVQFKPEFTVINTWSIPLGDHTAQLAEVAAVEFACKKALKIDGPVLIVTDSFYVAESVNKELPYWQSNGFFNNKKKPLKHVSKWKSIADCIQLKPDIIIIHEKGHQPTASTFHTEGNNLADKLATQGSYVVNAGKRTADGSEFEKRTADGSEFESPKKKAKVE

SEQ ID NO: 513 - protein, 2176 aa, synthetic construct
MPAAKRVKLDGGDKKYSIGLDIGTNSVGWAVITDEYKVPSKKFKVLGNTDRHSIKKNLIGALLFDSGETAEATRLKRTARRRYTRRKNRICYLQEIFSNEMAKVDDSFFHRLEESFLVEEDKKHERHPIFGNIVDEVAYHEKYPTIYHLRKKLVDSTDKADLRLIYLALAHMIKFRGHFLIEGDLNPDNSDVDKLFIQLVQTYNQLFEENPINASGVDAKAILSARLSKSRRLENLIAQLPGEKKNGLFGNLIALSLGLTPNFKSNFDLAEDAKLQLSKDTYDDDLDNLLAQIGDQYADLFLAAKNLSDAILLSDILRVNTEITKAPLSASMIKRYDEHHQDLTLLKALVRQQLPEKYKEIFFDQSKNGYAGYIDGGASQEEFYKFIKPILEKMDGTEELLVKLNREDLLRKQRTFDNGSIPHQIHLGELHAILRRQEDFYPFLKDNREKIEKILTFRIPYYVGPLARGNSRFAWMTRKSEETITPWNFEEVVDKGASAQSFIERMTNFDKNLPNEKVLPKHSLLYEYFTVYNELTKVKYVTEGMRKPAFLSGEQKKAIVDLLFKTNRKVTVKQLKEDYFKKIECFDSVEISGVEDRFNASLGTYHDLLKIIKDKDFLDNEENEDILEDIVLTLTLFEDREMIEERLKTYAHLFDDKVMKQLKRRRYTGWGRLSRKLINGIRDKQSGKTILDFLKSDGFANRNFMQLIHDDSLTFKEDIQKAQVSGQGDSLHEHIANLAGSPAIKKGILQTVKVVDELVKVMGRHKPENIVIEMARENQTTQKGQKNSRERMKRIEEGIKELGSQILKEHPVENTQLQNEKLYLYYLQNGRDMYVDQELDINRLSDYDVDHIVPQSFLKDDSIDNKVLTRSDKARGKSDNVPSEEVVKKMKNYWRQLLNAKLITQRKFDNLTKAERGGLSELDKAGFIKRQLVETRQITKHVAQILDSRMNTKYDENDKLIREVKVITLKSKLVSDFRKDFQFYKVREINNYHHAHDAYLNAVVGTALIKKYPKLESEFVYGDYKVYDVRKMIAKSEQEIGKATAKYFFYSNIMNFFKTEITLANGEIRKRPLIETNGETGEIVWDKGRDFATVRKVLSMPQVNIVKKTEVQTGGFSKESILPKRNSDKLIARKKDWDPKKYGGFDSPTVAYSVLVVAKVEKGKSKKLKSVKELLGITIMERSSFEKNPIDFLEAKGYKEVKKDLIIKLPKYSLFELENGRKRMLASAGELQKGNELALPSKYVNFLYLASHYEKLKGSPEDNEQKQLFVEQHKHYLDEIIEQISEFSKRVILADANLDKVLSAYNKHRDKPIREQAENIIHLFTLTNLGAPAAFKYFDTTIDRKRYTSTKEVLDATLIHQSITGLYETRIDLSQLGGDGGEAAAKGGSGGGGGMDPLQLLQPLEAEIKGTKLKAHWNSGATITCVPQAFLEEEVPIKNIWIKTIHGEKEQPVYYLTFKIQGRKVEAEVISSPYDYILVSPSDIPWLMKKPLQLTTLVPLQEYEERLLKQTMLTGSYKEKLQSLFLKYDALWQHWENQVGHRRIKPHHIATGTVNPRPQKQYPINPKAKASIQTVINDLLKQGVLIQQNSIMNTPVYPVPKPDGKWRMVLDYREVNKTIPLIAAQNQHSAGILSSIFRGKYKTTLDLSNGFWAHSITPESYWLTAFTWLGQQYCWTRLPQGFLNSPALFTADVVDLLKEVPNVQVYVDDIYISHDDPREHLEQLEKVFSLLLNAGYVVSLKKSEIAQHEVEFLGFNITKEGRGLTETFKQKLLNITPPRDLKQLQSILGLLNFARNFIPNFSELVKPLYNIIATANGKYITWTTDNSQQLQNIISMLNSAENLEERNPEVRLIMKVNTSPSAGYIRFYNEFAKRPIMYLNYVYTKAEVKFTNTEKLLTTIHKGLIKALDLGMGQEILVYSPIVSMTKIQKTPLPERKALPIRWITWMSYLEDPRIQFHYDKTLPELQQVPTVTDDIIAKIKHPSEFSMVFYTDGSAIKHPNVNKSHNAGMGIAQVQFKPEFTVINTWSIPLGDHTAQLAEVAAVEFACKKALKIDGPVLIVTDSFYVAESVNKELPYWQSNGFFNNKKKPLKHVSKWKSIADCIQLKPDIIIIHEKGHQPTASTFHTEGNNLADKLATQGSYVVNAGKRTADGSEFEKRTADGSEFESPKKKAKVE

SEQ ID NO: 514 - protein, 2174 aa, synthetic construct
MPAAKRVKLDGGDKKYSIGLDIGTNSVGWAVITDEYKVPSKKFKVLGNTDRHSIKKNLIGALLFDSGETAEATRLKRTARRRYTRRKNRICYLQEIFSNEMAKVDDSFFHRLEESFLVEEDKKHERHPIFGNIVDEVAYHEKYPTIYHLRKKLVDSTDKADLRLIYLALAHMIKFRGHFLIEGDLNPDNSDVDKLFIQLVQTYNQLFEENPINASGVDAKAILSARLSKSRRLENLIAQLPGEKKNGLFGNLIALSLGLTPNFKSNFDLAEDAKLQLSKDTYDDDLDNLLAQIGDQYADLFLAAKNLSDAILLSDILRVNTEITKAPLSASMIKRYDEHHQDLTLLKALVRQQLPEKYKEIFFDQSKNGYAGYIDGGASQEEFYKFIKPILEKMDGTEELLVKLNREDLLRKQRTFDNGSIPHQIHLGELHAILRRQEDFYPFLKDNREKIEKILTFRIPYYVGPLARGNSRFAWMTRKSEETITPWNFEEVVDKGASAQSFIERMTNFDKNLPNEKVLPKHSLLYEYFTVYNELTKVKYVTEGMRKPAFLSGEQKKAIVDLLFKTNRKVTVKQLKEDYFKKIECFDSVEISGVEDRFNASLGTYHDLLKIIKDKDFLDNEENEDILEDIVLTLTLFEDREMIEERLKTYAHLFDDKVMKQLKRRRYTGWGRLSRKLINGIRDKQSGKTILDFLKSDGFANRNFMQLIHDDSLTFKEDIQKAQVSGQGDSLHEHIANLAGSPAIKKGILQTVKVVDELVKVMGRHKPENIVIEMARENQTTQKGQKNSRERMKRIEEGIKELGSQILKEHPVENTQLQNEKLYLYYLQNGRDMYVDQELDINRLSDYDVDHIVPQSFLKDDSIDNKVLTRSDKARGKSDNVPSEEVVKKMKNYWRQLLNAKLITQRKFDNLTKAERGGLSELDKAGFIKRQLVETRQITKHVAQILDSRMNTKYDENDKLIREVKVITLKSKLVSDFRKDFQFYKVREINNYHHAHDAYLNAVVGTALIKKYPKLESEFVYGDYKVYDVRKMIAKSEQEIGKATAKYFFYSNIMNFFKTEITLANGEIRKRPLIETNGETGEIVWDKGRDFATVRKVLSMPQVNIVKKTEVQTGGFSKESILPKRNSDKLIARKKDWDPKKYGGFDSPTVAYSVLVVAKVEKGKSKKLKSVKELLGITIMERSSFEKNPIDFLEAKGYKEVKKDLIIKLPKYSLFELENGRKRMLASAGELQKGNELALPSKYVNFLYLASHYEKLKGSPEDNEQKQLFVEQHKHYLDEIIEQISEFSKRVILADANLDKVLSAYNKHRDKPIREQAENIIHLFTLTNLGAPAAFKYFDTTIDRKRYTSTKEVLDATLIHQSITGLYETRIDLSQLGGDGGGGGPAPGGSGGMDPLQLLQPLEAEIKGTKLKAHWNSGATITCVPQAFLEEEVPIKNIWIKTIHGEKEQPVYYLTFKIQGRKVEAEVISSPYDYILVSPSDIPWLMKKPLQLTTLVPLQEYEERLLKQTMLTGSYKEKLQSLFLKYDALWQHWENQVGHRRIKPHHIATGTVNPRPQKQYPINPKAKASIQTVINDLLKQGVLIQQNSIMNTPVYPVPKPDGKWRMVLDYREVNKTIPLIAAQNQHSAGILSSIFRGKYKTTLDLSNGFWAHSITPESYWLTAFTWLGQQYCWTRLPQGFLNSPALFTADVVDLLKEVPNVQVYVDDIYISHDDPREHLEQLEKVFSLLLNAGYVVSLKKSEIAQHEVEFLGFNITKEGRGLTETFKQKLLNITPPRDLKQLQSILGLLNFARNFIPNFSELVKPLYNIIATANGKYITWTTDNSQQLQNIISMLNSAENLEERNPEVRLIMKVNTSPSAGYIRFYNEFAKRPIMYLNYVYTKAEVKFTNTEKLLTTIHKGLIKALDLGMGQEILVYSPIVSMTKIQKTPLPERKALPIRWITWMSYLEDPRIQFHYDKTLPELQQVPTVTDDIIAKIKHPSEFSMVFYTDGSAIKHPNVNKSHNAGMGIAQVQFKPEFTVINTWSIPLGDHTAQLAEVAAVEFACKKALKIDGPVLIVTDSFYVAESVNKELPYWQSNGFFNNKKKPLKHVSKWKSIADCIQLKPDIIIIHEKGHQPTASTFHTEGNNLADKLATQGSYVVNAGKRTADGSEFEKRTADGSEFESPKKKAKVE

SEQ ID NO: 515 - protein, 2174 aa, synthetic construct
MPAAKRVKLDGGDKKYSIGLDIGTNSVGWAVITDEYKVPSKKFKVLGNTDRHSIKKNLIGALLFDSGETAEATRLKRTARRRYTRRKNRICYLQEIFSNEMAKVDDSFFHRLEESFLVEEDKKHERHPIFGNIVDEVAYHEKYPTIYHLRKKLVDSTDKADLRLIYLALAHMIKFRGHFLIEGDLNPDNSDVDKLFIQLVQTYNQLFEENPINASGVDAKAILSARLSKSRRLENLIAQLPGEKKNGLFGNLIALSLGLTPNFKSNFDLAEDAKLQLSKDTYDDDLDNLLAQIGDQYADLFLAAKNLSDAILLSDILRVNTEITKAPLSASMIKRYDEHHQDLTLLKALVRQQLPEKYKEIFFDQSKNGYAGYIDGGASQEEFYKFIKPILEKMDGTEELLVKLNREDLLRKQRTFDNGSIPHQIHLGELHAILRRQEDFYPFLKDNREKIEKILTFRIPYYVGPLARGNSRFAWMTRKSEETITPWNFEEVVDKGASAQSFIERMTNFDKNLPNEKVLPKHSLLYEYFTVYNELTKVKYVTEGMRKPAFLSGEQKKAIVDLLFKTNRKVTVKQLKEDYFKKIECFDSVEISGVEDRFNASLGTYHDLLKIIKDKDFLDNEENEDILEDIVLTLTLFEDREMIEERLKTYAHLFDDKVMKQLKRRRYTGWGRLSRKLINGIRDKQSGKTILDFLKSDGFANRNFMQLIHDDSLTFKEDIQKAQVSGQGDSLHEHIANLAGSPAIKKGILQTVKVVDELVKVMGRHKPENIVIEMARENQTTQKGQKNSRERMKRIEEGIKELGSQILKEHPVENTQLQNEKLYLYYLQNGRDMYVDQELDINRLSDYDVDHIVPQSFLKDDSIDNKVLTRSDKARGKSDNVPSEEVVKKMKNYWRQLLNAKLITQRKFDNLTKAERGGLSELDKAGFIKRQLVETRQITKHVAQILDSRMNTKYDENDKLIREVKVITLKSKLVSDFRKDFQFYKVREINNYHHAHDAYLNAVVGTALIKKYPKLESEFVYGDYKVYDVRKMIAKSEQEIGKATAKYFFYSNIMNFFKTEITLANGEIRKRPLIETNGETGEIVWDKGRDFATVRKVLSMPQVNIVKKTEVQTGGFSKESILPKRNSDKLIARKKDWDPKKYGGFDSPTVAYSVLVVAKVEKGKSKKLKSVKELLGITIMERSSFEKNPIDFLEAKGYKEVKKDLIIKLPKYSLFELENGRKRMLASAGELQKGNELALPSKYVNFLYLASHYEKLKGSPEDNEQKQLFVEQHKHYLDEIIEQISEFSKRVILADANLDKVLSAYNKHRDKPIREQAENIIHLFTLTNLGAPAAFKYFDTTIDRKRYTSTKEVLDATLIHQSITGLYETRIDLSQLGGDGGGSSGSSGSSGGMDPLQLLQPLEAEIKGTKLKAHWNSGATITCVPQAFLEEEVPIKNIWIKTIHGEKEQPVYYLTFKIQGRKVEAEVISSPYDYILVSPSDIPWLMKKPLQLTTLVPLQEYEERLLKQTMLTGSYKEKLQSLFLKYDALWQHWENQVGHRRIKPHHIATGTVNPRPQKQYPINPKAKASIQTVINDLLKQGVLIQQNSIMNTPVYPVPKPDGKWRMVLDYREVNKTIPLIAAQNQHSAGILSSIFRGKYKTTLDLSNGFWAHSITPESYWLTAFTWLGQQYCWTRLPQGFLNSPALFTADVVDLLKEVPNVQVYVDDIYISHDDPREHLEQLEKVFSLLLNAGYVVSLKKSEIAQHEVEFLGFNITKEGRGLTETFKQKLLNITPPRDLKQLQSILGLLNFARNFIPNFSELVKPLYNIIATANGKYITWTTDNSQQLQNIISMLNSAENLEERNPEVRLIMKVNTSPSAGYIRFYNEFAKRPIMYLNYVYTKAEVKFTNTEKLLTTIHKGLIKALDLGMGQEILVYSPIVSMTKIQKTPLPERKALPIRWITWMSYLEDPRIQFHYDKTLPELQQVPTVTDDIIAKIKHPSEFSMVFYTDGSAIKHPNVNKSHNAGMGIAQVQFKPEFTVINTWSIPLGDHTAQLAEVAAVEFACKKALKIDGPVLIVTDSFYVAESVNKELPYWQSNGFFNNKKKPLKHVSKWKSIADCIQLKPDIIIIHEKGHQPTASTFHTEGNNLADKLATQGSYVVNAGKRTADGSEFEKRTADGSEFESPKKKAKVE

SEQ ID NO: 516 - protein, 2171 aa, synthetic construct
MPAAKRVKLDGGDKKYSIGLDIGTNSVGWAVITDEYKVPSKKFKVLGNTDRHSIKKNLIGALLFDSGETAEATRLKRTARRRYTRRKNRICYLQEIFSNEMAKVDDSFFHRLEESFLVEEDKKHERHPIFGNIVDEVAYHEKYPTIYHLRKKLVDSTDKADLRLIYLALAHMIKFRGHFLIEGDLNPDNSDVDKLFIQLVQTYNQLFEENPINASGVDAKAILSARLSKSRRLENLIAQLPGEKKNGLFGNLIALSLGLTPNFKSNFDLAEDAKLQLSKDTYDDDLDNLLAQIGDQYADLFLAAKNLSDAILLSDILRVNTEITKAPLSASMIKRYDEHHQDLTLLKALVRQQLPEKYKEIFFDQSKNGYAGYIDGGASQEEFYKFIKPILEKMDGTEELLVKLNREDLLRKQRTFDNGSIPHQIHLGELHAILRRQEDFYPFLKDNREKIEKILTFRIPYYVGPLARGNSRFAWMTRKSEETITPWNFEEVVDKGASAQSFIERMTNFDKNLPNEKVLPKHSLLYEYFTVYNELTKVKYVTEGMRKPAFLSGEQKKAIVDLLFKTNRKVTVKQLKEDYFKKIECFDSVEISGVEDRFNASLGTYHDLLKIIKDKDFLDNEENEDILEDIVLTLTLFEDREMIEERLKTYAHLFDDKVMKQLKRRRYTGWGRLSRKLINGIRDKQSGKTILDFLKSDGFANRNFMQLIHDDSLTFKEDIQKAQVSGQGDSLHEHIANLAGSPAIKKGILQTVKVVDELVKVMGRHKPENIVIEMARENQTTQKGQKNSRERMKRIEEGIKELGSQILKEHPVENTQLQNEKLYLYYLQNGRDMYVDQELDINRLSDYDVDHIVPQSFLKDDSIDNKVLTRSDKARGKSDNVPSEEVVKKMKNYWRQLLNAKLITQRKFDNLTKAERGGLSELDKAGFIKRQLVETRQITKHVAQILDSRMNTKYDENDKLIREVKVITLKSKLVSDFRKDFQFYKVREINNYHHAHDAYLNAVVGTALIKKYPKLESEFVYGDYKVYDVRKMIAKSEQEIGKATAKYFFYSNIMNFFKTEITLANGEIRKRPLIETNGETGEIVWDKGRDFATVRKVLSMPQVNIVKKTEVQTGGFSKESILPKRNSDKLIARKKDWDPKKYGGFDSPTVAYSVLVVAKVEKGKSKKLKSVKELLGITIMERSSFEKNPIDFLEAKGYKEVKKDLIIKLPKYSLFELENGRKRMLASAGELQKGNELALPSKYVNFLYLASHYEKLKGSPEDNEQKQLFVEQHKHYLDEIIEQISEFSKRVILADANLDKVLSAYNKHRDKPIREQAENIIHLFTLTNLGAPAAFKYFDTTIDRKRYTSTKEVLDATLIHQSITGLYETRIDLSQLGGDGGPAPGGGGGMDPLQLLQPLEAEIKGTKLKAHWNSGATITCVPQAFLEEEVPIKNIWIKTIHGEKEQPVYYLTFKIQGRKVEAEVISSPYDYILVSPSDIPWLMKKPLQLTTLVPLQEYEERLLKQTMLTGSYKEKLQSLFLKYDALWQHWENQVGHRRIKPHHIATGTVNPRPQKQYPINPKAKASIQTVINDLLKQGVLIQQNSIMNTPVYPVPKPDGKWRMVLDYREVNKTIPLIAAQNQHSAGILSSIFRGKYKTTLDLSNGFWAHSITPESYWLTAFTWLGQQYCWTRLPQGFLNSPALFTADVVDLLKEVPNVQVYVDDIYISHDDPREHLEQLEKVFSLLLNAGYVVSLKKSEIAQHEVEFLGFNITKEGRGLTETFKQKLLNITPPRDLKQLQSILGLLNFARNFIPNFSELVKPLYNIIATANGKYITWTTDNSQQLQNIISMLNSAENLEERNPEVRLIMKVNTSPSAGYIRFYNEFAKRPIMYLNYVYTKAEVKFTNTEKLLTTIHKGLIKALDLGMGQEILVYSPIVSMTKIQKTPLPERKALPIRWITWMSYLEDPRIQFHYDKTLPELQQVPTVTDDIIAKIKHPSEFSMVFYTDGSAIKHPNVNKSHNAGMGIAQVQFKPEFTVINTWSIPLGDHTAQLAEVAAVEFACKKALKIDGPVLIVTDSFYVAESVNKELPYWQSNGFFNNKKKPLKHVSKWKSIADCIQLKPDIIIIHEKGHQPTASTFHTEGNNLADKLATQGSYVVNAGKRTADGSEFEKRTADGSEFESPKKKAKVE

SEQ ID NO: 517 - protein, 2176 aa, synthetic construct
MPAAKRVKLDGGDKKYSIGLDIGTNSVGWAVITDEYKVPSKKFKVLGNTDRHSIKKNLIGALLFDSGETAEATRLKRTARRRYTRRKNRICYLQEIFSNEMAKVDDSFFHRLEESFLVEEDKKHERHPIFGNIVDEVAYHEKYPTIYHLRKKLVDSTDKADLRLIYLALAHMIKFRGHFLIEGDLNPDNSDVDKLFIQLVQTYNQLFEENPINASGVDAKAILSARLSKSRRLENLIAQLPGEKKNGLFGNLIALSLGLTPNFKSNFDLAEDAKLQLSKDTYDDDLDNLLAQIGDQYADLFLAAKNLSDAILLSDILRVNTEITKAPLSASMIKRYDEHHQDLTLLKALVRQQLPEKYKEIFFDQSKNGYAGYIDGGASQEEFYKFIKPILEKMDGTEELLVKLNREDLLRKQRTFDNGSIPHQIHLGELHAILRRQEDFYPFLKDNREKIEKILTFRIPYYVGPLARGNSRFAWMTRKSEETITPWNFEEVVDKGASAQSFIERMTNFDKNLPNEKVLPKHSLLYEYFTVYNELTKVKYVTEGMRKPAFLSGEQKKAIVDLLFKTNRKVTVKQLKEDYFKKIECFDSVEISGVEDRFNASLGTYHDLLKIIKDKDFLDNEENEDILEDIVLTLTLFEDREMIEERLKTYAHLFDDKVMKQLKRRRYTGWGRLSRKLINGIRDKQSGKTILDFLKSDGFANRNFMQLIHDDSLTFKEDIQKAQVSGQGDSLHEHIANLAGSPAIKKGILQTVKVVDELVKVMGRHKPENIVIEMARENQTTQKGQKNSRERMKRIEEGIKELGSQILKEHPVENTQLQNEKLYLYYLQNGRDMYVDQELDINRLSDYDVDHIVPQSFLKDDSIDNKVLTRSDKARGKSDNVPSEEVVKKMKNYWRQLLNAKLITQRKFDNLTKAERGGLSELDKAGFIKRQLVETRQITKHVAQILDSRMNTKYDENDKLIREVKVITLKSKLVSDFRKDFQFYKVREINNYHHAHDAYLNAVVGTALIKKYPKLESEFVYGDYKVYDVRKMIAKSEQEIGKATAKYFFYSNIMNFFKTEITLANGEIRKRPLIETNGETGEIVWDKGRDFATVRKVLSMPQVNIVKKTEVQTGGFSKESILPKRNSDKLIARKKDWDPKKYGGFDSPTVAYSVLVVAKVEKGKSKKLKSVKELLGITIMERSSFEKNPIDFLEAKGYKEVKKDLIIKLPKYSLFELENGRKRMLASAGELQKGNELALPSKYVNFLYLASHYEKLKGSPEDNEQKQLFVEQHKHYLDEIIEQISEFSKRVILADANLDKVLSAYNKHRDKPIREQAENIIHLFTLTNLGAPAAFKYFDTTIDRKRYTSTKEVLDATLIHQSITGLYETRIDLSQLGGDGGEAAAKGSSGGSGGMDPLQLLQPLEAEIKGTKLKAHWNSGATITCVPQAFLEEEVPIKNIWIKTIHGEKEQPVYYLTFKIQGRKVEAEVISSPYDYILVSPSDIPWLMKKPLQLTTLVPLQEYEERLLKQTMLTGSYKEKLQSLFLKYDALWQHWENQVGHRRIKPHHIATGTVNPRPQKQYPINPKAKASIQTVINDLLKQGVLIQQNSIMNTPVYPVPKPDGKWRMVLDYREVNKTIPLIAAQNQHSAGILSSIFRGKYKTTLDLSNGFWAHSITPESYWLTAFTWLGQQYCWTRLPQGFLNSPALFTADVVDLLKEVPNVQVYVDDIYISHDDPREHLEQLEKVFSLLLNAGYVVSLKKSEIAQHEVEFLGFNITKEGRGLTETFKQKLLNITPPRDLKQLQSILGLLNFARNFIPNFSELVKPLYNIIATANGKYITWTTDNSQQLQNIISMLNSAENLEERNPEVRLIMKVNTSPSAGYIRFYNEFAKRPIMYLNYVYTKAEVKFTNTEKLLTTIHKGLIKALDLGMGQEILVYSPIVSMTKIQKTPLPERKALPIRWITWMSYLEDPRIQFHYDKTLPELQQVPTVTDDIIAKIKHPSEFSMVFYTDGSAIKHPNVNKSHNAGMGIAQVQFKPEFTVINTWSIPLGDHTAQLAEVAAVEFACKKALKIDGPVLIVTDSFYVAESVNKELPYWQSNGFFNNKKKPLKHVSKWKSIADCIQLKPDIIIIHEKGHQPTASTFHTEGNNLADKLATQGSYVVNAGKRTADGSEFEKRTADGSEFESPKKKAKVE

SEQ ID NO: 518 - protein, 2174 aa, synthetic construct
MPAAKRVKLDGGDKKYSIGLDIGTNSVGWAVITDEYKVPSKKFKVLGNTDRHSIKKNLIGALLFDSGETAEATRLKRTARRRYTRRKNRICYLQEIFSNEMAKVDDSFFHRLEESFLVEEDKKHERHPIFGNIVDEVAYHEKYPTIYHLRKKLVDSTDKADLRLIYLALAHMIKFRGHFLIEGDLNPDNSDVDKLFIQLVQTYNQLFEENPINASGVDAKAILSARLSKSRRLENLIAQLPGEKKNGLFGNLIALSLGLTPNFKSNFDLAEDAKLQLSKDTYDDDLDNLLAQIGDQYADLFLAAKNLSDAILLSDILRVNTEITKAPLSASMIKRYDEHHQDLTLLKALVRQQLPEKYKEIFFDQSKNGYAGYIDGGASQEEFYKFIKPILEKMDGTEELLVKLNREDLLRKQRTFDNGSIPHQIHLGELHAILRRQEDFYPFLKDNREKIEKILTFRIPYYVGPLARGNSRFAWMTRKSEETITPWNFEEVVDKGASAQSFIERMTNFDKNLPNEKVLPKHSLLYEYFTVYNELTKVKYVTEGMRKPAFLSGEQKKAIVDLLFKTNRKVTVKQLKEDYFKKIECFDSVEISGVEDRFNASLGTYHDLLKIIKDKDFLDNEENEDILEDIVLTLTLFEDREMIEERLKTYAHLFDDKVMKQLKRRRYTGWGRLSRKLINGIRDKQSGKTILDFLKSDGFANRNFMQLIHDDSLTFKEDIQKAQVSGQGDSLHEHIANLAGSPAIKKGILQTVKVVDELVKVMGRHKPENIVIEMARENQTTQKGQKNSRERMKRIEEGIKELGSQILKEHPVENTQLQNEKLYLYYLQNGRDMYVDQELDINRLSDYDVDHIVPQSFLKDDSIDNKVLTRSDKARGKSDNVPSEEVVKKMKNYWRQLLNAKLITQRKFDNLTKAERGGLSELDKAGFIKRQLVETRQITKHVAQILDSRMNTKYDENDKLIREVKVITLKSKLVSDFRKDFQFYKVREINNYHHAHDAYLNAVVGTALIKKYPKLESEFVYGDYKVYDVRKMIAKSEQEIGKATAKYFFYSNIMNFFKTEITLANGEIRKRPLIETNGETGEIVWDKGRDFATVRKVLSMPQVNIVKKTEVQTGGFSKESILPKRNSDKLIARKKDWDPKKYGGFDSPTVAYSVLVVAKVEKGKSKKLKSVKELLGITIMERSSFEKNPIDFLEAKGYKEVKKDLIIKLPKYSLFELENGRKRMLASAGELQKGNELALPSKYVNFLYLASHYEKLKGSPEDNEQKQLFVEQHKHYLDEIIEQISEFSKRVILADANLDKVLSAYNKHRDKPIREQAENIIHLFTLTNLGAPAAFKYFDTTIDRKRYTSTKEVLDATLIHQSITGLYETRIDLSQLGGDGGGGSPAPGSSGGMDPLQLLQPLEAEIKGTKLKAHWNSGATITCVPQAFLEEEVPIKNIWIKTIHGEKEQPVYYLTFKIQGRKVEAEVISSPYDYILVSPSDIPWLMKKPLQLTTLVPLQEYEERLLKQTMLTGSYKEKLQSLFLKYDALWQHWENQVGHRRIKPHHIATGTVNPRPQKQYPINPKAKASIQTVINDLLKQGVLIQQNSIMNTPVYPVPKPDGKWRMVLDYREVNKTIPLIAAQNQHSAGILSSIFRGKYKTTLDLSNGFWAHSITPESYWLTAFTWLGQQYCWTRLPQGFLNSPALFTADVVDLLKEVPNVQVYVDDIYISHDDPREHLEQLEKVFSLLLNAGYVVSLKKSEIAQHEVEFLGFNITKEGRGLTETFKQKLLNITPPRDLKQLQSILGLLNFARNFIPNFSELVKPLYNIIATANGKYITWTTDNSQQLQNIISMLNSAENLEERNPEVRLIMKVNTSPSAGYIRFYNEFAKRPIMYLNYVYTKAEVKFTNTEKLLTTIHKGLIKALDLGMGQEILVYSPIVSMTKIQKTPLPERKALPIRWITWMSYLEDPRIQFHYDKTLPELQQVPTVTDDIIAKIKHPSEFSMVFYTDGSAIKHPNVNKSHNAGMGIAQVQFKPEFTVINTWSIPLGDHTAQLAEVAAVEFACKKALKIDGPVLIVTDSFYVAESVNKELPYWQSNGFFNNKKKPLKHVSKWKSIADCIQLKPDIIIIHEKGHQPTASTFHTEGNNLADKLATQGSYVVNAGKRTADGSEFEKRTADGSEFESPKKKAKVE

SEQ ID NO: 519 - protein, 2175 aa, synthetic construct
MPAAKRVKLDGGDKKYSIGLDIGTNSVGWAVITDEYKVPSKKFKVLGNTDRHSIKKNLIGALLFDSGETAEATRLKRTARRRYTRRKNRICYLQEIFSNEMAKVDDSFFHRLEESFLVEEDKKHERHPIFGNIVDEVAYHEKYPTIYHLRKKLVDSTDKADLRLIYLALAHMIKFRGHFLIEGDLNPDNSDVDKLFIQLVQTYNQLFEENPINASGVDAKAILSARLSKSRRLENLIAQLPGEKKNGLFGNLIALSLGLTPNFKSNFDLAEDAKLQLSKDTYDDDLDNLLAQIGDQYADLFLAAKNLSDAILLSDILRVNTEITKAPLSASMIKRYDEHHQDLTLLKALVRQQLPEKYKEIFFDQSKNGYAGYIDGGASQEEFYKFIKPILEKMDGTEELLVKLNREDLLRKQRTFDNGSIPHQIHLGELHAILRRQEDFYPFLKDNREKIEKILTFRIPYYVGPLARGNSRFAWMTRKSEETITPWNFEEVVDKGASAQSFIERMTNFDKNLPNEKVLPKHSLLYEYFTVYNELTKVKYVTEGMRKPAFLSGEQKKAIVDLLFKTNRKVTVKQLKEDYFKKIECFDSVEISGVEDRFNASLGTYHDLLKIIKDKDFLDNEENEDILEDIVLTLTLFEDREMIEERLKTYAHLFDDKVMKQLKRRRYTGWGRLSRKLINGIRDKQSGKTILDFLKSDGFANRNFMQLIHDDSLTFKEDIQKAQVSGQGDSLHEHIANLAGSPAIKKGILQTVKVVDELVKVMGRHKPENIVIEMARENQTTQKGQKNSRERMKRIEEGIKELGSQILKEHPVENTQLQNEKLYLYYLQNGRDMYVDQELDINRLSDYDVDHIVPQSFLKDDSIDNKVLTRSDKARGKSDNVPSEEVVKKMKNYWRQLLNAKLITQRKFDNLTKAERGGLSELDKAGFIKRQLVETRQITKHVAQILDSRMNTKYDENDKLIREVKVITLKSKLVSDFRKDFQFYKVREINNYHHAHDAYLNAVVGTALIKKYPKLESEFVYGDYKVYDVRKMIAKSEQEIGKATAKYFFYSNIMNFFKTEITLANGEIRKRPLIETNGETGEIVWDKGRDFATVRKVLSMPQVNIVKKTEVQTGGFSKESILPKRNSDKLIARKKDWDPKKYGGFDSPTVAYSVLVVAKVEKGKSKKLKSVKELLGITIMERSSFEKNPIDFLEAKGYKEVKKDLIIKLPKYSLFELENGRKRMLASAGELQKGNELALPSKYVNFLYLASHYEKLKGSPEDNEQKQLFVEQHKHYLDEIIEQISEFSKRVILADANLDKVLSAYNKHRDKPIREQAENIIHLFTLTNLGAPAAFKYFDTTIDRKRYTSTKEVLDATLIHQSITGLYETRIDLSQLGGDGGGGGGSGGGGSGGMDPLQLLQPLEAEIKGTKLKAHWNSGATITCVPQAFLEEEVPIKNIWIKTIHGEKEQPVYYLTFKIQGRKVEAEVISSPYDYILVSPSDIPWLMKKPLQLTTLVPLQEYEERLLKQTMLTGSYKEKLQSLFLKYDALWQHWENQVGHRRIKPHHIATGTVNPRPQKQYPINPKAKASIQTVINDLLKQGVLIQQNSIMNTPVYPVPKPDGKWRMVLDYREVNKTIPLIAAQNQHSAGILSSIFRGKYKTTLDLSNGFWAHSITPESYWLTAFTWLGQQYCWTRLPQGFLNSPALFTADVVDLLKEVPNVQVYVDDIYISHDDPREHLEQLEKVFSLLLNAGYVVSLKKSEIAQHEVEFLGFNITKEGRGLTETFKQKLLNITPPRDLKQLQSILGLLNFARNFIPNFSELVKPLYNIIATANGKYITWTTDNSQQLQNIISMLNSAENLEERNPEVRLIMKVNTSPSAGYIRFYNEFAKRPIMYLNYVYTKAEVKFTNTEKLLTTIHKGLIKALDLGMGQEILVYSPIVSMTKIQKTPLPERKALPIRWITWMSYLEDPRIQFHYDKTLPELQQVPTVTDDIIAKIKHPSEFSMVFYTDGSAIKHPNVNKSHNAGMGIAQVQFKPEFTVINTWSIPLGDHTAQLAEVAAVEFACKKALKIDGPVLIVTDSFYVAESVNKELPYWQSNGFFNNKKKPLKHVSKWKSIADCIQLKPDIIIIHEKGHQPTASTFHTEGNNLADKLATQGSYVVNAGKRTADGSEFEKRTADGSEFESPKKKAKVE

SEQ ID NO: 520 - protein, 2172 aa, synthetic construct
MPAAKRVKLDGGDKKYSIGLDIGTNSVGWAVITDEYKVPSKKFKVLGNTDRHSIKKNLIGALLFDSGETAEATRLKRTARRRYTRRKNRICYLQEIFSNEMAKVDDSFFHRLEESFLVEEDKKHERHPIFGNIVDEVAYHEKYPTIYHLRKKLVDSTDKADLRLIYLALAHMIKFRGHFLIEGDLNPDNSDVDKLFIQLVQTYNQLFEENPINASGVDAKAILSARLSKSRRLENLIAQLPGEKKNGLFGNLIALSLGLTPNFKSNFDLAEDAKLQLSKDTYDDDLDNLLAQIGDQYADLFLAAKNLSDAILLSDILRVNTEITKAPLSASMIKRYDEHHQDLTLLKALVRQQLPEKYKEIFFDQSKNGYAGYIDGGASQEEFYKFIKPILEKMDGTEELLVKLNREDLLRKQRTFDNGSIPHQIHLGELHAILRRQEDFYPFLKDNREKIEKILTFRIPYYVGPLARGNSRFAWMTRKSEETITPWNFEEVVDKGASAQSFIERMTNFDKNLPNEKVLPKHSLLYEYFTVYNELTKVKYVTEGMRKPAFLSGEQKKAIVDLLFKTNRKVTVKQLKEDYFKKIECFDSVEISGVEDRFNASLGTYHDLLKIIKDKDFLDNEENEDILEDIVLTLTLFEDREMIEERLKTYAHLFDDKVMKQLKRRRYTGWGRLSRKLINGIRDKQSGKTILDFLKSDGFANRNFMQLIHDDSLTFKEDIQKAQVSGQGDSLHEHIANLAGSPAIKKGILQTVKVVDELVKVMGRHKPENIVIEMARENQTTQKGQKNSRERMKRIEEGIKELGSQILKEHPVENTQLQNEKLYLYYLQNGRDMYVDQELDINRLSDYDVDHIVPQSFLKDDSIDNKVLTRSDKARGKSDNVPSEEVVKKMKNYWRQLLNAKLITQRKFDNLTKAERGGLSELDKAGFIKRQLVETRQITKHVAQILDSRMNTKYDENDKLIREVKVITLKSKLVSDFRKDFQFYKVREINNYHHAHDAYLNAVVGTALIKKYPKLESEFVYGDYKVYDVRKMIAKSEQEIGKATAKYFFYSNIMNFFKTEITLANGEIRKRPLIETNGETGEIVWDKGRDFATVRKVLSMPQVNIVKKTEVQTGGFSKESILPKRNSDKLIARKKDWDPKKYGGFDSPTVAYSVLVVAKVEKGKSKKLKSVKELLGITIMERSSFEKNPIDFLEAKGYKEVKKDLIIKLPKYSLFELENGRKRMLASAGELQKGNELALPSKYVNFLYLASHYEKLKGSPEDNEQKQLFVEQHKHYLDEIIEQISEFSKRVILADANLDKVLSAYNKHRDKPIREQAENIIHLFTLTNLGAPAAFKYFDTTIDRKRYTSTKEVLDATLIHQSITGLYETRIDLSQLGGDGGPAPAPAPGGMDPLQLLQPLEAEIKGTKLKAHWNSGATITCVPQAFLEEEVPIKNIWIKTIHGEKEQPVYYLTFKIQGRKVEAEVISSPYDYILVSPSDIPWLMKKPLQLTTLVPLQEYEERLLKQTMLTGSYKEKLQSLFLKYDALWQHWENQVGHRRIKPHHIATGTVNPRPQKQYPINPKAKASIQTVINDLLKQGVLIQQNSIMNTPVYPVPKPDGKWRMVLDYREVNKTIPLIAAQNQHSAGILSSIFRGKYKTTLDLSNGFWAHSITPESYWLTAFTWLGQQYCWTRLPQGFLNSPALFTADVVDLLKEVPNVQVYVDDIYISHDDPREHLEQLEKVFSLLLNAGYVVSLKKSEIAQHEVEFLGFNITKEGRGLTETFKQKLLNITPPRDLKQLQSILGLLNFARNFIPNFSELVKPLYNIIATANGKYITWTTDNSQQLQNIISMLNSAENLEERNPEVRLIMKVNTSPSAGYIRFYNEFAKRPIMYLNYVYTKAEVKFTNTEKLLTTIHKGLIKALDLGMGQEILVYSPIVSMTKIQKTPLPERKALPIRWITWMSYLEDPRIQFHYDKTLPELQQVPTVTDDIIAKIKHPSEFSMVFYTDGSAIKHPNVNKSHNAGMGIAQVQFKPEFTVINTWSIPLGDHTAQLAEVAAVEFACKKALKIDGPVLIVTDSFYVAESVNKELPYWQSNGFFNNKKKPLKHVSKWKSIADCIQLKPDIIIIHEKGHQPTASTFHTEGNNLADKLATQGSYVVNAGKRTADGSEFEKRTADGSEFESPKKKAKVE

SEQ ID NO: 521 - protein, 2174 aa, synthetic construct
MPAAKRVKLDGGDKKYSIGLDIGTNSVGWAVITDEYKVPSKKFKVLGNTDRHSIKKNLIGALLFDSGETAEATRLKRTARRRYTRRKNRICYLQEIFSNEMAKVDDSFFHRLEESFLVEEDKKHERHPIFGNIVDEVAYHEKYPTIYHLRKKLVDSTDKADLRLIYLALAHMIKFRGHFLIEGDLNPDNSDVDKLFIQLVQTYNQLFEENPINASGVDAKAILSARLSKSRRLENLIAQLPGEKKNGLFGNLIALSLGLTPNFKSNFDLAEDAKLQLSKDTYDDDLDNLLAQIGDQYADLFLAAKNLSDAILLSDILRVNTEITKAPLSASMIKRYDEHHQDLTLLKALVRQQLPEKYKEIFFDQSKNGYAGYIDGGASQEEFYKFIKPILEKMDGTEELLVKLNREDLLRKQRTFDNGSIPHQIHLGELHAILRRQEDFYPFLKDNREKIEKILTFRIPYYVGPLARGNSRFAWMTRKSEETITPWNFEEVVDKGASAQSFIERMTNFDKNLPNEKVLPKHSLLYEYFTVYNELTKVKYVTEGMRKPAFLSGEQKKAIVDLLFKTNRKVTVKQLKEDYFKKIECFDSVEISGVEDRFNASLGTYHDLLKIIKDKDFLDNEENEDILEDIVLTLTLFEDREMIEERLKTYAHLFDDKVMKQLKRRRYTGWGRLSRKLINGIRDKQSGKTILDFLKSDGFANRNFMQLIHDDSLTFKEDIQKAQVSGQGDSLHEHIANLAGSPAIKKGILQTVKVVDELVKVMGRHKPENIVIEMARENQTTQKGQKNSRERMKRIEEGIKELGSQILKEHPVENTQLQNEKLYLYYLQNGRDMYVDQELDINRLSDYDVDHIVPQSFLKDDSIDNKVLTRSDKARGKSDNVPSEEVVKKMKNYWRQLLNAKLITQRKFDNLTKAERGGLSELDKAGFIKRQLVETRQITKHVAQILDSRMNTKYDENDKLIREVKVITLKSKLVSDFRKDFQFYKVREINNYHHAHDAYLNAVVGTALIKKYPKLESEFVYGDYKVYDVRKMIAKSEQEIGKATAKYFFYSNIMNFFKTEITLANGEIRKRPLIETNGETGEIVWDKGRDFATVRKVLSMPQVNIVKKTEVQTGGFSKESILPKRNSDKLIARKKDWDPKKYGGFDSPTVAYSVLVVAKVEKGKSKKLKSVKELLGITIMERSSFEKNPIDFLEAKGYKEVKKDLIIKLPKYSLFELENGRKRMLASAGELQKGNELALPSKYVNFLYLASHYEKLKGSPEDNEQKQLFVEQHKHYLDEIIEQISEFSKRVILADANLDKVLSAYNKHRDKPIREQAENIIHLFTLTNLGAPAAFKYFDTTIDRKRYTSTKEVLDATLIHQSITGLYETRIDLSQLGGDGGGSSGGSGGGGGMDPLQLLQPLEAEIKGTKLKAHWNSGATITCVPQAFLEEEVPIKNIWIKTIHGEKEQPVYYLTFKIQGRKVEAEVISSPYDYILVSPSDIPWLMKKPLQLTTLVPLQEYEERLLKQTMLTGSYKEKLQSLFLKYDALWQHWENQVGHRRIKPHHIATGTVNPRPQKQYPINPKAKASIQTVINDLLKQGVLIQQNSIMNTPVYPVPKPDGKWRMVLDYREVNKTIPLIAAQNQHSAGILSSIFRGKYKTTLDLSNGFWAHSITPESYWLTAFTWLGQQYCWTRLPQGFLNSPALFTADVVDLLKEVPNVQVYVDDIYISHDDPREHLEQLEKVFSLLLNAGYVVSLKKSEIAQHEVEFLGFNITKEGRGLTETFKQKLLNITPPRDLKQLQSILGLLNFARNFIPNFSELVKPLYNIIATANGKYITWTTDNSQQLQNIISMLNSAENLEERNPEVRLIMKVNTSPSAGYIRFYNEFAKRPIMYLNYVYTKAEVKFTNTEKLLTTIHKGLIKALDLGMGQEILVYSPIVSMTKIQKTPLPERKALPIRWITWMSYLEDPRIQFHYDKTLPELQQVPTVTDDIIAKIKHPSEFSMVFYTDGSAIKHPNVNKSHNAGMGIAQVQFKPEFTVINTWSIPLGDHTAQLAEVAAVEFACKKALKIDGPVLIVTDSFYVAESVNKELPYWQSNGFFNNKKKPLKHVSKWKSIADCIQLKPDIIIIHEKGHQPTASTFHTEGNNLADKLATQGSYVVNAGKRTADGSEFEKRTADGSEFESPKKKAKVE

SEQ ID NO: 522 - protein, 2010 aa, synthetic construct
MPAAKRVKLDGGDKKYSIGLDIGTNSVGWAVITDEYKVPSKKFKVLGNTDRHSIKKNLIGALLFDSGETAEATRLKRTARRRYTRRKNRICYLQEIFSNEMAKVDDSFFHRLEESFLVEEDKKHERHPIFGNIVDEVAYHEKYPTIYHLRKKLVDSTDKADLRLIYLALAHMIKFRGHFLIEGDLNPDNSDVDKLFIQLVQTYNQLFEENPINASGVDAKAILSARLSKSRRLENLIAQLPGEKKNGLFGNLIALSLGLTPNFKSNFDLAEDAKLQLSKDTYDDDLDNLLAQIGDQYADLFLAAKNLSDAILLSDILRVNTEITKAPLSASMIKRYDEHHQDLTLLKALVRQQLPEKYKEIFFDQSKNGYAGYIDGGASQEEFYKFIKPILEKMDGTEELLVKLNREDLLRKQRTFDNGSIPHQIHLGELHAILRRQEDFYPFLKDNREKIEKILTFRIPYYVGPLARGNSRFAWMTRKSEETITPWNFEEVVDKGASAQSFIERMTNFDKNLPNEKVLPKHSLLYEYFTVYNELTKVKYVTEGMRKPAFLSGEQKKAIVDLLFKTNRKVTVKQLKEDYFKKIECFDSVEISGVEDRFNASLGTYHDLLKIIKDKDFLDNEENEDILEDIVLTLTLFEDREMIEERLKTYAHLFDDKVMKQLKRRRYTGWGRLSRKLINGIRDKQSGKTILDFLKSDGFANRNFMQLIHDDSLTFKEDIQKAQVSGQGDSLHEHIANLAGSPAIKKGILQTVKVVDELVKVMGRHKPENIVIEMARENQTTQKGQKNSRERMKRIEEGIKELGSQILKEHPVENTQLQNEKLYLYYLQNGRDMYVDQELDINRLSDYDVDHIVPQSFLKDDSIDNKVLTRSDKARGKSDNVPSEEVVKKMKNYWRQLLNAKLITQRKFDNLTKAERGGLSELDKAGFIKRQLVETRQITKHVAQILDSRMNTKYDENDKLIREVKVITLKSKLVSDFRKDFQFYKVREINNYHHAHDAYLNAVVGTALIKKYPKLESEFVYGDYKVYDVRKMIAKSEQEIGKATAKYFFYSNIMNFFKTEITLANGEIRKRPLIETNGETGEIVWDKGRDFATVRKVLSMPQVNIVKKTEVQTGGFSKESILPKRNSDKLIARKKDWDPKKYGGFDSPTVAYSVLVVAKVEKGKSKKLKSVKELLGITIMERSSFEKNPIDFLEAKGYKEVKKDLIIKLPKYSLFELENGRKRMLASAGELQKGNELALPSKYVNFLYLASHYEKLKGSPEDNEQKQLFVEQHKHYLDEIIEQISEFSKRVILADANLDKVLSAYNKHRDKPIREQAENIIHLFTLTNLGAPAAFKYFDTTIDRKRYTSTKEVLDATLIHQSITGLYETRIDLSQLGGDGGGGGGSGGGGSGGGGSGGGGSGGGVLDTPPSHIGLEHLPPPPEVPQFPLNLERLQALQDLVHRSLEAGYISPWDGPGNNPVFPVRKPNGAWRFVHDLRATNALTKPIPALSPGPPDLTAPPTHPPHIICLDLKDAFFQIPVEDRFRFYLSFTLPSPGGLQPHRRFAWRVLPQGFINSPALFQRALQEPLRQVSAAFSQSLLVSYMDDILYASPTEEQRSQCYQALAARLRDLGFQVASEKTSQTPSPVPFLGQMVHEQIVTYQSLPTLQISSPISLHQLQAVLGDLQWVSRGTPTTRRPLQLLYSSLKRHHDPRAIIQLSPEQLQGIAELRQALSHNARSRYNEQEPLLAYVHLTRAGSTLVLFQKGAQFPLAYFQTPLTDNQASPWGLLLLLGCQYLQTQALSSYAKPILKYYHNLPKTSLDNWIQSSEDPRVQELLQLWPQISSQGIQPPGPWKTLITRAEVFLTPQFSPDPIPAALCLFSDGATGRGAYCLWKDHLLDFQAVPAPESAQKGELAGLLAGLAAAPPEPVNIWVDSKYLYSLLRTWVLGAWLQPDPVPSYALLYKSLLRHPAIVVGHVRSHSSASHPIASLNNYVDQLAGKRTADGSEFEKRTADGSEFESPKKKAKVE

SEQ ID NO: 523 - protein, 1995 aa, synthetic construct
MPAAKRVKLDGGDKKYSIGLDIGTNSVGWAVITDEYKVPSKKFKVLGNTDRHSIKKNLIGALLFDSGETAEATRLKRTARRRYTRRKNRICYLQEIFSNEMAKVDDSFFHRLEESFLVEEDKKHERHPIFGNIVDEVAYHEKYPTIYHLRKKLVDSTDKADLRLIYLALAHMIKFRGHFLIEGDLNPDNSDVDKLFIQLVQTYNQLFEENPINASGVDAKAILSARLSKSRRLENLIAQLPGEKKNGLFGNLIALSLGLTPNFKSNFDLAEDAKLQLSKDTYDDDLDNLLAQIGDQYADLFLAAKNLSDAILLSDILRVNTEITKAPLSASMIKRYDEHHQDLTLLKALVRQQLPEKYKEIFFDQSKNGYAGYIDGGASQEEFYKFIKPILEKMDGTEELLVKLNREDLLRKQRTFDNGSIPHQIHLGELHAILRRQEDFYPFLKDNREKIEKILTFRIPYYVGPLARGNSRFAWMTRKSEETITPWNFEEVVDKGASAQSFIERMTNFDKNLPNEKVLPKHSLLYEYFTVYNELTKVKYVTEGMRKPAFLSGEQKKAIVDLLFKTNRKVTVKQLKEDYFKKIECFDSVEISGVEDRFNASLGTYHDLLKIIKDKDFLDNEENEDILEDIVLTLTLFEDREMIEERLKTYAHLFDDKVMKQLKRRRYTGWGRLSRKLINGIRDKQSGKTILDFLKSDGFANRNFMQLIHDDSLTFKEDIQKAQVSGQGDSLHEHIANLAGSPAIKKGILQTVKVVDELVKVMGRHKPENIVIEMARENQTTQKGQKNSRERMKRIEEGIKELGSQILKEHPVENTQLQNEKLYLYYLQNGRDMYVDQELDINRLSDYDVDHIVPQSFLKDDSIDNKVLTRSDKARGKSDNVPSEEVVKKMKNYWRQLLNAKLITQRKFDNLTKAERGGLSELDKAGFIKRQLVETRQITKHVAQILDSRMNTKYDENDKLIREVKVITLKSKLVSDFRKDFQFYKVREINNYHHAHDAYLNAVVGTALIKKYPKLESEFVYGDYKVYDVRKMIAKSEQEIGKATAKYFFYSNIMNFFKTEITLANGEIRKRPLIETNGETGEIVWDKGRDFATVRKVLSMPQVNIVKKTEVQTGGFSKESILPKRNSDKLIARKKDWDPKKYGGFDSPTVAYSVLVVAKVEKGKSKKLKSVKELLGITIMERSSFEKNPIDFLEAKGYKEVKKDLIIKLPKYSLFELENGRKRMLASAGELQKGNELALPSKYVNFLYLASHYEKLKGSPEDNEQKQLFVEQHKHYLDEIIEQISEFSKRVILADANLDKVLSAYNKHRDKPIREQAENIIHLFTLTNLGAPAAFKYFDTTIDRKRYTSTKEVLDATLIHQSITGLYETRIDLSQLGGDGGGGGGGGGGVLDTPPSHIGLEHLPPPPEVPQFPLNLERLQALQDLVHRSLEAGYISPWDGPGNNPVFPVRKPNGAWRFVHDLRATNALTKPIPALSPGPPDLTAPPTHPPHIICLDLKDAFFQIPVEDRFRFYLSFTLPSPGGLQPHRRFAWRVLPQGFINSPALFQRALQEPLRQVSAAFSQSLLVSYMDDILYASPTEEQRSQCYQALAARLRDLGFQVASEKTSQTPSPVPFLGQMVHEQIVTYQSLPTLQISSPISLHQLQAVLGDLQWVSRGTPTTRRPLQLLYSSLKRHHDPRAIIQLSPEQLQGIAELRQALSHNARSRYNEQEPLLAYVHLTRAGSTLVLFQKGAQFPLAYFQTPLTDNQASPWGLLLLLGCQYLQTQALSSYAKPILKYYHNLPKTSLDNWIQSSEDPRVQELLQLWPQISSQGIQPPGPWKTLITRAEVFLTPQFSPDPIPAALCLFSDGATGRGAYCLWKDHLLDFQAVPAPESAQKGELAGLLAGLAAAPPEPVNIWVDSKYLYSLLRTWVLGAWLQPDPVPSYALLYKSLLRHPAIVVGHVRSHSSASHPIASLNNYVDQLAGKRTADGSEFEKRTADGSEFESPKKKAKVE

SEQ ID NO: 524 - protein, 2122 aa, synthetic construct
MPAAKRVKLDGGDKKYSIGLDIGTNSVGWAVITDEYKVPSKKFKVLGNTDRHSIKKNLIGALLFDSGETAEATRLKRTARRRYTRRKNRICYLQEIFSNEMAKVDDSFFHRLEESFLVEEDKKHERHPIFGNIVDEVAYHEKYPTIYHLRKKLVDSTDKADLRLIYLALAHMIKFRGHFLIEGDLNPDNSDVDKLFIQLVQTYNQLFEENPINASGVDAKAILSARLSKSRRLENLIAQLPGEKKNGLFGNLIALSLGLTPNFKSNFDLAEDAKLQLSKDTYDDDLDNLLAQIGDQYADLFLAAKNLSDAILLSDILRVNTEITKAPLSASMIKRYDEHHQDLTLLKALVRQQLPEKYKEIFFDQSKNGYAGYIDGGASQEEFYKFIKPILEKMDGTEELLVKLNREDLLRKQRTFDNGSIPHQIHLGELHAILRRQEDFYPFLKDNREKIEKILTFRIPYYVGPLARGNSRFAWMTRKSEETITPWNFEEVVDKGASAQSFIERMTNFDKNLPNEKVLPKHSLLYEYFTVYNELTKVKYVTEGMRKPAFLSGEQKKAIVDLLFKTNRKVTVKQLKEDYFKKIECFDSVEISGVEDRFNASLGTYHDLLKIIKDKDFLDNEENEDILEDIVLTLTLFEDREMIEERLKTYAHLFDDKVMKQLKRRRYTGWGRLSRKLINGIRDKQSGKTILDFLKSDGFANRNFMQLIHDDSLTFKEDIQKAQVSGQGDSLHEHIANLAGSPAIKKGILQTVKVVDELVKVMGRHKPENIVIEMARENQTTQKGQKNSRERMKRIEEGIKELGSQILKEHPVENTQLQNEKLYLYYLQNGRDMYVDQELDINRLSDYDVDHIVPQSFLKDDSIDNKVLTRSDKARGKSDNVPSEEVVKKMKNYWRQLLNAKLITQRKFDNLTKAERGGLSELDKAGFIKRQLVETRQITKHVAQILDSRMNTKYDENDKLIREVKVITLKSKLVSDFRKDFQFYKVREINNYHHAHDAYLNAVVGTALIKKYPKLESEFVYGDYKVYDVRKMIAKSEQEIGKATAKYFFYSNIMNFFKTEITLANGEIRKRPLIETNGETGEIVWDKGRDFATVRKVLSMPQVNIVKKTEVQTGGFSKESILPKRNSDKLIARKKDWDPKKYGGFDSPTVAYSVLVVAKVEKGKSKKLKSVKELLGITIMERSSFEKNPIDFLEAKGYKEVKKDLIIKLPKYSLFELENGRKRMLASAGELQKGNELALPSKYVNFLYLASHYEKLKGSPEDNEQKQLFVEQHKHYLDEIIEQISEFSKRVILADANLDKVLSAYNKHRDKPIREQAENIIHLFTLTNLGAPAAFKYFDTTIDRKRYTSTKEVLDATLIHQSITGLYETRIDLSQLGGDGGAEAAAKEAAAKEAAAKEAAAKALEAEAAAKEAAAKEAAAKEAAAKAGGIPWLMKKPLQLTTLVPLQEYEERLLKQTMLTGSYKEKLQSLFLKYDALWQHWENQVGHRRIKPHHIATGTVNPRPQKQYPINPKAKASIQTVINDLLKQGVLIQQNSIMNTPVYPVPKPDGKWRMVLDYREVNKTIPLIAAQNQHSAGILSSIFRGKYKTTLDLSNGFWAHSITPESYWLTAFTWLGQQYCWTRLPQGFLNSPALFTADVVDLLKEVPNVQVYVDDIYISHDDPREHLEQLEKVFSLLLNAGYVVSLKKSEIAQHEVEFLGFNITKEGRGLTETFKQKLLNITPPRDLKQLQSILGLLNFARNFIPNFSELVKPLYNIIATANGKYITWTTDNSQQLQNIISMLNSAENLEERNPEVRLIMKVNTSPSAGYIRFYNEFAKRPIMYLNYVYTKAEVKFTNTEKLLTTIHKGLIKALDLGMGQEILVYSPIVSMTKIQKTPLPERKALPIRWITWMSYLEDPRIQFHYDKTLPELQQVPTVTDDIIAKIKHPSEFSMVFYTDGSAIKHPNVNKSHNAGMGIAQVQFKPEFTVINTWSIPLGDHTAQLAEVAAVEFACKKALKIDGPVLIVTDSFYVAESVNKELPYWQSNGFFNNKKKPLKHVSKWKSIADCIQLKPDIIIIHEKGHQPTASTFHTEGNNLADKLATQGSYVVNAGKRTADGSEFEKRTADGSEFESPKKKAKVE

SEQ ID NO: 525 - protein, 2096 aa, synthetic construct
MPAAKRVKLDGGDKKYSIGLDIGTNSVGWAVITDEYKVPSKKFKVLGNTDRHSIKKNLIGALLFDSGETAEATRLKRTARRRYTRRKNRICYLQEIFSNEMAKVDDSFFHRLEESFLVEEDKKHERHPIFGNIVDEVAYHEKYPTIYHLRKKLVDSTDKADLRLIYLALAHMIKFRGHFLIEGDLNPDNSDVDKLFIQLVQTYNQLFEENPINASGVDAKAILSARLSKSRRLENLIAQLPGEKKNGLFGNLIALSLGLTPNFKSNFDLAEDAKLQLSKDTYDDDLDNLLAQIGDQYADLFLAAKNLSDAILLSDILRVNTEITKAPLSASMIKRYDEHHQDLTLLKALVRQQLPEKYKEIFFDQSKNGYAGYIDGGASQEEFYKFIKPILEKMDGTEELLVKLNREDLLRKQRTFDNGSIPHQIHLGELHAILRRQEDFYPFLKDNREKIEKILTFRIPYYVGPLARGNSRFAWMTRKSEETITPWNFEEVVDKGASAQSFIERMTNFDKNLPNEKVLPKHSLLYEYFTVYNELTKVKYVTEGMRKPAFLSGEQKKAIVDLLFKTNRKVTVKQLKEDYFKKIECFDSVEISGVEDRFNASLGTYHDLLKIIKDKDFLDNEENEDILEDIVLTLTLFEDREMIEERLKTYAHLFDDKVMKQLKRRRYTGWGRLSRKLINGIRDKQSGKTILDFLKSDGFANRNFMQLIHDDSLTFKEDIQKAQVSGQGDSLHEHIANLAGSPAIKKGILQTVKVVDELVKVMGRHKPENIVIEMARENQTTQKGQKNSRERMKRIEEGIKELGSQILKEHPVENTQLQNEKLYLYYLQNGRDMYVDQELDINRLSDYDVDHIVPQSFLKDDSIDNKVLTRSDKARGKSDNVPSEEVVKKMKNYWRQLLNAKLITQRKFDNLTKAERGGLSELDKAGFIKRQLVETRQITKHVAQILDSRMNTKYDENDKLIREVKVITLKSKLVSDFRKDFQFYKVREINNYHHAHDAYLNAVVGTALIKKYPKLESEFVYGDYKVYDVRKMIAKSEQEIGKATAKYFFYSNIMNFFKTEITLANGEIRKRPLIETNGETGEIVWDKGRDFATVRKVLSMPQVNIVKKTEVQTGGFSKESILPKRNSDKLIARKKDWDPKKYGGFDSPTVAYSVLVVAKVEKGKSKKLKSVKELLGITIMERSSFEKNPIDFLEAKGYKEVKKDLIIKLPKYSLFELENGRKRMLASAGELQKGNELALPSKYVNFLYLASHYEKLKGSPEDNEQKQLFVEQHKHYLDEIIEQISEFSKRVILADANLDKVLSAYNKHRDKPIREQAENIIHLFTLTNLGAPAAFKYFDTTIDRKRYTSTKEVLDATLIHQSITGLYETRIDLSQLGGDGGEAAAKEAAAKEAAAKEAAAKGGIPWLMKKPLQLTTLVPLQEYEERLLKQTMLTGSYKEKLQSLFLKYDALWQHWENQVGHRRIKPHHIATGTVNPRPQKQYPINPKAKASIQTVINDLLKQGVLIQQNSIMNTPVYPVPKPDGKWRMVLDYREVNKTIPLIAAQNQHSAGILSSIFRGKYKTTLDLSNGFWAHSITPESYWLTAFTWLGQQYCWTRLPQGFLNSPALFTADVVDLLKEVPNVQVYVDDIYISHDDPREHLEQLEKVFSLLLNAGYVVSLKKSEIAQHEVEFLGFNITKEGRGLTETFKQKLLNITPPRDLKQLQSILGLLNFARNFIPNFSELVKPLYNIIATANGKYITWTTDNSQQLQNIISMLNSAENLEERNPEVRLIMKVNTSPSAGYIRFYNEFAKRPIMYLNYVYTKAEVKFTNTEKLLTTIHKGLIKALDLGMGQEILVYSPIVSMTKIQKTPLPERKALPIRWITWMSYLEDPRIQFHYDKTLPELQQVPTVTDDIIAKIKHPSEFSMVFYTDGSAIKHPNVNKSHNAGMGIAQVQFKPEFTVINTWSIPLGDHTAQLAEVAAVEFACKKALKIDGPVLIVTDSFYVAESVNKELPYWQSNGFFNNKKKPLKHVSKWKSIADCIQLKPDIIIIHEKGHQPTASTFHTEGNNLADKLATQGSYVVNAGKRTADGSEFEKRTADGSEFESPKKKAKVE

SEQ ID NO: 526 - protein, 2087 aa, synthetic construct
MPAAKRVKLDGGDKKYSIGLDIGTNSVGWAVITDEYKVPSKKFKVLGNTDRHSIKKNLIGALLFDSGETAEATRLKRTARRRYTRRKNRICYLQEIFSNEMAKVDDSFFHRLEESFLVEEDKKHERHPIFGNIVDEVAYHEKYPTIYHLRKKLVDSTDKADLRLIYLALAHMIKFRGHFLIEGDLNPDNSDVDKLFIQLVQTYNQLFEENPINASGVDAKAILSARLSKSRRLENLIAQLPGEKKNGLFGNLIALSLGLTPNFKSNFDLAEDAKLQLSKDTYDDDLDNLLAQIGDQYADLFLAAKNLSDAILLSDILRVNTEITKAPLSASMIKRYDEHHQDLTLLKALVRQQLPEKYKEIFFDQSKNGYAGYIDGGASQEEFYKFIKPILEKMDGTEELLVKLNREDLLRKQRTFDNGSIPHQIHLGELHAILRRQEDFYPFLKDNREKIEKILTFRIPYYVGPLARGNSRFAWMTRKSEETITPWNFEEVVDKGASAQSFIERMTNFDKNLPNEKVLPKHSLLYEYFTVYNELTKVKYVTEGMRKPAFLSGEQKKAIVDLLFKTNRKVTVKQLKEDYFKKIECFDSVEISGVEDRFNASLGTYHDLLKIIKDKDFLDNEENEDILEDIVLTLTLFEDREMIEERLKTYAHLFDDKVMKQLKRRRYTGWGRLSRKLINGIRDKQSGKTILDFLKSDGFANRNFMQLIHDDSLTFKEDIQKAQVSGQGDSLHEHIANLAGSPAIKKGILQTVKVVDELVKVMGRHKPENIVIEMARENQTTQKGQKNSRERMKRIEEGIKELGSQILKEHPVENTQLQNEKLYLYYLQNGRDMYVDQELDINRLSDYDVDHIVPQSFLKDDSIDNKVLTRSDKARGKSDNVPSEEVVKKMKNYWRQLLNAKLITQRKFDNLTKAERGGLSELDKAGFIKRQLVETRQITKHVAQILDSRMNTKYDENDKLIREVKVITLKSKLVSDFRKDFQFYKVREINNYHHAHDAYLNAVVGTALIKKYPKLESEFVYGDYKVYDVRKMIAKSEQEIGKATAKYFFYSNIMNFFKTEITLANGEIRKRPLIETNGETGEIVWDKGRDFATVRKVLSMPQVNIVKKTEVQTGGFSKESILPKRNSDKLIARKKDWDPKKYGGFDSPTVAYSVLVVAKVEKGKSKKLKSVKELLGITIMERSSFEKNPIDFLEAKGYKEVKKDLIIKLPKYSLFELENGRKRMLASAGELQKGNELALPSKYVNFLYLASHYEKLKGSPEDNEQKQLFVEQHKHYLDEIIEQISEFSKRVILADANLDKVLSAYNKHRDKPIREQAENIIHLFTLTNLGAPAAFKYFDTTIDRKRYTSTKEVLDATLIHQSITGLYETRIDLSQLGGDGGGGSEAAAKPAPGGIPWLMKKPLQLTTLVPLQEYEERLLKQTMLTGSYKEKLQSLFLKYDALWQHWENQVGHRRIKPHHIATGTVNPRPQKQYPINPKAKASIQTVINDLLKQGVLIQQNSIMNTPVYPVPKPDGKWRMVLDYREVNKTIPLIAAQNQHSAGILSSIFRGKYKTTLDLSNGFWAHSITPESYWLTAFTWLGQQYCWTRLPQGFLNSPALFTADVVDLLKEVPNVQVYVDDIYISHDDPREHLEQLEKVFSLLLNAGYVVSLKKSEIAQHEVEFLGFNITKEGRGLTETFKQKLLNITPPRDLKQLQSILGLLNFARNFIPNFSELVKPLYNIIATANGKYITWTTDNSQQLQNIISMLNSAENLEERNPEVRLIMKVNTSPSAGYIRFYNEFAKRPIMYLNYVYTKAEVKFTNTEKLLTTIHKGLIKALDLGMGQEILVYSPIVSMTKIQKTPLPERKALPIRWITWMSYLEDPRIQFHYDKTLPELQQVPTVTDDIIAKIKHPSEFSMVFYTDGSAIKHPNVNKSHNAGMGIAQVQFKPEFTVINTWSIPLGDHTAQLAEVAAVEFACKKALKIDGPVLIVTDSFYVAESVNKELPYWQSNGFFNNKKKPLKHVSKWKSIADCIQLKPDIIIIHEKGHQPTASTFHTEGNNLADKLATQGSYVVNAGKRTADGSEFEKRTADGSEFESPKKKAKVE

SEQ ID NO: 527 - protein, 2109 aa, synthetic construct
MPAAKRVKLDGGDKKYSIGLDIGTNSVGWAVITDEYKVPSKKFKVLGNTDRHSIKKNLIGALLFDSGETAEATRLKRTARRRYTRRKNRICYLQEIFSNEMAKVDDSFFHRLEESFLVEEDKKHERHPIFGNIVDEVAYHEKYPTIYHLRKKLVDSTDKADLRLIYLALAHMIKFRGHFLIEGDLNPDNSDVDKLFIQLVQTYNQLFEENPINASGVDAKAILSARLSKSRRLENLIAQLPGEKKNGLFGNLIALSLGLTPNFKSNFDLAEDAKLQLSKDTYDDDLDNLLAQIGDQYADLFLAAKNLSDAILLSDILRVNTEITKAPLSASMIKRYDEHHQDLTLLKALVRQQLPEKYKEIFFDQSKNGYAGYIDGGASQEEFYKFIKPILEKMDGTEELLVKLNREDLLRKQRTFDNGSIPHQIHLGELHAILRRQEDFYPFLKDNREKIEKILTFRIPYYVGPLARGNSRFAWMTRKSEETITPWNFEEVVDKGASAQSFIERMTNFDKNLPNEKVLPKHSLLYEYFTVYNELTKVKYVTEGMRKPAFLSGEQKKAIVDLLFKTNRKVTVKQLKEDYFKKIECFDSVEISGVEDRFNASLGTYHDLLKIIKDKDFLDNEENEDILEDIVLTLTLFEDREMIEERLKTYAHLFDDKVMKQLKRRRYTGWGRLSRKLINGIRDKQSGKTILDFLKSDGFANRNFMQLIHDDSLTFKEDIQKAQVSGQGDSLHEHIANLAGSPAIKKGILQTVKVVDELVKVMGRHKPENIVIEMARENQTTQKGQKNSRERMKRIEEGIKELGSQILKEHPVENTQLQNEKLYLYYLQNGRDMYVDQELDINRLSDYDVDHIVPQSFLKDDSIDNKVLTRSDKARGKSDNVPSEEVVKKMKNYWRQLLNAKLITQRKFDNLTKAERGGLSELDKAGFIKRQLVETRQITKHVAQILDSRMNTKYDENDKLIREVKVITLKSKLVSDFRKDFQFYKVREINNYHHAHDAYLNAVVGTALIKKYPKLESEFVYGDYKVYDVRKMIAKSEQEIGKATAKYFFYSNIMNFFKTEITLANGEIRKRPLIETNGETGEIVWDKGRDFATVRKVLSMPQVNIVKKTEVQTGGFSKESILPKRNSDKLIARKKDWDPKKYGGFDSPTVAYSVLVVAKVEKGKSKKLKSVKELLGITIMERSSFEKNPIDFLEAKGYKEVKKDLIIKLPKYSLFELENGRKRMLASAGELQKGNELALPSKYVNFLYLASHYEKLKGSPEDNEQKQLFVEQHKHYLDEIIEQISEFSKRVILADANLDKVLSAYNKHRDKPIREQAENIIHLFTLTNLGAPAAFKYFDTTIDRKRYTSTKEVLDATLIHQSITGLYETRIDLSQLGGDGGSGGSSGGSSGSETPGTSESATPESSGGSSGGSSGGIPWLMKKPLQLTTLVPLQEYEERLLKQTMLTGSYKEKLQSLFLKYDALWQHWENQVGHRRIKPHHIATGTVNPRPQKQYPINPKAKASIQTVINDLLKQGVLIQQNSIMNTPVYPVPKPDGKWRMVLDYREVNKTIPLIAAQNQHSAGILSSIFRGKYKTTLDLSNGFWAHSITPESYWLTAFTWLGQQYCWTRLPQGFLNSPALFTADVVDLLKEVPNVQVYVDDIYISHDDPREHLEQLEKVFSLLLNAGYVVSLKKSEIAQHEVEFLGFNITKEGRGLTETFKQKLLNITPPRDLKQLQSILGLLNFARNFIPNFSELVKPLYNIIATANGKYITWTTDNSQQLQNIISMLNSAENLEERNPEVRLIMKVNTSPSAGYIRFYNEFAKRPIMYLNYVYTKAEVKFTNTEKLLTTIHKGLIKALDLGMGQEILVYSPIVSMTKIQKTPLPERKALPIRWITWMSYLEDPRIQFHYDKTLPELQQVPTVTDDIIAKIKHPSEFSMVFYTDGSAIKHPNVNKSHNAGMGIAQVQFKPEFTVINTWSIPLGDHTAQLAEVAAVEFACKKALKIDGPVLIVTDSFYVAESVNKELPYWQSNGFFNNKKKPLKHVSKWKSIADCIQLKPDIIIIHEKGHQPTASTFHTEGNNLADKLATQGSYVVNAGKRTADGSEFEKRTADGSEFESPKKKAKVE

SEQ ID NO: 528 - protein, 2106 aa, synthetic construct
MPAAKRVKLDGGDKKYSIGLDIGTNSVGWAVITDEYKVPSKKFKVLGNTDRHSIKKNLIGALLFDSGETAEATRLKRTARRRYTRRKNRICYLQEIFSNEMAKVDDSFFHRLEESFLVEEDKKHERHPIFGNIVDEVAYHEKYPTIYHLRKKLVDSTDKADLRLIYLALAHMIKFRGHFLIEGDLNPDNSDVDKLFIQLVQTYNQLFEENPINASGVDAKAILSARLSKSRRLENLIAQLPGEKKNGLFGNLIALSLGLTPNFKSNFDLAEDAKLQLSKDTYDDDLDNLLAQIGDQYADLFLAAKNLSDAILLSDILRVNTEITKAPLSASMIKRYDEHHQDLTLLKALVRQQLPEKYKEIFFDQSKNGYAGYIDGGASQEEFYKFIKPILEKMDGTEELLVKLNREDLLRKQRTFDNGSIPHQIHLGELHAILRRQEDFYPFLKDNREKIEKILTFRIPYYVGPLARGNSRFAWMTRKSEETITPWNFEEVVDKGASAQSFIERMTNFDKNLPNEKVLPKHSLLYEYFTVYNELTKVKYVTEGMRKPAFLSGEQKKAIVDLLFKTNRKVTVKQLKEDYFKKIECFDSVEISGVEDRFNASLGTYHDLLKIIKDKDFLDNEENEDILEDIVLTLTLFEDREMIEERLKTYAHLFDDKVMKQLKRRRYTGWGRLSRKLINGIRDKQSGKTILDFLKSDGFANRNFMQLIHDDSLTFKEDIQKAQVSGQGDSLHEHIANLAGSPAIKKGILQTVKVVDELVKVMGRHKPENIVIEMARENQTTQKGQKNSRERMKRIEEGIKELGSQILKEHPVENTQLQNEKLYLYYLQNGRDMYVDQELDINRLSDYDVDHIVPQSFLKDDSIDNKVLTRSDKARGKSDNVPSEEVVKKMKNYWRQLLNAKLITQRKFDNLTKAERGGLSELDKAGFIKRQLVETRQITKHVAQILDSRMNTKYDENDKLIREVKVITLKSKLVSDFRKDFQFYKVREINNYHHAHDAYLNAVVGTALIKKYPKLESEFVYGDYKVYDVRKMIAKSEQEIGKATAKYFFYSNIMNFFKTEITLANGEIRKRPLIETNGETGEIVWDKGRDFATVRKVLSMPQVNIVKKTEVQTGGFSKESILPKRNSDKLIARKKDWDPKKYGGFDSPTVAYSVLVVAKVEKGKSKKLKSVKELLGITIMERSSFEKNPIDFLEAKGYKEVKKDLIIKLPKYSLFELENGRKRMLASAGELQKGNELALPSKYVNFLYLASHYEKLKGSPEDNEQKQLFVEQHKHYLDEIIEQISEFSKRVILADANLDKVLSAYNKHRDKPIREQAENIIHLFTLTNLGAPAAFKYFDTTIDRKRYTSTKEVLDATLIHQSITGLYETRIDLSQLGGDGGGGGGSGGGGSGGGGSGGGGSGGGGSGGGGSGGIPWLMKKPLQLTTLVPLQEYEERLLKQTMLTGSYKEKLQSLFLKYDALWQHWENQVGHRRIKPHHIATGTVNPRPQKQYPINPKAKASIQTVINDLLKQGVLIQQNSIMNTPVYPVPKPDGKWRMVLDYREVNKTIPLIAAQNQHSAGILSSIFRGKYKTTLDLSNGFWAHSITPESYWLTAFTWLGQQYCWTRLPQGFLNSPALFTADVVDLLKEVPNVQVYVDDIYISHDDPREHLEQLEKVFSLLLNAGYVVSLKKSEIAQHEVEFLGFNITKEGRGLTETFKQKLLNITPPRDLKQLQSILGLLNFARNFIPNFSELVKPLYNIIATANGKYITWTTDNSQQLQNIISMLNSAENLEERNPEVRLIMKVNTSPSAGYIRFYNEFAKRPIMYLNYVYTKAEVKFTNTEKLLTTIHKGLIKALDLGMGQEILVYSPIVSMTKIQKTPLPERKALPIRWITWMSYLEDPRIQFHYDKTLPELQQVPTVTDDIIAKIKHPSEFSMVFYTDGSAIKHPNVNKSHNAGMGIAQVQFKPEFTVINTWSIPLGDHTAQLAEVAAVEFACKKALKIDGPVLIVTDSFYVAESVNKELPYWQSNGFFNNKKKPLKHVSKWKSIADCIQLKPDIIIIHEKGHQPTASTFHTEGNNLADKLATQGSYVVNAGKRTADGSEFEKRTADGSEFESPKKKAKVE

SEQ ID NO: 529 - protein, 2082 aa, synthetic construct
MPAAKRVKLDGGDKKYSIGLDIGTNSVGWAVITDEYKVPSKKFKVLGNTDRHSIKKNLIGALLFDSGETAEATRLKRTARRRYTRRKNRICYLQEIFSNEMAKVDDSFFHRLEESFLVEEDKKHERHPIFGNIVDEVAYHEKYPTIYHLRKKLVDSTDKADLRLIYLALAHMIKFRGHFLIEGDLNPDNSDVDKLFIQLVQTYNQLFEENPINASGVDAKAILSARLSKSRRLENLIAQLPGEKKNGLFGNLIALSLGLTPNFKSNFDLAEDAKLQLSKDTYDDDLDNLLAQIGDQYADLFLAAKNLSDAILLSDILRVNTEITKAPLSASMIKRYDEHHQDLTLLKALVRQQLPEKYKEIFFDQSKNGYAGYIDGGASQEEFYKFIKPILEKMDGTEELLVKLNREDLLRKQRTFDNGSIPHQIHLGELHAILRRQEDFYPFLKDNREKIEKILTFRIPYYVGPLARGNSRFAWMTRKSEETITPWNFEEVVDKGASAQSFIERMTNFDKNLPNEKVLPKHSLLYEYFTVYNELTKVKYVTEGMRKPAFLSGEQKKAIVDLLFKTNRKVTVKQLKEDYFKKIECFDSVEISGVEDRFNASLGTYHDLLKIIKDKDFLDNEENEDILEDIVLTLTLFEDREMIEERLKTYAHLFDDKVMKQLKRRRYTGWGRLSRKLINGIRDKQSGKTILDFLKSDGFANRNFMQLIHDDSLTFKEDIQKAQVSGQGDSLHEHIANLAGSPAIKKGILQTVKVVDELVKVMGRHKPENIVIEMARENQTTQKGQKNSRERMKRIEEGIKELGSQILKEHPVENTQLQNEKLYLYYLQNGRDMYVDQELDINRLSDYDVDHIVPQSFLKDDSIDNKVLTRSDKARGKSDNVPSEEVVKKMKNYWRQLLNAKLITQRKFDNLTKAERGGLSELDKAGFIKRQLVETRQITKHVAQILDSRMNTKYDENDKLIREVKVITLKSKLVSDFRKDFQFYKVREINNYHHAHDAYLNAVVGTALIKKYPKLESEFVYGDYKVYDVRKMIAKSEQEIGKATAKYFFYSNIMNFFKTEITLANGEIRKRPLIETNGETGEIVWDKGRDFATVRKVLSMPQVNIVKKTEVQTGGFSKESILPKRNSDKLIARKKDWDPKKYGGFDSPTVAYSVLVVAKVEKGKSKKLKSVKELLGITIMERSSFEKNPIDFLEAKGYKEVKKDLIIKLPKYSLFELENGRKRMLASAGELQKGNELALPSKYVNFLYLASHYEKLKGSPEDNEQKQLFVEQHKHYLDEIIEQISEFSKRVILADANLDKVLSAYNKHRDKPIREQAENIIHLFTLTNLGAPAAFKYFDTTIDRKRYTSTKEVLDATLIHQSITGLYETRIDLSQLGGDGGGGGGGGGGIPWLMKKPLQLTTLVPLQEYEERLLKQTMLTGSYKEKLQSLFLKYDALWQHWENQVGHRRIKPHHIATGTVNPRPQKQYPINPKAKASIQTVINDLLKQGVLIQQNSIMNTPVYPVPKPDGKWRMVLDYREVNKTIPLIAAQNQHSAGILSSIFRGKYKTTLDLSNGFWAHSITPESYWLTAFTWLGQQYCWTRLPQGFLNSPALFTADVVDLLKEVPNVQVYVDDIYISHDDPREHLEQLEKVFSLLLNAGYVVSLKKSEIAQHEVEFLGFNITKEGRGLTETFKQKLLNITPPRDLKQLQSILGLLNFARNFIPNFSELVKPLYNIIATANGKYITWTTDNSQQLQNIISMLNSAENLEERNPEVRLIMKVNTSPSAGYIRFYNEFAKRPIMYLNYVYTKAEVKFTNTEKLLTTIHKGLIKALDLGMGQEILVYSPIVSMTKIQKTPLPERKALPIRWITWMSYLEDPRIQFHYDKTLPELQQVPTVTDDIIAKIKHPSEFSMVFYTDGSAIKHPNVNKSHNAGMGIAQVQFKPEFTVINTWSIPLGDHTAQLAEVAAVEFACKKALKIDGPVLIVTDSFYVAESVNKELPYWQSNGFFNNKKKPLKHVSKWKSIADCIQLKPDIIIIHEKGHQPTASTFHTEGNNLADKLATQGSYVVNAGKRTADGSEFEKRTADGSEFESPKKKAKVE

SEQ ID NO: 530 - protein, 2087 aa, synthetic construct
MPAAKRVKLDGGDKKYSIGLDIGTNSVGWAVITDEYKVPSKKFKVLGNTDRHSIKKNLIGALLFDSGETAEATRLKRTARRRYTRRKNRICYLQEIFSNEMAKVDDSFFHRLEESFLVEEDKKHERHPIFGNIVDEVAYHEKYPTIYHLRKKLVDSTDKADLRLIYLALAHMIKFRGHFLIEGDLNPDNSDVDKLFIQLVQTYNQLFEENPINASGVDAKAILSARLSKSRRLENLIAQLPGEKKNGLFGNLIALSLGLTPNFKSNFDLAEDAKLQLSKDTYDDDLDNLLAQIGDQYADLFLAAKNLSDAILLSDILRVNTEITKAPLSASMIKRYDEHHQDLTLLKALVRQQLPEKYKEIFFDQSKNGYAGYIDGGASQEEFYKFIKPILEKMDGTEELLVKLNREDLLRKQRTFDNGSIPHQIHLGELHAILRRQEDFYPFLKDNREKIEKILTFRIPYYVGPLARGNSRFAWMTRKSEETITPWNFEEVVDKGASAQSFIERMTNFDKNLPNEKVLPKHSLLYEYFTVYNELTKVKYVTEGMRKPAFLSGEQKKAIVDLLFKTNRKVTVKQLKEDYFKKIECFDSVEISGVEDRFNASLGTYHDLLKIIKDKDFLDNEENEDILEDIVLTLTLFEDREMIEERLKTYAHLFDDKVMKQLKRRRYTGWGRLSRKLINGIRDKQSGKTILDFLKSDGFANRNFMQLIHDDSLTFKEDIQKAQVSGQGDSLHEHIANLAGSPAIKKGILQTVKVVDELVKVMGRHKPENIVIEMARENQTTQKGQKNSRERMKRIEEGIKELGSQILKEHPVENTQLQNEKLYLYYLQNGRDMYVDQELDINRLSDYDVDHIVPQSFLKDDSIDNKVLTRSDKARGKSDNVPSEEVVKKMKNYWRQLLNAKLITQRKFDNLTKAERGGLSELDKAGFIKRQLVETRQITKHVAQILDSRMNTKYDENDKLIREVKVITLKSKLVSDFRKDFQFYKVREINNYHHAHDAYLNAVVGTALIKKYPKLESEFVYGDYKVYDVRKMIAKSEQEIGKATAKYFFYSNIMNFFKTEITLANGEIRKRPLIETNGETGEIVWDKGRDFATVRKVLSMPQVNIVKKTEVQTGGFSKESILPKRNSDKLIARKKDWDPKKYGGFDSPTVAYSVLVVAKVEKGKSKKLKSVKELLGITIMERSSFEKNPIDFLEAKGYKEVKKDLIIKLPKYSLFELENGRKRMLASAGELQKGNELALPSKYVNFLYLASHYEKLKGSPEDNEQKQLFVEQHKHYLDEIIEQISEFSKRVILADANLDKVLSAYNKHRDKPIREQAENIIHLFTLTNLGAPAAFKYFDTTIDRKRYTSTKEVLDATLIHQSITGLYETRIDLSQLGGDGGGSSGGGEAAAKGGIPWLMKKPLQLTTLVPLQEYEERLLKQTMLTGSYKEKLQSLFLKYDALWQHWENQVGHRRIKPHHIATGTVNPRPQKQYPINPKAKASIQTVINDLLKQGVLIQQNSIMNTPVYPVPKPDGKWRMVLDYREVNKTIPLIAAQNQHSAGILSSIFRGKYKTTLDLSNGFWAHSITPESYWLTAFTWLGQQYCWTRLPQGFLNSPALFTADVVDLLKEVPNVQVYVDDIYISHDDPREHLEQLEKVFSLLLNAGYVVSLKKSEIAQHEVEFLGFNITKEGRGLTETFKQKLLNITPPRDLKQLQSILGLLNFARNFIPNFSELVKPLYNIIATANGKYITWTTDNSQQLQNIISMLNSAENLEERNPEVRLIMKVNTSPSAGYIRFYNEFAKRPIMYLNYVYTKAEVKFTNTEKLLTTIHKGLIKALDLGMGQEILVYSPIVSMTKIQKTPLPERKALPIRWITWMSYLEDPRIQFHYDKTLPELQQVPTVTDDIIAKIKHPSEFSMVFYTDGSAIKHPNVNKSHNAGMGIAQVQFKPEFTVINTWSIPLGDHTAQLAEVAAVEFACKKALKIDGPVLIVTDSFYVAESVNKELPYWQSNGFFNNKKKPLKHVSKWKSIADCIQLKPDIIIIHEKGHQPTASTFHTEGNNLADKLATQGSYVVNAGKRTADGSEFEKRTADGSEFESPKKKAKVE

SEQ ID NO: 531 - protein, 2082 aa, synthetic construct
MPAAKRVKLDGGDKKYSIGLDIGTNSVGWAVITDEYKVPSKKFKVLGNTDRHSIKKNLIGALLFDSGETAEATRLKRTARRRYTRRKNRICYLQEIFSNEMAKVDDSFFHRLEESFLVEEDKKHERHPIFGNIVDEVAYHEKYPTIYHLRKKLVDSTDKADLRLIYLALAHMIKFRGHFLIEGDLNPDNSDVDKLFIQLVQTYNQLFEENPINASGVDAKAILSARLSKSRRLENLIAQLPGEKKNGLFGNLIALSLGLTPNFKSNFDLAEDAKLQLSKDTYDDDLDNLLAQIGDQYADLFLAAKNLSDAILLSDILRVNTEITKAPLSASMIKRYDEHHQDLTLLKALVRQQLPEKYKEIFFDQSKNGYAGYIDGGASQEEFYKFIKPILEKMDGTEELLVKLNREDLLRKQRTFDNGSIPHQIHLGELHAILRRQEDFYPFLKDNREKIEKILTFRIPYYVGPLARGNSRFAWMTRKSEETITPWNFEEVVDKGASAQSFIERMTNFDKNLPNEKVLPKHSLLYEYFTVYNELTKVKYVTEGMRKPAFLSGEQKKAIVDLLFKTNRKVTVKQLKEDYFKKIECFDSVEISGVEDRFNASLGTYHDLLKIIKDKDFLDNEENEDILEDIVLTLTLFEDREMIEERLKTYAHLFDDKVMKQLKRRRYTGWGRLSRKLINGIRDKQSGKTILDFLKSDGFANRNFMQLIHDDSLTFKEDIQKAQVSGQGDSLHEHIANLAGSPAIKKGILQTVKVVDELVKVMGRHKPENIVIEMARENQTTQKGQKNSRERMKRIEEGIKELGSQILKEHPVENTQLQNEKLYLYYLQNGRDMYVDQELDINRLSDYDVDHIVPQSFLKDDSIDNKVLTRSDKARGKSDNVPSEEVVKKMKNYWRQLLNAKLITQRKFDNLTKAERGGLSELDKAGFIKRQLVETRQITKHVAQILDSRMNTKYDENDKLIREVKVITLKSKLVSDFRKDFQFYKVREINNYHHAHDAYLNAVVGTALIKKYPKLESEFVYGDYKVYDVRKMIAKSEQEIGKATAKYFFYSNIMNFFKTEITLANGEIRKRPLIETNGETGEIVWDKGRDFATVRKVLSMPQVNIVKKTEVQTGGFSKESILPKRNSDKLIARKKDWDPKKYGGFDSPTVAYSVLVVAKVEKGKSKKLKSVKELLGITIMERSSFEKNPIDFLEAKGYKEVKKDLIIKLPKYSLFELENGRKRMLASAGELQKGNELALPSKYVNFLYLASHYEKLKGSPEDNEQKQLFVEQHKHYLDEIIEQISEFSKRVILADANLDKVLSAYNKHRDKPIREQAENIIHLFTLTNLGAPAAFKYFDTTIDRKRYTSTKEVLDATLIHQSITGLYETRIDLSQLGGDGGGGSGGSGGIPWLMKKPLQLTTLVPLQEYEERLLKQTMLTGSYKEKLQSLFLKYDALWQHWENQVGHRRIKPHHIATGTVNPRPQKQYPINPKAKASIQTVINDLLKQGVLIQQNSIMNTPVYPVPKPDGKWRMVLDYREVNKTIPLIAAQNQHSAGILSSIFRGKYKTTLDLSNGFWAHSITPESYWLTAFTWLGQQYCWTRLPQGFLNSPALFTADVVDLLKEVPNVQVYVDDIYISHDDPREHLEQLEKVFSLLLNAGYVVSLKKSEIAQHEVEFLGFNITKEGRGLTETFKQKLLNITPPRDLKQLQSILGLLNFARNFIPNFSELVKPLYNIIATANGKYITWTTDNSQQLQNIISMLNSAENLEERNPEVRLIMKVNTSPSAGYIRFYNEFAKRPIMYLNYVYTKAEVKFTNTEKLLTTIHKGLIKALDLGMGQEILVYSPIVSMTKIQKTPLPERKALPIRWITWMSYLEDPRIQFHYDKTLPELQQVPTVTDDIIAKIKHPSEFSMVFYTDGSAIKHPNVNKSHNAGMGIAQVQFKPEFTVINTWSIPLGDHTAQLAEVAAVEFACKKALKIDGPVLIVTDSFYVAESVNKELPYWQSNGFFNNKKKPLKHVSKWKSIADCIQLKPDIIIIHEKGHQPTASTFHTEGNNLADKLATQGSYVVNAGKRTADGSEFEKRTADGSEFESPKKKAKVE

SEQ ID NO: 532 - protein, 2085 aa, synthetic construct
MPAAKRVKLDGGDKKYSIGLDIGTNSVGWAVITDEYKVPSKKFKVLGNTDRHSIKKNLIGALLFDSGETAEATRLKRTARRRYTRRKNRICYLQEIFSNEMAKVDDSFFHRLEESFLVEEDKKHERHPIFGNIVDEVAYHEKYPTIYHLRKKLVDSTDKADLRLIYLALAHMIKFRGHFLIEGDLNPDNSDVDKLFIQLVQTYNQLFEENPINASGVDAKAILSARLSKSRRLENLIAQLPGEKKNGLFGNLIALSLGLTPNFKSNFDLAEDAKLQLSKDTYDDDLDNLLAQIGDQYADLFLAAKNLSDAILLSDILRVNTEITKAPLSASMIKRYDEHHQDLTLLKALVRQQLPEKYKEIFFDQSKNGYAGYIDGGASQEEFYKFIKPILEKMDGTEELLVKLNREDLLRKQRTFDNGSIPHQIHLGELHAILRRQEDFYPFLKDNREKIEKILTFRIPYYVGPLARGNSRFAWMTRKSEETITPWNFEEVVDKGASAQSFIERMTNFDKNLPNEKVLPKHSLLYEYFTVYNELTKVKYVTEGMRKPAFLSGEQKKAIVDLLFKTNRKVTVKQLKEDYFKKIECFDSVEISGVEDRFNASLGTYHDLLKIIKDKDFLDNEENEDILEDIVLTLTLFEDREMIEERLKTYAHLFDDKVMKQLKRRRYTGWGRLSRKLINGIRDKQSGKTILDFLKSDGFANRNFMQLIHDDSLTFKEDIQKAQVSGQGDSLHEHIANLAGSPAIKKGILQTVKVVDELVKVMGRHKPENIVIEMARENQTTQKGQKNSRERMKRIEEGIKELGSQILKEHPVENTQLQNEKLYLYYLQNGRDMYVDQELDINRLSDYDVDHIVPQSFLKDDSIDNKVLTRSDKARGKSDNVPSEEVVKKMKNYWRQLLNAKLITQRKFDNLTKAERGGLSELDKAGFIKRQLVETRQITKHVAQILDSRMNTKYDENDKLIREVKVITLKSKLVSDFRKDFQFYKVREINNYHHAHDAYLNAVVGTALIKKYPKLESEFVYGDYKVYDVRKMIAKSEQEIGKATAKYFFYSNIMNFFKTEITLANGEIRKRPLIETNGETGEIVWDKGRDFATVRKVLSMPQVNIVKKTEVQTGGFSKESILPKRNSDKLIARKKDWDPKKYGGFDSPTVAYSVLVVAKVEKGKSKKLKSVKELLGITIMERSSFEKNPIDFLEAKGYKEVKKDLIIKLPKYSLFELENGRKRMLASAGELQKGNELALPSKYVNFLYLASHYEKLKGSPEDNEQKQLFVEQHKHYLDEIIEQISEFSKRVILADANLDKVLSAYNKHRDKPIREQAENIIHLFTLTNLGAPAAFKYFDTTIDRKRYTSTKEVLDATLIHQSITGLYETRIDLSQLGGDGGPAPGGGGGSGGIPWLMKKPLQLTTLVPLQEYEERLLKQTMLTGSYKEKLQSLFLKYDALWQHWENQVGHRRIKPHHIATGTVNPRPQKQYPINPKAKASIQTVINDLLKQGVLIQQNSIMNTPVYPVPKPDGKWRMVLDYREVNKTIPLIAAQNQHSAGILSSIFRGKYKTTLDLSNGFWAHSITPESYWLTAFTWLGQQYCWTRLPQGFLNSPALFTADVVDLLKEVPNVQVYVDDIYISHDDPREHLEQLEKVFSLLLNAGYVVSLKKSEIAQHEVEFLGFNITKEGRGLTETFKQKLLNITPPRDLKQLQSILGLLNFARNFIPNFSELVKPLYNIIATANGKYITWTTDNSQQLQNIISMLNSAENLEERNPEVRLIMKVNTSPSAGYIRFYNEFAKRPIMYLNYVYTKAEVKFTNTEKLLTTIHKGLIKALDLGMGQEILVYSPIVSMTKIQKTPLPERKALPIRWITWMSYLEDPRIQFHYDKTLPELQQVPTVTDDIIAKIKHPSEFSMVFYTDGSAIKHPNVNKSHNAGMGIAQVQFKPEFTVINTWSIPLGDHTAQLAEVAAVEFACKKALKIDGPVLIVTDSFYVAESVNKELPYWQSNGFFNNKKKPLKHVSKWKSIADCIQLKPDIIIIHEKGHQPTASTFHTEGNNLADKLATQGSYVVNAGKRTADGSEFEKRTADGSEFESPKKKAKVE

SEQ ID NO: 533 - protein, 2087 aa, synthetic construct
MPAAKRVKLDGGDKKYSIGLDIGTNSVGWAVITDEYKVPSKKFKVLGNTDRHSIKKNLIGALLFDSGETAEATRLKRTARRRYTRRKNRICYLQEIFSNEMAKVDDSFFHRLEESFLVEEDKKHERHPIFGNIVDEVAYHEKYPTIYHLRKKLVDSTDKADLRLIYLALAHMIKFRGHFLIEGDLNPDNSDVDKLFIQLVQTYNQLFEENPINASGVDAKAILSARLSKSRRLENLIAQLPGEKKNGLFGNLIALSLGLTPNFKSNFDLAEDAKLQLSKDTYDDDLDNLLAQIGDQYADLFLAAKNLSDAILLSDILRVNTEITKAPLSASMIKRYDEHHQDLTLLKALVRQQLPEKYKEIFFDQSKNGYAGYIDGGASQEEFYKFIKPILEKMDGTEELLVKLNREDLLRKQRTFDNGSIPHQIHLGELHAILRRQEDFYPFLKDNREKIEKILTFRIPYYVGPLARGNSRFAWMTRKSEETITPWNFEEVVDKGASAQSFIERMTNFDKNLPNEKVLPKHSLLYEYFTVYNELTKVKYVTEGMRKPAFLSGEQKKAIVDLLFKTNRKVTVKQLKEDYFKKIECFDSVEISGVEDRFNASLGTYHDLLKIIKDKDFLDNEENEDILEDIVLTLTLFEDREMIEERLKTYAHLFDDKVMKQLKRRRYTGWGRLSRKLINGIRDKQSGKTILDFLKSDGFANRNFMQLIHDDSLTFKEDIQKAQVSGQGDSLHEHIANLAGSPAIKKGILQTVKVVDELVKVMGRHKPENIVIEMARENQTTQKGQKNSRERMKRIEEGIKELGSQILKEHPVENTQLQNEKLYLYYLQNGRDMYVDQELDINRLSDYDVDHIVPQSFLKDDSIDNKVLTRSDKARGKSDNVPSEEVVKKMKNYWRQLLNAKLITQRKFDNLTKAERGGLSELDKAGFIKRQLVETRQITKHVAQILDSRMNTKYDENDKLIREVKVITLKSKLVSDFRKDFQFYKVREINNYHHAHDAYLNAVVGTALIKKYPKLESEFVYGDYKVYDVRKMIAKSEQEIGKATAKYFFYSNIMNFFKTEITLANGEIRKRPLIETNGETGEIVWDKGRDFATVRKVLSMPQVNIVKKTEVQTGGFSKESILPKRNSDKLIARKKDWDPKKYGGFDSPTVAYSVLVVAKVEKGKSKKLKSVKELLGITIMERSSFEKNPIDFLEAKGYKEVKKDLIIKLPKYSLFELENGRKRMLASAGELQKGNELALPSKYVNFLYLASHYEKLKGSPEDNEQKQLFVEQHKHYLDEIIEQISEFSKRVILADANLDKVLSAYNKHRDKPIREQAENIIHLFTLTNLGAPAAFKYFDTTIDRKRYTSTKEVLDATLIHQSITGLYETRIDLSQLGGDGGGGSGGGEAAAKGGIPWLMKKPLQLTTLVPLQEYEERLLKQTMLTGSYKEKLQSLFLKYDALWQHWENQVGHRRIKPHHIATGTVNPRPQKQYPINPKAKASIQTVINDLLKQGVLIQQNSIMNTPVYPVPKPDGKWRMVLDYREVNKTIPLIAAQNQHSAGILSSIFRGKYKTTLDLSNGFWAHSITPESYWLTAFTWLGQQYCWTRLPQGFLNSPALFTADVVDLLKEVPNVQVYVDDIYISHDDPREHLEQLEKVFSLLLNAGYVVSLKKSEIAQHEVEFLGFNITKEGRGLTETFKQKLLNITPPRDLKQLQSILGLLNFARNFIPNFSELVKPLYNIIATANGKYITWTTDNSQQLQNIISMLNSAENLEERNPEVRLIMKVNTSPSAGYIRFYNEFAKRPIMYLNYVYTKAEVKFTNTEKLLTTIHKGLIKALDLGMGQEILVYSPIVSMTKIQKTPLPERKALPIRWITWMSYLEDPRIQFHYDKTLPELQQVPTVTDDIIAKIKHPSEFSMVFYTDGSAIKHPNVNKSHNAGMGIAQVQFKPEFTVINTWSIPLGDHTAQLAEVAAVEFACKKALKIDGPVLIVTDSFYVAESVNKELPYWQSNGFFNNKKKPLKHVSKWKSIADCIQLKPDIIIIHEKGHQPTASTFHTEGNNLADKLATQGSYVVNAGKRTADGSEFEKRTADGSEFESPKKKAKVE

SEQ ID NO: 534 - protein, 2079 aa, synthetic construct
MPAAKRVKLDGGDKKYSIGLDIGTNSVGWAVITDEYKVPSKKFKVLGNTDRHSIKKNLIGALLFDSGETAEATRLKRTARRRYTRRKNRICYLQEIFSNEMAKVDDSFFHRLEESFLVEEDKKHERHPIFGNIVDEVAYHEKYPTIYHLRKKLVDSTDKADLRLIYLALAHMIKFRGHFLIEGDLNPDNSDVDKLFIQLVQTYNQLFEENPINASGVDAKAILSARLSKSRRLENLIAQLPGEKKNGLFGNLIALSLGLTPNFKSNFDLAEDAKLQLSKDTYDDDLDNLLAQIGDQYADLFLAAKNLSDAILLSDILRVNTEITKAPLSASMIKRYDEHHQDLTLLKALVRQQLPEKYKEIFFDQSKNGYAGYIDGGASQEEFYKFIKPILEKMDGTEELLVKLNREDLLRKQRTFDNGSIPHQIHLGELHAILRRQEDFYPFLKDNREKIEKILTFRIPYYVGPLARGNSRFAWMTRKSEETITPWNFEEVVDKGASAQSFIERMTNFDKNLPNEKVLPKHSLLYEYFTVYNELTKVKYVTEGMRKPAFLSGEQKKAIVDLLFKTNRKVTVKQLKEDYFKKIECFDSVEISGVEDRFNASLGTYHDLLKIIKDKDFLDNEENEDILEDIVLTLTLFEDREMIEERLKTYAHLFDDKVMKQLKRRRYTGWGRLSRKLINGIRDKQSGKTILDFLKSDGFANRNFMQLIHDDSLTFKEDIQKAQVSGQGDSLHEHIANLAGSPAIKKGILQTVKVVDELVKVMGRHKPENIVIEMARENQTTQKGQKNSRERMKRIEEGIKELGSQILKEHPVENTQLQNEKLYLYYLQNGRDMYVDQELDINRLSDYDVDHIVPQSFLKDDSIDNKVLTRSDKARGKSDNVPSEEVVKKMKNYWRQLLNAKLITQRKFDNLTKAERGGLSELDKAGFIKRQLVETRQITKHVAQILDSRMNTKYDENDKLIREVKVITLKSKLVSDFRKDFQFYKVREINNYHHAHDAYLNAVVGTALIKKYPKLESEFVYGDYKVYDVRKMIAKSEQEIGKATAKYFFYSNIMNFFKTEITLANGEIRKRPLIETNGETGEIVWDKGRDFATVRKVLSMPQVNIVKKTEVQTGGFSKESILPKRNSDKLIARKKDWDPKKYGGFDSPTVAYSVLVVAKVEKGKSKKLKSVKELLGITIMERSSFEKNPIDFLEAKGYKEVKKDLIIKLPKYSLFELENGRKRMLASAGELQKGNELALPSKYVNFLYLASHYEKLKGSPEDNEQKQLFVEQHKHYLDEIIEQISEFSKRVILADANLDKVLSAYNKHRDKPIREQAENIIHLFTLTNLGAPAAFKYFDTTIDRKRYTSTKEVLDATLIHQSITGLYETRIDLSQLGGDGGGSSGGIPWLMKKPLQLTTLVPLQEYEERLLKQTMLTGSYKEKLQSLFLKYDALWQHWENQVGHRRIKPHHIATGTVNPRPQKQYPINPKAKASIQTVINDLLKQGVLIQQNSIMNTPVYPVPKPDGKWRMVLDYREVNKTIPLIAAQNQHSAGILSSIFRGKYKTTLDLSNGFWAHSITPESYWLTAFTWLGQQYCWTRLPQGFLNSPALFNADVVDLLKEVPNVQVYVDDIYISHDDPREHLEQLEKVFSLLLNAGYVVSLKKSEIAQHEVEFLGFNITKEGRGLTETFKQKLLNITPPRDLKQLQSILGLLNFARNFIPNFSELVKPLYNIIATAPGKYITWTTDNSQQLQNIISMLNSAENLEERNPEVRLIMKVNTSPSAGYIRFYNEFAKRPIMYLNYVYTKAEVKFTNTEKLLTTIHKGLIKALDLGMGQEILVYSPIVSMTKIQKTPLPERKALPIRWITWMSYLEDPRIQFHYDKTLPELQQVPTVTDDIIAKIKHPSEFSMVFYTDGSAIKHPNVNKSHNAGMGIAQVQFKPEFTVINTWSIPLGDHTAQLAEVAAVEFACKKALKIDGPVLIVTDSFYVAESVNKELPYWQSNGFFNNKKKPLKHVSKWKSIADCIQLKPDIIIIHEKGHQPTASTFHTEGNNLADKLATQGSYVVNAGKRTADGSEFEKRTADGSEFESPKKKAKVE

SEQ ID NO: 535 - protein, 2082 aa, synthetic construct
MPAAKRVKLDGGDKKYSIGLDIGTNSVGWAVITDEYKVPSKKFKVLGNTDRHSIKKNLIGALLFDSGETAEATRLKRTARRRYTRRKNRICYLQEIFSNEMAKVDDSFFHRLEESFLVEEDKKHERHPIFGNIVDEVAYHEKYPTIYHLRKKLVDSTDKADLRLIYLALAHMIKFRGHFLIEGDLNPDNSDVDKLFIQLVQTYNQLFEENPINASGVDAKAILSARLSKSRRLENLIAQLPGEKKNGLFGNLIALSLGLTPNFKSNFDLAEDAKLQLSKDTYDDDLDNLLAQIGDQYADLFLAAKNLSDAILLSDILRVNTEITKAPLSASMIKRYDEHHQDLTLLKALVRQQLPEKYKEIFFDQSKNGYAGYIDGGASQEEFYKFIKPILEKMDGTEELLVKLNREDLLRKQRTFDNGSIPHQIHLGELHAILRRQEDFYPFLKDNREKIEKILTFRIPYYVGPLARGNSRFAWMTRKSEETITPWNFEEVVDKGASAQSFIERMTNFDKNLPNEKVLPKHSLLYEYFTVYNELTKVKYVTEGMRKPAFLSGEQKKAIVDLLFKTNRKVTVKQLKEDYFKKIECFDSVEISGVEDRFNASLGTYHDLLKIIKDKDFLDNEENEDILEDIVLTLTLFEDREMIEERLKTYAHLFDDKVMKQLKRRRYTGWGRLSRKLINGIRDKQSGKTILDFLKSDGFANRNFMQLIHDDSLTFKEDIQKAQVSGQGDSLHEHIANLAGSPAIKKGILQTVKVVDELVKVMGRHKPENIVIEMARENQTTQKGQKNSRERMKRIEEGIKELGSQILKEHPVENTQLQNEKLYLYYLQNGRDMYVDQELDINRLSDYDVDHIVPQSFLKDDSIDNKVLTRSDKARGKSDNVPSEEVVKKMKNYWRQLLNAKLITQRKFDNLTKAERGGLSELDKAGFIKRQLVETRQITKHVAQILDSRMNTKYDENDKLIREVKVITLKSKLVSDFRKDFQFYKVREINNYHHAHDAYLNAVVGTALIKKYPKLESEFVYGDYKVYDVRKMIAKSEQEIGKATAKYFFYSNIMNFFKTEITLANGEIRKRPLIETNGETGEIVWDKGRDFATVRKVLSMPQVNIVKKTEVQTGGFSKESILPKRNSDKLIARKKDWDPKKYGGFDSPTVAYSVLVVAKVEKGKSKKLKSVKELLGITIMERSSFEKNPIDFLEAKGYKEVKKDLIIKLPKYSLFELENGRKRMLASAGELQKGNELALPSKYVNFLYLASHYEKLKGSPEDNEQKQLFVEQHKHYLDEIIEQISEFSKRVILADANLDKVLSAYNKHRDKPIREQAENIIHLFTLTNLGAPAAFKYFDTTIDRKRYTSTKEVLDATLIHQSITGLYETRIDLSQLGGDGGPAPGSSGGIPWLMKKPLQLTTLVPLQEYEERLLKQTMLTGSYKEKLQSLFLKYDALWQHWENQVGHRRIKPHHIATGTVNPRPQKQYPINPKAKASIQTVINDLLKQGVLIQQNSIMNTPVYPVPKPDGKWRMVLDYREVNKTIPLIAAQNQHSAGILSSIFRGKYKTTLDLSNGFWAHSITPESYWLTAFTWLGQQYCWTRLPQGFLNSPALFNADVVDLLKEVPNVQVYVDDIYISHDDPREHLEQLEKVFSLLLNAGYVVSLKKSEIAQHEVEFLGFNITKEGRGLTETFKQKLLNITPPRDLKQLQSILGLLNFARNFIPNFSELVKPLYNIIATAPGKYITWTTDNSQQLQNIISMLNSAENLEERNPEVRLIMKVNTSPSAGYIRFYNEFAKRPIMYLNYVYTKAEVKFTNTEKLLTTIHKGLIKALDLGMGQEILVYSPIVSMTKIQKTPLPERKALPIRWITWMSYLEDPRIQFHYDKTLPELQQVPTVTDDIIAKIKHPSEFSMVFYTDGSAIKHPNVNKSHNAGMGIAQVQFKPEFTVINTWSIPLGDHTAQLAEVAAVEFACKKALKIDGPVLIVTDSFYVAESVNKELPYWQSNGFFNNKKKPLKHVSKWKSIADCIQLKPDIIIIHEKGHQPTASTFHTEGNNLADKLATQGSYVVNAGKRTADGSEFEKRTADGSEFESPKKKAKVE

SEQ ID NO: 536 - protein, 2087 aa, synthetic construct
MPAAKRVKLDGGDKKYSIGLDIGTNSVGWAVITDEYKVPSKKFKVLGNTDRHSIKKNLIGALLFDSGETAEATRLKRTARRRYTRRKNRICYLQEIFSNEMAKVDDSFFHRLEESFLVEEDKKHERHPIFGNIVDEVAYHEKYPTIYHLRKKLVDSTDKADLRLIYLALAHMIKFRGHFLIEGDLNPDNSDVDKLFIQLVQTYNQLFEENPINASGVDAKAILSARLSKSRRLENLIAQLPGEKKNGLFGNLIALSLGLTPNFKSNFDLAEDAKLQLSKDTYDDDLDNLLAQIGDQYADLFLAAKNLSDAILLSDILRVNTEITKAPLSASMIKRYDEHHQDLTLLKALVRQQLPEKYKEIFFDQSKNGYAGYIDGGASQEEFYKFIKPILEKMDGTEELLVKLNREDLLRKQRTFDNGSIPHQIHLGELHAILRRQEDFYPFLKDNREKIEKILTFRIPYYVGPLARGNSRFAWMTRKSEETITPWNFEEVVDKGASAQSFIERMTNFDKNLPNEKVLPKHSLLYEYFTVYNELTKVKYVTEGMRKPAFLSGEQKKAIVDLLFKTNRKVTVKQLKEDYFKKIECFDSVEISGVEDRFNASLGTYHDLLKIIKDKDFLDNEENEDILEDIVLTLTLFEDREMIEERLKTYAHLFDDKVMKQLKRRRYTGWGRLSRKLINGIRDKQSGKTILDFLKSDGFANRNFMQLIHDDSLTFKEDIQKAQVSGQGDSLHEHIANLAGSPAIKKGILQTVKVVDELVKVMGRHKPENIVIEMARENQTTQKGQKNSRERMKRIEEGIKELGSQILKEHPVENTQLQNEKLYLYYLQNGRDMYVDQELDINRLSDYDVDHIVPQSFLKDDSIDNKVLTRSDKARGKSDNVPSEEVVKKMKNYWRQLLNAKLITQRKFDNLTKAERGGLSELDKAGFIKRQLVETRQITKHVAQILDSRMNTKYDENDKLIREVKVITLKSKLVSDFRKDFQFYKVREINNYHHAHDAYLNAVVGTALIKKYPKLESEFVYGDYKVYDVRKMIAKSEQEIGKATAKYFFYSNIMNFFKTEITLANGEIRKRPLIETNGETGEIVWDKGRDFATVRKVLSMPQVNIVKKTEVQTGGFSKESILPKRNSDKLIARKKDWDPKKYGGFDSPTVAYSVLVVAKVEKGKSKKLKSVKELLGITIMERSSFEKNPIDFLEAKGYKEVKKDLIIKLPKYSLFELENGRKRMLASAGELQKGNELALPSKYVNFLYLASHYEKLKGSPEDNEQKQLFVEQHKHYLDEIIEQISEFSKRVILADANLDKVLSAYNKHRDKPIREQAENIIHLFTLTNLGAPAAFKYFDTTIDRKRYTSTKEVLDATLIHQSITGLYETRIDLSQLGGDGGGSSGGSEAAAKGGIPWLMKKPLQLTTLVPLQEYEERLLKQTMLTGSYKEKLQSLFLKYDALWQHWENQVGHRRIKPHHIATGTVNPRPQKQYPINPKAKASIQTVINDLLKQGVLIQQNSIMNTPVYPVPKPDGKWRMVLDYREVNKTIPLIAAQNQHSAGILSSIFRGKYKTTLDLSNGFWAHSITPESYWLTAFTWLGQQYCWTRLPQGFLNSPALFNADVVDLLKEVPNVQVYVDDIYISHDDPREHLEQLEKVFSLLLNAGYVVSLKKSEIAQHEVEFLGFNITKEGRGLTETFKQKLLNITPPRDLKQLQSILGLLNFARNFIPNFSELVKPLYNIIATAPGKYITWTTDNSQQLQNIISMLNSAENLEERNPEVRLIMKVNTSPSAGYIRFYNEFAKRPIMYLNYVYTKAEVKFTNTEKLLTTIHKGLIKALDLGMGQEILVYSPIVSMTKIQKTPLPERKALPIRWITWMSYLEDPRIQFHYDKTLPELQQVPTVTDDIIAKIKHPSEFSMVFYTDGSAIKHPNVNKSHNAGMGIAQVQFKPEFTVINTWSIPLGDHTAQLAEVAAVEFACKKALKIDGPVLIVTDSFYVAESVNKELPYWQSNGFFNNKKKPLKHVSKWKSIADCIQLKPDIIIIHEKGHQPTASTFHTEGNNLADKLATQGSYVVNAGKRTADGSEFEKRTADGSEFESPKKKAKVE

SEQ ID NO: 537 - protein, 2087 aa, synthetic construct
MPAAKRVKLDGGDKKYSIGLDIGTNSVGWAVITDEYKVPSKKFKVLGNTDRHSIKKNLIGALLFDSGETAEATRLKRTARRRYTRRKNRICYLQEIFSNEMAKVDDSFFHRLEESFLVEEDKKHERHPIFGNIVDEVAYHEKYPTIYHLRKKLVDSTDKADLRLIYLALAHMIKFRGHFLIEGDLNPDNSDVDKLFIQLVQTYNQLFEENPINASGVDAKAILSARLSKSRRLENLIAQLPGEKKNGLFGNLIALSLGLTPNFKSNFDLAEDAKLQLSKDTYDDDLDNLLAQIGDQYADLFLAAKNLSDAILLSDILRVNTEITKAPLSASMIKRYDEHHQDLTLLKALVRQQLPEKYKEIFFDQSKNGYAGYIDGGASQEEFYKFIKPILEKMDGTEELLVKLNREDLLRKQRTFDNGSIPHQIHLGELHAILRRQEDFYPFLKDNREKIEKILTFRIPYYVGPLARGNSRFAWMTRKSEETITPWNFEEVVDKGASAQSFIERMTNFDKNLPNEKVLPKHSLLYEYFTVYNELTKVKYVTEGMRKPAFLSGEQKKAIVDLLFKTNRKVTVKQLKEDYFKKIECFDSVEISGVEDRFNASLGTYHDLLKIIKDKDFLDNEENEDILEDIVLTLTLFEDREMIEERLKTYAHLFDDKVMKQLKRRRYTGWGRLSRKLINGIRDKQSGKTILDFLKSDGFANRNFMQLIHDDSLTFKEDIQKAQVSGQGDSLHEHIANLAGSPAIKKGILQTVKVVDELVKVMGRHKPENIVIEMARENQTTQKGQKNSRERMKRIEEGIKELGSQILKEHPVENTQLQNEKLYLYYLQNGRDMYVDQELDINRLSDYDVDHIVPQSFLKDDSIDNKVLTRSDKARGKSDNVPSEEVVKKMKNYWRQLLNAKLITQRKFDNLTKAERGGLSELDKAGFIKRQLVETRQITKHVAQILDSRMNTKYDENDKLIREVKVITLKSKLVSDFRKDFQFYKVREINNYHHAHDAYLNAVVGTALIKKYPKLESEFVYGDYKVYDVRKMIAKSEQEIGKATAKYFFYSNIMNFFKTEITLANGEIRKRPLIETNGETGEIVWDKGRDFATVRKVLSMPQVNIVKKTEVQTGGFSKESILPKRNSDKLIARKKDWDPKKYGGFDSPTVAYSVLVVAKVEKGKSKKLKSVKELLGITIMERSSFEKNPIDFLEAKGYKEVKKDLIIKLPKYSLFELENGRKRMLASAGELQKGNELALPSKYVNFLYLASHYEKLKGSPEDNEQKQLFVEQHKHYLDEIIEQISEFSKRVILADANLDKVLSAYNKHRDKPIREQAENIIHLFTLTNLGAPAAFKYFDTTIDRKRYTSTKEVLDATLIHQSITGLYETRIDLSQLGGDGGGSSPAPEAAAKGGIPWLMKKPLQLTTLVPLQEYEERLLKQTMLTGSYKEKLQSLFLKYDALWQHWENQVGHRRIKPHHIATGTVNPRPQKQYPINPKAKASIQTVINDLLKQGVLIQQNSIMNTPVYPVPKPDGKWRMVLDYREVNKTIPLIAAQNQHSAGILSSIFRGKYKTTLDLSNGFWAHSITPESYWLTAFTWLGQQYCWTRLPQGFLNSPALFNADVVDLLKEVPNVQVYVDDIYISHDDPREHLEQLEKVFSLLLNAGYVVSLKKSEIAQHEVEFLGFNITKEGRGLTETFKQKLLNITPPRDLKQLQSILGLLNFARNFIPNFSELVKPLYNIIATAPGKYITWTTDNSQQLQNIISMLNSAENLEERNPEVRLIMKVNTSPSAGYIRFYNEFAKRPIMYLNYVYTKAEVKFTNTEKLLTTIHKGLIKALDLGMGQEILVYSPIVSMTKIQKTPLPERKALPIRWITWMSYLEDPRIQFHYDKTLPELQQVPTVTDDIIAKIKHPSEFSMVFYTDGSAIKHPNVNKSHNAGMGIAQVQFKPEFTVINTWSIPLGDHTAQLAEVAAVEFACKKALKIDGPVLIVTDSFYVAESVNKELPYWQSNGFFNNKKKPLKHVSKWKSIADCIQLKPDIIIIHEKGHQPTASTFHTEGNNLADKLATQGSYVVNAGKRTADGSEFEKRTADGSEFESPKKKAKVE

SEQ ID NO: 538 - protein, 2087 aa, synthetic construct
MPAAKRVKLDGGDKKYSIGLDIGTNSVGWAVITDEYKVPSKKFKVLGNTDRHSIKKNLIGALLFDSGETAEATRLKRTARRRYTRRKNRICYLQEIFSNEMAKVDDSFFHRLEESFLVEEDKKHERHPIFGNIVDEVAYHEKYPTIYHLRKKLVDSTDKADLRLIYLALAHMIKFRGHFLIEGDLNPDNSDVDKLFIQLVQTYNQLFEENPINASGVDAKAILSARLSKSRRLENLIAQLPGEKKNGLFGNLIALSLGLTPNFKSNFDLAEDAKLQLSKDTYDDDLDNLLAQIGDQYADLFLAAKNLSDAILLSDILRVNTEITKAPLSASMIKRYDEHHQDLTLLKALVRQQLPEKYKEIFFDQSKNGYAGYIDGGASQEEFYKFIKPILEKMDGTEELLVKLNREDLLRKQRTFDNGSIPHQIHLGELHAILRRQEDFYPFLKDNREKIEKILTFRIPYYVGPLARGNSRFAWMTRKSEETITPWNFEEVVDKGASAQSFIERMTNFDKNLPNEKVLPKHSLLYEYFTVYNELTKVKYVTEGMRKPAFLSGEQKKAIVDLLFKTNRKVTVKQLKEDYFKKIECFDSVEISGVEDRFNASLGTYHDLLKIIKDKDFLDNEENEDILEDIVLTLTLFEDREMIEERLKTYAHLFDDKVMKQLKRRRYTGWGRLSRKLINGIRDKQSGKTILDFLKSDGFANRNFMQLIHDDSLTFKEDIQKAQVSGQGDSLHEHIANLAGSPAIKKGILQTVKVVDELVKVMGRHKPENIVIEMARENQTTQKGQKNSRERMKRIEEGIKELGSQILKEHPVENTQLQNEKLYLYYLQNGRDMYVDQELDINRLSDYDVDHIVPQSFLKDDSIDNKVLTRSDKARGKSDNVPSEEVVKKMKNYWRQLLNAKLITQRKFDNLTKAERGGLSELDKAGFIKRQLVETRQITKHVAQILDSRMNTKYDENDKLIREVKVITLKSKLVSDFRKDFQFYKVREINNYHHAHDAYLNAVVGTALIKKYPKLESEFVYGDYKVYDVRKMIAKSEQEIGKATAKYFFYSNIMNFFKTEITLANGEIRKRPLIETNGETGEIVWDKGRDFATVRKVLSMPQVNIVKKTEVQTGGFSKESILPKRNSDKLIARKKDWDPKKYGGFDSPTVAYSVLVVAKVEKGKSKKLKSVKELLGITIMERSSFEKNPIDFLEAKGYKEVKKDLIIKLPKYSLFELENGRKRMLASAGELQKGNELALPSKYVNFLYLASHYEKLKGSPEDNEQKQLFVEQHKHYLDEIIEQISEFSKRVILADANLDKVLSAYNKHRDKPIREQAENIIHLFTLTNLGAPAAFKYFDTTIDRKRYTSTKEVLDATLIHQSITGLYETRIDLSQLGGDGGPAPEAAAKGGSGGIPWLMKKPLQLTTLVPLQEYEERLLKQTMLTGSYKEKLQSLFLKYDALWQHWENQVGHRRIKPHHIATGTVNPRPQKQYPINPKAKASIQTVINDLLKQGVLIQQNSIMNTPVYPVPKPDGKWRMVLDYREVNKTIPLIAAQNQHSAGILSSIFRGKYKTTLDLSNGFWAHSITPESYWLTAFTWLGQQYCWTRLPQGFLNSPALFNADVVDLLKEVPNVQVYVDDIYISHDDPREHLEQLEKVFSLLLNAGYVVSLKKSEIAQHEVEFLGFNITKEGRGLTETFKQKLLNITPPRDLKQLQSILGLLNFARNFIPNFSELVKPLYNIIATAPGKYITWTTDNSQQLQNIISMLNSAENLEERNPEVRLIMKVNTSPSAGYIRFYNEFAKRPIMYLNYVYTKAEVKFTNTEKLLTTIHKGLIKALDLGMGQEILVYSPIVSMTKIQKTPLPERKALPIRWITWMSYLEDPRIQFHYDKTLPELQQVPTVTDDIIAKIKHPSEFSMVFYTDGSAIKHPNVNKSHNAGMGIAQVQFKPEFTVINTWSIPLGDHTAQLAEVAAVEFACKKALKIDGPVLIVTDSFYVAESVNKELPYWQSNGFFNNKKKPLKHVSKWKSIADCIQLKPDIIIIHEKGHQPTASTFHTEGNNLADKLATQGSYVVNAGKRTADGSEFEKRTADGSEFESPKKKAKVE

SEQ ID NO: 539 - protein, 2096 aa, synthetic construct
MPAAKRVKLDGGDKKYSIGLDIGTNSVGWAVITDEYKVPSKKFKVLGNTDRHSIKKNLIGALLFDSGETAEATRLKRTARRRYTRRKNRICYLQEIFSNEMAKVDDSFFHRLEESFLVEEDKKHERHPIFGNIVDEVAYHEKYPTIYHLRKKLVDSTDKADLRLIYLALAHMIKFRGHFLIEGDLNPDNSDVDKLFIQLVQTYNQLFEENPINASGVDAKAILSARLSKSRRLENLIAQLPGEKKNGLFGNLIALSLGLTPNFKSNFDLAEDAKLQLSKDTYDDDLDNLLAQIGDQYADLFLAAKNLSDAILLSDILRVNTEITKAPLSASMIKRYDEHHQDLTLLKALVRQQLPEKYKEIFFDQSKNGYAGYIDGGASQEEFYKFIKPILEKMDGTEELLVKLNREDLLRKQRTFDNGSIPHQIHLGELHAILRRQEDFYPFLKDNREKIEKILTFRIPYYVGPLARGNSRFAWMTRKSEETITPWNFEEVVDKGASAQSFIERMTNFDKNLPNEKVLPKHSLLYEYFTVYNELTKVKYVTEGMRKPAFLSGEQKKAIVDLLFKTNRKVTVKQLKEDYFKKIECFDSVEISGVEDRFNASLGTYHDLLKIIKDKDFLDNEENEDILEDIVLTLTLFEDREMIEERLKTYAHLFDDKVMKQLKRRRYTGWGRLSRKLINGIRDKQSGKTILDFLKSDGFANRNFMQLIHDDSLTFKEDIQKAQVSGQGDSLHEHIANLAGSPAIKKGILQTVKVVDELVKVMGRHKPENIVIEMARENQTTQKGQKNSRERMKRIEEGIKELGSQILKEHPVENTQLQNEKLYLYYLQNGRDMYVDQELDINRLSDYDVDHIVPQSFLKDDSIDNKVLTRSDKARGKSDNVPSEEVVKKMKNYWRQLLNAKLITQRKFDNLTKAERGGLSELDKAGFIKRQLVETRQITKHVAQILDSRMNTKYDENDKLIREVKVITLKSKLVSDFRKDFQFYKVREINNYHHAHDAYLNAVVGTALIKKYPKLESEFVYGDYKVYDVRKMIAKSEQEIGKATAKYFFYSNIMNFFKTEITLANGEIRKRPLIETNGETGEIVWDKGRDFATVRKVLSMPQVNIVKKTEVQTGGFSKESILPKRNSDKLIARKKDWDPKKYGGFDSPTVAYSVLVVAKVEKGKSKKLKSVKELLGITIMERSSFEKNPIDFLEAKGYKEVKKDLIIKLPKYSLFELENGRKRMLASAGELQKGNELALPSKYVNFLYLASHYEKLKGSPEDNEQKQLFVEQHKHYLDEIIEQISEFSKRVILADANLDKVLSAYNKHRDKPIREQAENIIHLFTLTNLGAPAAFKYFDTTIDRKRYTSTKEVLDATLIHQSITGLYETRIDLSQLGGDGGEAAAKEAAAKEAAAKEAAAKGGIPWLMKKPLQLTTLVPLQEYEERLLKQTMLTGSYKEKLQSLFLKYDALWQHWENQVGHRRIKPHHIATGTVNPRPQKQYPINPKAKASIQTVINDLLKQGVLIQQNSIMNTPVYPVPKPDGKWRMVLDYREVNKTIPLIAAQNQHSAGILSSIFRGKYKTTLDLSNGFWAHSITPESYWLTAFTWLGQQYCWTRLPQGFLNSPALFNADVVDLLKEVPNVQVYVDDIYISHDDPREHLEQLEKVFSLLLNAGYVVSLKKSEIAQHEVEFLGFNITKEGRGLTETFKQKLLNITPPRDLKQLQSILGLLNFARNFIPNFSELVKPLYNIIATAPGKYITWTTDNSQQLQNIISMLNSAENLEERNPEVRLIMKVNTSPSAGYIRFYNEFAKRPIMYLNYVYTKAEVKFTNTEKLLTTIHKGLIKALDLGMGQEILVYSPIVSMTKIQKTPLPERKALPIRWITWMSYLEDPRIQFHYDKTLPELQQVPTVTDDIIAKIKHPSEFSMVFYTDGSAIKHPNVNKSHNAGMGIAQVQFKPEFTVINTWSIPLGDHTAQLAEVAAVEFACKKALKIDGPVLIVTDSFYVAESVNKELPYWQSNGFFNNKKKPLKHVSKWKSIADCIQLKPDIIIIHEKGHQPTASTFHTEGNNLADKLATQGSYVVNAGKRTADGSEFEKRTADGSEFESPKKKAKVE

SEQ ID NO: 540 - protein, 2085 aa, synthetic construct
MPAAKRVKLDGGDKKYSIGLDIGTNSVGWAVITDEYKVPSKKFKVLGNTDRHSIKKNLIGALLFDSGETAEATRLKRTARRRYTRRKNRICYLQEIFSNEMAKVDDSFFHRLEESFLVEEDKKHERHPIFGNIVDEVAYHEKYPTIYHLRKKLVDSTDKADLRLIYLALAHMIKFRGHFLIEGDLNPDNSDVDKLFIQLVQTYNQLFEENPINASGVDAKAILSARLSKSRRLENLIAQLPGEKKNGLFGNLIALSLGLTPNFKSNFDLAEDAKLQLSKDTYDDDLDNLLAQIGDQYADLFLAAKNLSDAILLSDILRVNTEITKAPLSASMIKRYDEHHQDLTLLKALVRQQLPEKYKEIFFDQSKNGYAGYIDGGASQEEFYKFIKPILEKMDGTEELLVKLNREDLLRKQRTFDNGSIPHQIHLGELHAILRRQEDFYPFLKDNREKIEKILTFRIPYYVGPLARGNSRFAWMTRKSEETITPWNFEEVVDKGASAQSFIERMTNFDKNLPNEKVLPKHSLLYEYFTVYNELTKVKYVTEGMRKPAFLSGEQKKAIVDLLFKTNRKVTVKQLKEDYFKKIECFDSVEISGVEDRFNASLGTYHDLLKIIKDKDFLDNEENEDILEDIVLTLTLFEDREMIEERLKTYAHLFDDKVMKQLKRRRYTGWGRLSRKLINGIRDKQSGKTILDFLKSDGFANRNFMQLIHDDSLTFKEDIQKAQVSGQGDSLHEHIANLAGSPAIKKGILQTVKVVDELVKVMGRHKPENIVIEMARENQTTQKGQKNSRERMKRIEEGIKELGSQILKEHPVENTQLQNEKLYLYYLQNGRDMYVDQELDINRLSDYDVDHIVPQSFLKDDSIDNKVLTRSDKARGKSDNVPSEEVVKKMKNYWRQLLNAKLITQRKFDNLTKAERGGLSELDKAGFIKRQLVETRQITKHVAQILDSRMNTKYDENDKLIREVKVITLKSKLVSDFRKDFQFYKVREINNYHHAHDAYLNAVVGTALIKKYPKLESEFVYGDYKVYDVRKMIAKSEQEIGKATAKYFFYSNIMNFFKTEITLANGEIRKRPLIETNGETGEIVWDKGRDFATVRKVLSMPQVNIVKKTEVQTGGFSKESILPKRNSDKLIARKKDWDPKKYGGFDSPTVAYSVLVVAKVEKGKSKKLKSVKELLGITIMERSSFEKNPIDFLEAKGYKEVKKDLIIKLPKYSLFELENGRKRMLASAGELQKGNELALPSKYVNFLYLASHYEKLKGSPEDNEQKQLFVEQHKHYLDEIIEQISEFSKRVILADANLDKVLSAYNKHRDKPIREQAENIIHLFTLTNLGAPAAFKYFDTTIDRKRYTSTKEVLDATLIHQSITGLYETRIDLSQLGGDGGGGSPAPGSSGGIPWLMKKPLQLTTLVPLQEYEERLLKQTMLTGSYKEKLQSLFLKYDALWQHWENQVGHRRIKPHHIATGTVNPRPQKQYPINPKAKASIQTVINDLLKQGVLIQQNSIMNTPVYPVPKPDGKWRMVLDYREVNKTIPLIAAQNQHSAGILSSIFRGKYKTTLDLSNGFWAHSITPESYWLTAFTWLGQQYCWTRLPQGFLNSPALFNADVVDLLKEVPNVQVYVDDIYISHDDPREHLEQLEKVFSLLLNAGYVVSLKKSEIAQHEVEFLGFNITKEGRGLTETFKQKLLNITPPRDLKQLQSILGLLNFARNFIPNFSELVKPLYNIIATAPGKYITWTTDNSQQLQNIISMLNSAENLEERNPEVRLIMKVNTSPSAGYIRFYNEFAKRPIMYLNYVYTKAEVKFTNTEKLLTTIHKGLIKALDLGMGQEILVYSPIVSMTKIQKTPLPERKALPIRWITWMSYLEDPRIQFHYDKTLPELQQVPTVTDDIIAKIKHPSEFSMVFYTDGSAIKHPNVNKSHNAGMGIAQVQFKPEFTVINTWSIPLGDHTAQLAEVAAVEFACKKALKIDGPVLIVTDSFYVAESVNKELPYWQSNGFFNNKKKPLKHVSKWKSIADCIQLKPDIIIIHEKGHQPTASTFHTEGNNLADKLATQGSYVVNAGKRTADGSEFEKRTADGSEFESPKKKAKVE

SEQ ID NO: 541 - protein, 2091 aa, synthetic construct
MPAAKRVKLDGGDKKYSIGLDIGTNSVGWAVITDEYKVPSKKFKVLGNTDRHSIKKNLIGALLFDSGETAEATRLKRTARRRYTRRKNRICYLQEIFSNEMAKVDDSFFHRLEESFLVEEDKKHERHPIFGNIVDEVAYHEKYPTIYHLRKKLVDSTDKADLRLIYLALAHMIKFRGHFLIEGDLNPDNSDVDKLFIQLVQTYNQLFEENPINASGVDAKAILSARLSKSRRLENLIAQLPGEKKNGLFGNLIALSLGLTPNFKSNFDLAEDAKLQLSKDTYDDDLDNLLAQIGDQYADLFLAAKNLSDAILLSDILRVNTEITKAPLSASMIKRYDEHHQDLTLLKALVRQQLPEKYKEIFFDQSKNGYAGYIDGGASQEEFYKFIKPILEKMDGTEELLVKLNREDLLRKQRTFDNGSIPHQIHLGELHAILRRQEDFYPFLKDNREKIEKILTFRIPYYVGPLARGNSRFAWMTRKSEETITPWNFEEVVDKGASAQSFIERMTNFDKNLPNEKVLPKHSLLYEYFTVYNELTKVKYVTEGMRKPAFLSGEQKKAIVDLLFKTNRKVTVKQLKEDYFKKIECFDSVEISGVEDRFNASLGTYHDLLKIIKDKDFLDNEENEDILEDIVLTLTLFEDREMIEERLKTYAHLFDDKVMKQLKRRRYTGWGRLSRKLINGIRDKQSGKTILDFLKSDGFANRNFMQLIHDDSLTFKEDIQKAQVSGQGDSLHEHIANLAGSPAIKKGILQTVKVVDELVKVMGRHKPENIVIEMARENQTTQKGQKNSRERMKRIEEGIKELGSQILKEHPVENTQLQNEKLYLYYLQNGRDMYVDQELDINRLSDYDVDHIVPQSFLKDDSIDNKVLTRSDKARGKSDNVPSEEVVKKMKNYWRQLLNAKLITQRKFDNLTKAERGGLSELDKAGFIKRQLVETRQITKHVAQILDSRMNTKYDENDKLIREVKVITLKSKLVSDFRKDFQFYKVREINNYHHAHDAYLNAVVGTALIKKYPKLESEFVYGDYKVYDVRKMIAKSEQEIGKATAKYFFYSNIMNFFKTEITLANGEIRKRPLIETNGETGEIVWDKGRDFATVRKVLSMPQVNIVKKTEVQTGGFSKESILPKRNSDKLIARKKDWDPKKYGGFDSPTVAYSVLVVAKVEKGKSKKLKSVKELLGITIMERSSFEKNPIDFLEAKGYKEVKKDLIIKLPKYSLFELENGRKRMLASAGELQKGNELALPSKYVNFLYLASHYEKLKGSPEDNEQKQLFVEQHKHYLDEIIEQISEFSKRVILADANLDKVLSAYNKHRDKPIREQAENIIHLFTLTNLGAPAAFKYFDTTIDRKRYTSTKEVLDATLIHQSITGLYETRIDLSQLGGDGGEAAAKGGGGSEAAAKGGIPWLMKKPLQLTTLVPLQEYEERLLKQTMLTGSYKEKLQSLFLKYDALWQHWENQVGHRRIKPHHIATGTVNPRPQKQYPINPKAKASIQTVINDLLKQGVLIQQNSIMNTPVYPVPKPDGKWRMVLDYREVNKTIPLIAAQNQHSAGILSSIFRGKYKTTLDLSNGFWAHSITPESYWLTAFTWLGQQYCWTRLPQGFLNSPALFNADVVDLLKEVPNVQVYVDDIYISHDDPREHLEQLEKVFSLLLNAGYVVSLKKSEIAQHEVEFLGFNITKEGRGLTETFKQKLLNITPPRDLKQLQSILGLLNFARNFIPNFSELVKPLYNIIATAPGKYITWTTDNSQQLQNIISMLNSAENLEERNPEVRLIMKVNTSPSAGYIRFYNEFAKRPIMYLNYVYTKAEVKFTNTEKLLTTIHKGLIKALDLGMGQEILVYSPIVSMTKIQKTPLPERKALPIRWITWMSYLEDPRIQFHYDKTLPELQQVPTVTDDIIAKIKHPSEFSMVFYTDGSAIKHPNVNKSHNAGMGIAQVQFKPEFTVINTWSIPLGDHTAQLAEVAAVEFACKKALKIDGPVLIVTDSFYVAESVNKELPYWQSNGFFNNKKKPLKHVSKWKSIADCIQLKPDIIIIHEKGHQPTASTFHTEGNNLADKLATQGSYVVNAGKRTADGSEFEKRTADGSEFESPKKKAKVE

SEQ ID NO: 542 - protein, 2085 aa, synthetic construct
MPAAKRVKLDGGDKKYSIGLDIGTNSVGWAVITDEYKVPSKKFKVLGNTDRHSIKKNLIGALLFDSGETAEATRLKRTARRRYTRRKNRICYLQEIFSNEMAKVDDSFFHRLEESFLVEEDKKHERHPIFGNIVDEVAYHEKYPTIYHLRKKLVDSTDKADLRLIYLALAHMIKFRGHFLIEGDLNPDNSDVDKLFIQLVQTYNQLFEENPINASGVDAKAILSARLSKSRRLENLIAQLPGEKKNGLFGNLIALSLGLTPNFKSNFDLAEDAKLQLSKDTYDDDLDNLLAQIGDQYADLFLAAKNLSDAILLSDILRVNTEITKAPLSASMIKRYDEHHQDLTLLKALVRQQLPEKYKEIFFDQSKNGYAGYIDGGASQEEFYKFIKPILEKMDGTEELLVKLNREDLLRKQRTFDNGSIPHQIHLGELHAILRRQEDFYPFLKDNREKIEKILTFRIPYYVGPLARGNSRFAWMTRKSEETITPWNFEEVVDKGASAQSFIERMTNFDKNLPNEKVLPKHSLLYEYFTVYNELTKVKYVTEGMRKPAFLSGEQKKAIVDLLFKTNRKVTVKQLKEDYFKKIECFDSVEISGVEDRFNASLGTYHDLLKIIKDKDFLDNEENEDILEDIVLTLTLFEDREMIEERLKTYAHLFDDKVMKQLKRRRYTGWGRLSRKLINGIRDKQSGKTILDFLKSDGFANRNFMQLIHDDSLTFKEDIQKAQVSGQGDSLHEHIANLAGSPAIKKGILQTVKVVDELVKVMGRHKPENIVIEMARENQTTQKGQKNSRERMKRIEEGIKELGSQILKEHPVENTQLQNEKLYLYYLQNGRDMYVDQELDINRLSDYDVDHIVPQSFLKDDSIDNKVLTRSDKARGKSDNVPSEEVVKKMKNYWRQLLNAKLITQRKFDNLTKAERGGLSELDKAGFIKRQLVETRQITKHVAQILDSRMNTKYDENDKLIREVKVITLKSKLVSDFRKDFQFYKVREINNYHHAHDAYLNAVVGTALIKKYPKLESEFVYGDYKVYDVRKMIAKSEQEIGKATAKYFFYSNIMNFFKTEITLANGEIRKRPLIETNGETGEIVWDKGRDFATVRKVLSMPQVNIVKKTEVQTGGFSKESILPKRNSDKLIARKKDWDPKKYGGFDSPTVAYSVLVVAKVEKGKSKKLKSVKELLGITIMERSSFEKNPIDFLEAKGYKEVKKDLIIKLPKYSLFELENGRKRMLASAGELQKGNELALPSKYVNFLYLASHYEKLKGSPEDNEQKQLFVEQHKHYLDEIIEQISEFSKRVILADANLDKVLSAYNKHRDKPIREQAENIIHLFTLTNLGAPAAFKYFDTTIDRKRYTSTKEVLDATLIHQSITGLYETRIDLSQLGGDGGPAPGGGGGSGGIPWLMKKPLQLTTLVPLQEYEERLLKQTMLTGSYKEKLQSLFLKYDALWQHWENQVGHRRIKPHHIATGTVNPRPQKQYPINPKAKASIQTVINDLLKQGVLIQQNSIMNTPVYPVPKPDGKWRMVLDYREVNKTIPLIAAQNQHSAGILSSIFRGKYKTTLDLSNGFWAHSITPESYWLTAFTWLGQQYCWTRLPQGFLNSPALFNADVVDLLKEVPNVQVYVDDIYISHDDPREHLEQLEKVFSLLLNAGYVVSLKKSEIAQHEVEFLGFNITKEGRGLTETFKQKLLNITPPRDLKQLQSILGLLNFARNFIPNFSELVKPLYNIIATAPGKYITWTTDNSQQLQNIISMLNSAENLEERNPEVRLIMKVNTSPSAGYIRFYNEFAKRPIMYLNYVYTKAEVKFTNTEKLLTTIHKGLIKALDLGMGQEILVYSPIVSMTKIQKTPLPERKALPIRWITWMSYLEDPRIQFHYDKTLPELQQVPTVTDDIIAKIKHPSEFSMVFYTDGSAIKHPNVNKSHNAGMGIAQVQFKPEFTVINTWSIPLGDHTAQLAEVAAVEFACKKALKIDGPVLIVTDSFYVAESVNKELPYWQSNGFFNNKKKPLKHVSKWKSIADCIQLKPDIIIIHEKGHQPTASTFHTEGNNLADKLATQGSYVVNAGKRTADGSEFEKRTADGSEFESPKKKAKVE

SEQ ID NO: 543 - protein, 2087 aa, synthetic construct
MPAAKRVKLDGGDKKYSIGLDIGTNSVGWAVITDEYKVPSKKFKVLGNTDRHSIKKNLIGALLFDSGETAEATRLKRTARRRYTRRKNRICYLQEIFSNEMAKVDDSFFHRLEESFLVEEDKKHERHPIFGNIVDEVAYHEKYPTIYHLRKKLVDSTDKADLRLIYLALAHMIKFRGHFLIEGDLNPDNSDVDKLFIQLVQTYNQLFEENPINASGVDAKAILSARLSKSRRLENLIAQLPGEKKNGLFGNLIALSLGLTPNFKSNFDLAEDAKLQLSKDTYDDDLDNLLAQIGDQYADLFLAAKNLSDAILLSDILRVNTEITKAPLSASMIKRYDEHHQDLTLLKALVRQQLPEKYKEIFFDQSKNGYAGYIDGGASQEEFYKFIKPILEKMDGTEELLVKLNREDLLRKQRTFDNGSIPHQIHLGELHAILRRQEDFYPFLKDNREKIEKILTFRIPYYVGPLARGNSRFAWMTRKSEETITPWNFEEVVDKGASAQSFIERMTNFDKNLPNEKVLPKHSLLYEYFTVYNELTKVKYVTEGMRKPAFLSGEQKKAIVDLLFKTNRKVTVKQLKEDYFKKIECFDSVEISGVEDRFNASLGTYHDLLKIIKDKDFLDNEENEDILEDIVLTLTLFEDREMIEERLKTYAHLFDDKVMKQLKRRRYTGWGRLSRKLINGIRDKQSGKTILDFLKSDGFANRNFMQLIHDDSLTFKEDIQKAQVSGQGDSLHEHIANLAGSPAIKKGILQTVKVVDELVKVMGRHKPENIVIEMARENQTTQKGQKNSRERMKRIEEGIKELGSQILKEHPVENTQLQNEKLYLYYLQNGRDMYVDQELDINRLSDYDVDHIVPQSFLKDDSIDNKVLTRSDKARGKSDNVPSEEVVKKMKNYWRQLLNAKLITQRKFDNLTKAERGGLSELDKAGFIKRQLVETRQITKHVAQILDSRMNTKYDENDKLIREVKVITLKSKLVSDFRKDFQFYKVREINNYHHAHDAYLNAVVGTALIKKYPKLESEFVYGDYKVYDVRKMIAKSEQEIGKATAKYFFYSNIMNFFKTEITLANGEIRKRPLIETNGETGEIVWDKGRDFATVRKVLSMPQVNIVKKTEVQTGGFSKESILPKRNSDKLIARKKDWDPKKYGGFDSPTVAYSVLVVAKVEKGKSKKLKSVKELLGITIMERSSFEKNPIDFLEAKGYKEVKKDLIIKLPKYSLFELENGRKRMLASAGELQKGNELALPSKYVNFLYLASHYEKLKGSPEDNEQKQLFVEQHKHYLDEIIEQISEFSKRVILADANLDKVLSAYNKHRDKPIREQAENIIHLFTLTNLGAPAAFKYFDTTIDRKRYTSTKEVLDATLIHQSITGLYETRIDLSQLGGDGGGGSEAAAKGGGGGIPWLMKKPLQLTTLVPLQEYEERLLKQTMLTGSYKEKLQSLFLKYDALWQHWENQVGHRRIKPHHIATGTVNPRPQKQYPINPKAKASIQTVINDLLKQGVLIQQNSIMNTPVYPVPKPDGKWRMVLDYREVNKTIPLIAAQNQHSAGILSSIFRGKYKTTLDLSNGFWAHSITPESYWLTAFTWLGQQYCWTRLPQGFLNSPALFNADVVDLLKEVPNVQVYVDDIYISHDDPREHLEQLEKVFSLLLNAGYVVSLKKSEIAQHEVEFLGFNITKEGRGLTETFKQKLLNITPPRDLKQLQSILGLLNFARNFIPNFSELVKPLYNIIATAPGKYITWTTDNSQQLQNIISMLNSAENLEERNPEVRLIMKVNTSPSAGYIRFYNEFAKRPIMYLNYVYTKAEVKFTNTEKLLTTIHKGLIKALDLGMGQEILVYSPIVSMTKIQKTPLPERKALPIRWITWMSYLEDPRIQFHYDKTLPELQQVPTVTDDIIAKIKHPSEFSMVFYTDGSAIKHPNVNKSHNAGMGIAQVQFKPEFTVINTWSIPLGDHTAQLAEVAAVEFACKKALKIDGPVLIVTDSFYVAESVNKELPYWQSNGFFNNKKKPLKHVSKWKSIADCIQLKPDIIIIHEKGHQPTASTFHTEGNNLADKLATQGSYVVNAGKRTADGSEFEKRTADGSEFESPKKKAKVE

SEQ ID NO: 544 - protein, 2082 aa, synthetic construct
MPAAKRVKLDGGDKKYSIGLDIGTNSVGWAVITDEYKVPSKKFKVLGNTDRHSIKKNLIGALLFDSGETAEATRLKRTARRRYTRRKNRICYLQEIFSNEMAKVDDSFFHRLEESFLVEEDKKHERHPIFGNIVDEVAYHEKYPTIYHLRKKLVDSTDKADLRLIYLALAHMIKFRGHFLIEGDLNPDNSDVDKLFIQLVQTYNQLFEENPINASGVDAKAILSARLSKSRRLENLIAQLPGEKKNGLFGNLIALSLGLTPNFKSNFDLAEDAKLQLSKDTYDDDLDNLLAQIGDQYADLFLAAKNLSDAILLSDILRVNTEITKAPLSASMIKRYDEHHQDLTLLKALVRQQLPEKYKEIFFDQSKNGYAGYIDGGASQEEFYKFIKPILEKMDGTEELLVKLNREDLLRKQRTFDNGSIPHQIHLGELHAILRRQEDFYPFLKDNREKIEKILTFRIPYYVGPLARGNSRFAWMTRKSEETITPWNFEEVVDKGASAQSFIERMTNFDKNLPNEKVLPKHSLLYEYFTVYNELTKVKYVTEGMRKPAFLSGEQKKAIVDLLFKTNRKVTVKQLKEDYFKKIECFDSVEISGVEDRFNASLGTYHDLLKIIKDKDFLDNEENEDILEDIVLTLTLFEDREMIEERLKTYAHLFDDKVMKQLKRRRYTGWGRLSRKLINGIRDKQSGKTILDFLKSDGFANRNFMQLIHDDSLTFKEDIQKAQVSGQGDSLHEHIANLAGSPAIKKGILQTVKVVDELVKVMGRHKPENIVIEMARENQTTQKGQKNSRERMKRIEEGIKELGSQILKEHPVENTQLQNEKLYLYYLQNGRDMYVDQELDINRLSDYDVDHIVPQSFLKDDSIDNKVLTRSDKARGKSDNVPSEEVVKKMKNYWRQLLNAKLITQRKFDNLTKAERGGLSELDKAGFIKRQLVETRQITKHVAQILDSRMNTKYDENDKLIREVKVITLKSKLVSDFRKDFQFYKVREINNYHHAHDAYLNAVVGTALIKKYPKLESEFVYGDYKVYDVRKMIAKSEQEIGKATAKYFFYSNIMNFFKTEITLANGEIRKRPLIETNGETGEIVWDKGRDFATVRKVLSMPQVNIVKKTEVQTGGFSKESILPKRNSDKLIARKKDWDPKKYGGFDSPTVAYSVLVVAKVEKGKSKKLKSVKELLGITIMERSSFEKNPIDFLEAKGYKEVKKDLIIKLPKYSLFELENGRKRMLASAGELQKGNELALPSKYVNFLYLASHYEKLKGSPEDNEQKQLFVEQHKHYLDEIIEQISEFSKRVILADANLDKVLSAYNKHRDKPIREQAENIIHLFTLTNLGAPAAFKYFDTTIDRKRYTSTKEVLDATLIHQSITGLYETRIDLSQLGGDGGGSSGGGGGIPWLMKKPLQLTTLVPLQEYEERLLKQTMLTGSYKEKLQSLFLKYDALWQHWENQVGHRRIKPHHIATGTVNPRPQKQYPINPKAKASIQTVINDLLKQGVLIQQNSIMNTPVYPVPKPDGKWRMVLDYREVNKTIPLIAAQNQHSAGILSSIFRGKYKTTLDLSNGFWAHSITPESYWLTAFTWLGQQYCWTRLPQGFLNSPALFNADVVDLLKEVPNVQVYVDDIYISHDDPREHLEQLEKVFSLLLNAGYVVSLKKSEIAQHEVEFLGFNITKEGRGLTETFKQKLLNITPPRDLKQLQSILGLLNFARNFIPNFSELVKPLYNIIATAPGKYITWTTDNSQQLQNIISMLNSAENLEERNPEVRLIMKVNTSPSAGYIRFYNEFAKRPIMYLNYVYTKAEVKFTNTEKLLTTIHKGLIKALDLGMGQEILVYSPIVSMTKIQKTPLPERKALPIRWITWMSYLEDPRIQFHYDKTLPELQQVPTVTDDIIAKIKHPSEFSMVFYTDGSAIKHPNVNKSHNAGMGIAQVQFKPEFTVINTWSIPLGDHTAQLAEVAAVEFACKKALKIDGPVLIVTDSFYVAESVNKELPYWQSNGFFNNKKKPLKHVSKWKSIADCIQLKPDIIIIHEKGHQPTASTFHTEGNNLADKLATQGSYVVNAGKRTADGSEFEKRTADGSEFESPKKKAKVE

SEQ ID NO: 545 - protein, 2085 aa, synthetic construct
MPAAKRVKLDGGDKKYSIGLDIGTNSVGWAVITDEYKVPSKKFKVLGNTDRHSIKKNLIGALLFDSGETAEATRLKRTARRRYTRRKNRICYLQEIFSNEMAKVDDSFFHRLEESFLVEEDKKHERHPIFGNIVDEVAYHEKYPTIYHLRKKLVDSTDKADLRLIYLALAHMIKFRGHFLIEGDLNPDNSDVDKLFIQLVQTYNQLFEENPINASGVDAKAILSARLSKSRRLENLIAQLPGEKKNGLFGNLIALSLGLTPNFKSNFDLAEDAKLQLSKDTYDDDLDNLLAQIGDQYADLFLAAKNLSDAILLSDILRVNTEITKAPLSASMIKRYDEHHQDLTLLKALVRQQLPEKYKEIFFDQSKNGYAGYIDGGASQEEFYKFIKPILEKMDGTEELLVKLNREDLLRKQRTFDNGSIPHQIHLGELHAILRRQEDFYPFLKDNREKIEKILTFRIPYYVGPLARGNSRFAWMTRKSEETITPWNFEEVVDKGASAQSFIERMTNFDKNLPNEKVLPKHSLLYEYFTVYNELTKVKYVTEGMRKPAFLSGEQKKAIVDLLFKTNRKVTVKQLKEDYFKKIECFDSVEISGVEDRFNASLGTYHDLLKIIKDKDFLDNEENEDILEDIVLTLTLFEDREMIEERLKTYAHLFDDKVMKQLKRRRYTGWGRLSRKLINGIRDKQSGKTILDFLKSDGFANRNFMQLIHDDSLTFKEDIQKAQVSGQGDSLHEHIANLAGSPAIKKGILQTVKVVDELVKVMGRHKPENIVIEMARENQTTQKGQKNSRERMKRIEEGIKELGSQILKEHPVENTQLQNEKLYLYYLQNGRDMYVDQELDINRLSDYDVDHIVPQSFLKDDSIDNKVLTRSDKARGKSDNVPSEEVVKKMKNYWRQLLNAKLITQRKFDNLTKAERGGLSELDKAGFIKRQLVETRQITKHVAQILDSRMNTKYDENDKLIREVKVITLKSKLVSDFRKDFQFYKVREINNYHHAHDAYLNAVVGTALIKKYPKLESEFVYGDYKVYDVRKMIAKSEQEIGKATAKYFFYSNIMNFFKTEITLANGEIRKRPLIETNGETGEIVWDKGRDFATVRKVLSMPQVNIVKKTEVQTGGFSKESILPKRNSDKLIARKKDWDPKKYGGFDSPTVAYSVLVVAKVEKGKSKKLKSVKELLGITIMERSSFEKNPIDFLEAKGYKEVKKDLIIKLPKYSLFELENGRKRMLASAGELQKGNELALPSKYVNFLYLASHYEKLKGSPEDNEQKQLFVEQHKHYLDEIIEQISEFSKRVILADANLDKVLSAYNKHRDKPIREQAENIIHLFTLTNLGAPAAFKYFDTTIDRKRYTSTKEVLDATLIHQSITGLYETRIDLSQLGGDGGGSSGGSPAPGGIPWLMKKPLQLTTLVPLQEYEERLLKQTMLTGSYKEKLQSLFLKYDALWQHWENQVGHRRIKPHHIATGTVNPRPQKQYPINPKAKASIQTVINDLLKQGVLIQQNSIMNTPVYPVPKPDGKWRMVLDYREVNKTIPLIAAQNQHSAGILSSIFRGKYKTTLDLSNGFWAHSITPESYWLTAFTWLGQQYCWTRLPQGFLNSPALFNADVVDLLKEVPNVQVYVDDIYISHDDPREHLEQLEKVFSLLLNAGYVVSLKKSEIAQHEVEFLGFNITKEGRGLTETFKQKLLNITPPRDLKQLQSILGLLNFARNFIPNFSELVKPLYNIIATAPGKYITWTTDNSQQLQNIISMLNSAENLEERNPEVRLIMKVNTSPSAGYIRFYNEFAKRPIMYLNYVYTKAEVKFTNTEKLLTTIHKGLIKALDLGMGQEILVYSPIVSMTKIQKTPLPERKALPIRWITWMSYLEDPRIQFHYDKTLPELQQVPTVTDDIIAKIKHPSEFSMVFYTDGSAIKHPNVNKSHNAGMGIAQVQFKPEFTVINTWSIPLGDHTAQLAEVAAVEFACKKALKIDGPVLIVTDSFYVAESVNKELPYWQSNGFFNNKKKPLKHVSKWKSIADCIQLKPDIIIIHEKGHQPTASTFHTEGNNLADKLATQGSYVVNAGKRTADGSEFEKRTADGSEFESPKKKAKVE

SEQ ID NO: 546 - protein, 2085 aa, synthetic construct
MPAAKRVKLDGGDKKYSIGLDIGTNSVGWAVITDEYKVPSKKFKVLGNTDRHSIKKNLIGALLFDSGETAEATRLKRTARRRYTRRKNRICYLQEIFSNEMAKVDDSFFHRLEESFLVEEDKKHERHPIFGNIVDEVAYHEKYPTIYHLRKKLVDSTDKADLRLIYLALAHMIKFRGHFLIEGDLNPDNSDVDKLFIQLVQTYNQLFEENPINASGVDAKAILSARLSKSRRLENLIAQLPGEKKNGLFGNLIALSLGLTPNFKSNFDLAEDAKLQLSKDTYDDDLDNLLAQIGDQYADLFLAAKNLSDAILLSDILRVNTEITKAPLSASMIKRYDEHHQDLTLLKALVRQQLPEKYKEIFFDQSKNGYAGYIDGGASQEEFYKFIKPILEKMDGTEELLVKLNREDLLRKQRTFDNGSIPHQIHLGELHAILRRQEDFYPFLKDNREKIEKILTFRIPYYVGPLARGNSRFAWMTRKSEETITPWNFEEVVDKGASAQSFIERMTNFDKNLPNEKVLPKHSLLYEYFTVYNELTKVKYVTEGMRKPAFLSGEQKKAIVDLLFKTNRKVTVKQLKEDYFKKIECFDSVEISGVEDRFNASLGTYHDLLKIIKDKDFLDNEENEDILEDIVLTLTLFEDREMIEERLKTYAHLFDDKVMKQLKRRRYTGWGRLSRKLINGIRDKQSGKTILDFLKSDGFANRNFMQLIHDDSLTFKEDIQKAQVSGQGDSLHEHIANLAGSPAIKKGILQTVKVVDELVKVMGRHKPENIVIEMARENQTTQKGQKNSRERMKRIEEGIKELGSQILKEHPVENTQLQNEKLYLYYLQNGRDMYVDQELDINRLSDYDVDHIVPQSFLKDDSIDNKVLTRSDKARGKSDNVPSEEVVKKMKNYWRQLLNAKLITQRKFDNLTKAERGGLSELDKAGFIKRQLVETRQITKHVAQILDSRMNTKYDENDKLIREVKVITLKSKLVSDFRKDFQFYKVREINNYHHAHDAYLNAVVGTALIKKYPKLESEFVYGDYKVYDVRKMIAKSEQEIGKATAKYFFYSNIMNFFKTEITLANGEIRKRPLIETNGETGEIVWDKGRDFATVRKVLSMPQVNIVKKTEVQTGGFSKESILPKRNSDKLIARKKDWDPKKYGGFDSPTVAYSVLVVAKVEKGKSKKLKSVKELLGITIMERSSFEKNPIDFLEAKGYKEVKKDLIIKLPKYSLFELENGRKRMLASAGELQKGNELALPSKYVNFLYLASHYEKLKGSPEDNEQKQLFVEQHKHYLDEIIEQISEFSKRVILADANLDKVLSAYNKHRDKPIREQAENIIHLFTLTNLGAPAAFKYFDTTIDRKRYTSTKEVLDATLIHQSITGLYETRIDLSQLGGDGGPAPGSSGGGGGIPWLMKKPLQLTTLVPLQEYEERLLKQTMLTGSYKEKLQSLFLKYDALWQHWENQVGHRRIKPHHIATGTVNPRPQKQYPINPKAKASIQTVINDLLKQGVLIQQNSIMNTPVYPVPKPDGKWRMVLDYREVNKTIPLIAAQNQHSAGILSSIFRGKYKTTLDLSNGFWAHSITPESYWLTAFTWLGQQYCWTRLPQGFLNSPALFNADVVDLLKEVPNVQVYVDDIYISHDDPREHLEQLEKVFSLLLNAGYVVSLKKSEIAQHEVEFLGFNITKEGRGLTETFKQKLLNITPPRDLKQLQSILGLLNFARNFIPNFSELVKPLYNIIATAPGKYITWTTDNSQQLQNIISMLNSAENLEERNPEVRLIMKVNTSPSAGYIRFYNEFAKRPIMYLNYVYTKAEVKFTNTEKLLTTIHKGLIKALDLGMGQEILVYSPIVSMTKIQKTPLPERKALPIRWITWMSYLEDPRIQFHYDKTLPELQQVPTVTDDIIAKIKHPSEFSMVFYTDGSAIKHPNVNKSHNAGMGIAQVQFKPEFTVINTWSIPLGDHTAQLAEVAAVEFACKKALKIDGPVLIVTDSFYVAESVNKELPYWQSNGFFNNKKKPLKHVSKWKSIADCIQLKPDIIIIHEKGHQPTASTFHTEGNNLADKLATQGSYVVNAGKRTADGSEFEKRTADGSEFESPKKKAKVE

SEQ ID NO: 547 - protein, 2085 aa, synthetic construct
MPAAKRVKLDGGDKKYSIGLDIGTNSVGWAVITDEYKVPSKKFKVLGNTDRHSIKKNLIGALLFDSGETAEATRLKRTARRRYTRRKNRICYLQEIFSNEMAKVDDSFFHRLEESFLVEEDKKHERHPIFGNIVDEVAYHEKYPTIYHLRKKLVDSTDKADLRLIYLALAHMIKFRGHFLIEGDLNPDNSDVDKLFIQLVQTYNQLFEENPINASGVDAKAILSARLSKSRRLENLIAQLPGEKKNGLFGNLIALSLGLTPNFKSNFDLAEDAKLQLSKDTYDDDLDNLLAQIGDQYADLFLAAKNLSDAILLSDILRVNTEITKAPLSASMIKRYDEHHQDLTLLKALVRQQLPEKYKEIFFDQSKNGYAGYIDGGASQEEFYKFIKPILEKMDGTEELLVKLNREDLLRKQRTFDNGSIPHQIHLGELHAILRRQEDFYPFLKDNREKIEKILTFRIPYYVGPLARGNSRFAWMTRKSEETITPWNFEEVVDKGASAQSFIERMTNFDKNLPNEKVLPKHSLLYEYFTVYNELTKVKYVTEGMRKPAFLSGEQKKAIVDLLFKTNRKVTVKQLKEDYFKKIECFDSVEISGVEDRFNASLGTYHDLLKIIKDKDFLDNEENEDILEDIVLTLTLFEDREMIEERLKTYAHLFDDKVMKQLKRRRYTGWGRLSRKLINGIRDKQSGKTILDFLKSDGFANRNFMQLIHDDSLTFKEDIQKAQVSGQGDSLHEHIANLAGSPAIKKGILQTVKVVDELVKVMGRHKPENIVIEMARENQTTQKGQKNSRERMKRIEEGIKELGSQILKEHPVENTQLQNEKLYLYYLQNGRDMYVDQELDINRLSDYDVDHIVPQSFLKDDSIDNKVLTRSDKARGKSDNVPSEEVVKKMKNYWRQLLNAKLITQRKFDNLTKAERGGLSELDKAGFIKRQLVETRQITKHVAQILDSRMNTKYDENDKLIREVKVITLKSKLVSDFRKDFQFYKVREINNYHHAHDAYLNAVVGTALIKKYPKLESEFVYGDYKVYDVRKMIAKSEQEIGKATAKYFFYSNIMNFFKTEITLANGEIRKRPLIETNGETGEIVWDKGRDFATVRKVLSMPQVNIVKKTEVQTGGFSKESILPKRNSDKLIARKKDWDPKKYGGFDSPTVAYSVLVVAKVEKGKSKKLKSVKELLGITIMERSSFEKNPIDFLEAKGYKEVKKDLIIKLPKYSLFELENGRKRMLASAGELQKGNELALPSKYVNFLYLASHYEKLKGSPEDNEQKQLFVEQHKHYLDEIIEQISEFSKRVILADANLDKVLSAYNKHRDKPIREQAENIIHLFTLTNLGAPAAFKYFDTTIDRKRYTSTKEVLDATLIHQSITGLYETRIDLSQLGGDGGGSSGGGPAPGGIPWLMKKPLQLTTLVPLQEYEERLLKQTMLTGSYKEKLQSLFLKYDALWQHWENQVGHRRIKPHHIATGTVNPRPQKQYPINPKAKASIQTVINDLLKQGVLIQQNSIMNTPVYPVPKPDGKWRMVLDYREVNKTIPLIAAQNQHSAGILSSIFRGKYKTTLDLSNGFWAHSITPESYWLTAFTWLGQQYCWTRLPQGFLNSPALFNADVVDLLKEVPNVQVYVDDIYISHDDPREHLEQLEKVFSLLLNAGYVVSLKKSEIAQHEVEFLGFNITKEGRGLTETFKQKLLNITPPRDLKQLQSILGLLNFARNFIPNFSELVKPLYNIIATAPGKYITWTTDNSQQLQNIISMLNSAENLEERNPEVRLIMKVNTSPSAGYIRFYNEFAKRPIMYLNYVYTKAEVKFTNTEKLLTTIHKGLIKALDLGMGQEILVYSPIVSMTKIQKTPLPERKALPIRWITWMSYLEDPRIQFHYDKTLPELQQVPTVTDDIIAKIKHPSEFSMVFYTDGSAIKHPNVNKSHNAGMGIAQVQFKPEFTVINTWSIPLGDHTAQLAEVAAVEFACKKALKIDGPVLIVTDSFYVAESVNKELPYWQSNGFFNNKKKPLKHVSKWKSIADCIQLKPDIIIIHEKGHQPTASTFHTEGNNLADKLATQGSYVVNAGKRTADGSEFEKRTADGSEFESPKKKAKVE

SEQ ID NO: 548 - protein, 2087 aa, synthetic construct
MPAAKRVKLDGGDKKYSIGLDIGTNSVGWAVITDEYKVPSKKFKVLGNTDRHSIKKNLIGALLFDSGETAEATRLKRTARRRYTRRKNRICYLQEIFSNEMAKVDDSFFHRLEESFLVEEDKKHERHPIFGNIVDEVAYHEKYPTIYHLRKKLVDSTDKADLRLIYLALAHMIKFRGHFLIEGDLNPDNSDVDKLFIQLVQTYNQLFEENPINASGVDAKAILSARLSKSRRLENLIAQLPGEKKNGLFGNLIALSLGLTPNFKSNFDLAEDAKLQLSKDTYDDDLDNLLAQIGDQYADLFLAAKNLSDAILLSDILRVNTEITKAPLSASMIKRYDEHHQDLTLLKALVRQQLPEKYKEIFFDQSKNGYAGYIDGGASQEEFYKFIKPILEKMDGTEELLVKLNREDLLRKQRTFDNGSIPHQIHLGELHAILRRQEDFYPFLKDNREKIEKILTFRIPYYVGPLARGNSRFAWMTRKSEETITPWNFEEVVDKGASAQSFIERMTNFDKNLPNEKVLPKHSLLYEYFTVYNELTKVKYVTEGMRKPAFLSGEQKKAIVDLLFKTNRKVTVKQLKEDYFKKIECFDSVEISGVEDRFNASLGTYHDLLKIIKDKDFLDNEENEDILEDIVLTLTLFEDREMIEERLKTYAHLFDDKVMKQLKRRRYTGWGRLSRKLINGIRDKQSGKTILDFLKSDGFANRNFMQLIHDDSLTFKEDIQKAQVSGQGDSLHEHIANLAGSPAIKKGILQTVKVVDELVKVMGRHKPENIVIEMARENQTTQKGQKNSRERMKRIEEGIKELGSQILKEHPVENTQLQNEKLYLYYLQNGRDMYVDQELDINRLSDYDVDHIVPQSFLKDDSIDNKVLTRSDKARGKSDNVPSEEVVKKMKNYWRQLLNAKLITQRKFDNLTKAERGGLSELDKAGFIKRQLVETRQITKHVAQILDSRMNTKYDENDKLIREVKVITLKSKLVSDFRKDFQFYKVREINNYHHAHDAYLNAVVGTALIKKYPKLESEFVYGDYKVYDVRKMIAKSEQEIGKATAKYFFYSNIMNFFKTEITLANGEIRKRPLIETNGETGEIVWDKGRDFATVRKVLSMPQVNIVKKTEVQTGGFSKESILPKRNSDKLIARKKDWDPKKYGGFDSPTVAYSVLVVAKVEKGKSKKLKSVKELLGITIMERSSFEKNPIDFLEAKGYKEVKKDLIIKLPKYSLFELENGRKRMLASAGELQKGNELALPSKYVNFLYLASHYEKLKGSPEDNEQKQLFVEQHKHYLDEIIEQISEFSKRVILADANLDKVLSAYNKHRDKPIREQAENIIHLFTLTNLGAPAAFKYFDTTIDRKRYTSTKEVLDATLIHQSITGLYETRIDLSQLGGDGGGGSEAAAKPAPGGIPWLMKKPLQLTTLVPLQEYEERLLKQTMLTGSYKEKLQSLFLKYDALWQHWENQVGHRRIKPHHIATGTVNPRPQKQYPINPKAKASIQTVINDLLKQGVLIQQNSIMNTPVYPVPKPDGKWRMVLDYREVNKTIPLIAAQNQHSAGILSSIFRGKYKTTLDLSNGFWAHSITPESYWLTAFTWLGQQYCWTRLPQGFLNSPALFNADVVDLLKEVPNVQVYVDDIYISHDDPREHLEQLEKVFSLLLNAGYVVSLKKSEIAQHEVEFLGFNITKEGRGLTETFKQKLLNITPPRDLKQLQSILGLLNFARNFIPNFSELVKPLYNIIATAPGKYITWTTDNSQQLQNIISMLNSAENLEERNPEVRLIMKVNTSPSAGYIRFYNEFAKRPIMYLNYVYTKAEVKFTNTEKLLTTIHKGLIKALDLGMGQEILVYSPIVSMTKIQKTPLPERKALPIRWITWMSYLEDPRIQFHYDKTLPELQQVPTVTDDIIAKIKHPSEFSMVFYTDGSAIKHPNVNKSHNAGMGIAQVQFKPEFTVINTWSIPLGDHTAQLAEVAAVEFACKKALKIDGPVLIVTDSFYVAESVNKELPYWQSNGFFNNKKKPLKHVSKWKSIADCIQLKPDIIIIHEKGHQPTASTFHTEGNNLADKLATQGSYVVNAGKRTADGSEFEKRTADGSEFESPKKKAKVE

SEQ ID NO: 549 - protein, 2087 aa, synthetic construct
MPAAKRVKLDGGDKKYSIGLDIGTNSVGWAVITDEYKVPSKKFKVLGNTDRHSIKKNLIGALLFDSGETAEATRLKRTARRRYTRRKNRICYLQEIFSNEMAKVDDSFFHRLEESFLVEEDKKHERHPIFGNIVDEVAYHEKYPTIYHLRKKLVDSTDKADLRLIYLALAHMIKFRGHFLIEGDLNPDNSDVDKLFIQLVQTYNQLFEENPINASGVDAKAILSARLSKSRRLENLIAQLPGEKKNGLFGNLIALSLGLTPNFKSNFDLAEDAKLQLSKDTYDDDLDNLLAQIGDQYADLFLAAKNLSDAILLSDILRVNTEITKAPLSASMIKRYDEHHQDLTLLKALVRQQLPEKYKEIFFDQSKNGYAGYIDGGASQEEFYKFIKPILEKMDGTEELLVKLNREDLLRKQRTFDNGSIPHQIHLGELHAILRRQEDFYPFLKDNREKIEKILTFRIPYYVGPLARGNSRFAWMTRKSEETITPWNFEEVVDKGASAQSFIERMTNFDKNLPNEKVLPKHSLLYEYFTVYNELTKVKYVTEGMRKPAFLSGEQKKAIVDLLFKTNRKVTVKQLKEDYFKKIECFDSVEISGVEDRFNASLGTYHDLLKIIKDKDFLDNEENEDILEDIVLTLTLFEDREMIEERLKTYAHLFDDKVMKQLKRRRYTGWGRLSRKLINGIRDKQSGKTILDFLKSDGFANRNFMQLIHDDSLTFKEDIQKAQVSGQGDSLHEHIANLAGSPAIKKGILQTVKVVDELVKVMGRHKPENIVIEMARENQTTQKGQKNSRERMKRIEEGIKELGSQILKEHPVENTQLQNEKLYLYYLQNGRDMYVDQELDINRLSDYDVDHIVPQSFLKDDSIDNKVLTRSDKARGKSDNVPSEEVVKKMKNYWRQLLNAKLITQRKFDNLTKAERGGLSELDKAGFIKRQLVETRQITKHVAQILDSRMNTKYDENDKLIREVKVITLKSKLVSDFRKDFQFYKVREINNYHHAHDAYLNAVVGTALIKKYPKLESEFVYGDYKVYDVRKMIAKSEQEIGKATAKYFFYSNIMNFFKTEITLANGEIRKRPLIETNGETGEIVWDKGRDFATVRKVLSMPQVNIVKKTEVQTGGFSKESILPKRNSDKLIARKKDWDPKKYGGFDSPTVAYSVLVVAKVEKGKSKKLKSVKELLGITIMERSSFEKNPIDFLEAKGYKEVKKDLIIKLPKYSLFELENGRKRMLASAGELQKGNELALPSKYVNFLYLASHYEKLKGSPEDNEQKQLFVEQHKHYLDEIIEQISEFSKRVILADANLDKVLSAYNKHRDKPIREQAENIIHLFTLTNLGAPAAFKYFDTTIDRKRYTSTKEVLDATLIHQSITGLYETRIDLSQLGGDGGGGGPAPEAAAKGGIPWLMKKPLQLTTLVPLQEYEERLLKQTMLTGSYKEKLQSLFLKYDALWQHWENQVGHRRIKPHHIATGTVNPRPQKQYPINPKAKASIQTVINDLLKQGVLIQQNSIMNTPVYPVPKPDGKWRMVLDYREVNKTIPLIAAQNQHSAGILSSIFRGKYKTTLDLSNGFWAHSITPESYWLTAFTWLGQQYCWTRLPQGFLNSPALFNADVVDLLKEVPNVQVYVDDIYISHDDPREHLEQLEKVFSLLLNAGYVVSLKKSEIAQHEVEFLGFNITKEGRGLTETFKQKLLNITPPRDLKQLQSILGLLNFARNFIPNFSELVKPLYNIIATAPGKYITWTTDNSQQLQNIISMLNSAENLEERNPEVRLIMKVNTSPSAGYIRFYNEFAKRPIMYLNYVYTKAEVKFTNTEKLLTTIHKGLIKALDLGMGQEILVYSPIVSMTKIQKTPLPERKALPIRWITWMSYLEDPRIQFHYDKTLPELQQVPTVTDDIIAKIKHPSEFSMVFYTDGSAIKHPNVNKSHNAGMGIAQVQFKPEFTVINTWSIPLGDHTAQLAEVAAVEFACKKALKIDGPVLIVTDSFYVAESVNKELPYWQSNGFFNNKKKPLKHVSKWKSIADCIQLKPDIIIIHEKGHQPTASTFHTEGNNLADKLATQGSYVVNAGKRTADGSEFEKRTADGSEFESPKKKAKVE

SEQ ID NO: 550 - protein, 2106 aa, synthetic construct
MPAAKRVKLDGGDKKYSIGLDIGTNSVGWAVITDEYKVPSKKFKVLGNTDRHSIKKNLIGALLFDSGETAEATRLKRTARRRYTRRKNRICYLQEIFSNEMAKVDDSFFHRLEESFLVEEDKKHERHPIFGNIVDEVAYHEKYPTIYHLRKKLVDSTDKADLRLIYLALAHMIKFRGHFLIEGDLNPDNSDVDKLFIQLVQTYNQLFEENPINASGVDAKAILSARLSKSRRLENLIAQLPGEKKNGLFGNLIALSLGLTPNFKSNFDLAEDAKLQLSKDTYDDDLDNLLAQIGDQYADLFLAAKNLSDAILLSDILRVNTEITKAPLSASMIKRYDEHHQDLTLLKALVRQQLPEKYKEIFFDQSKNGYAGYIDGGASQEEFYKFIKPILEKMDGTEELLVKLNREDLLRKQRTFDNGSIPHQIHLGELHAILRRQEDFYPFLKDNREKIEKILTFRIPYYVGPLARGNSRFAWMTRKSEETITPWNFEEVVDKGASAQSFIERMTNFDKNLPNEKVLPKHSLLYEYFTVYNELTKVKYVTEGMRKPAFLSGEQKKAIVDLLFKTNRKVTVKQLKEDYFKKIECFDSVEISGVEDRFNASLGTYHDLLKIIKDKDFLDNEENEDILEDIVLTLTLFEDREMIEERLKTYAHLFDDKVMKQLKRRRYTGWGRLSRKLINGIRDKQSGKTILDFLKSDGFANRNFMQLIHDDSLTFKEDIQKAQVSGQGDSLHEHIANLAGSPAIKKGILQTVKVVDELVKVMGRHKPENIVIEMARENQTTQKGQKNSRERMKRIEEGIKELGSQILKEHPVENTQLQNEKLYLYYLQNGRDMYVDQELDINRLSDYDVDHIVPQSFLKDDSIDNKVLTRSDKARGKSDNVPSEEVVKKMKNYWRQLLNAKLITQRKFDNLTKAERGGLSELDKAGFIKRQLVETRQITKHVAQILDSRMNTKYDENDKLIREVKVITLKSKLVSDFRKDFQFYKVREINNYHHAHDAYLNAVVGTALIKKYPKLESEFVYGDYKVYDVRKMIAKSEQEIGKATAKYFFYSNIMNFFKTEITLANGEIRKRPLIETNGETGEIVWDKGRDFATVRKVLSMPQVNIVKKTEVQTGGFSKESILPKRNSDKLIARKKDWDPKKYGGFDSPTVAYSVLVVAKVEKGKSKKLKSVKELLGITIMERSSFEKNPIDFLEAKGYKEVKKDLIIKLPKYSLFELENGRKRMLASAGELQKGNELALPSKYVNFLYLASHYEKLKGSPEDNEQKQLFVEQHKHYLDEIIEQISEFSKRVILADANLDKVLSAYNKHRDKPIREQAENIIHLFTLTNLGAPAAFKYFDTTIDRKRYTSTKEVLDATLIHQSITGLYETRIDLSQLGGDGGEAAAKEAAAKEAAAKEAAAKEAAAKEAAAKGGIPWLMKKPLQLTTLVPLQEYEERLLKQTMLTGSYKEKLQSLFLKYDALWQHWENQVGHRRIKPHHIATGTVNPRPQKQYPINPKAKASIQTVINDLLKQGVLIQQNSIMNTPVYPVPKPDGKWRMVLDYREVNKTIPLIAAQNQHSAGILSSIFRGKYKTTLDLSNGFWAHSITPESYWLTAFTWLGQQYCWTRLPQGFLNSPALFNADVVDLLKEVPNVQVYVDDIYISHDDPREHLEQLEKVFSLLLNAGYVVSLKKSEIAQHEVEFLGFNITKEGRGLTETFKQKLLNITPPRDLKQLQSILGKLNFARNFIPNFSELVKPLYNIIATAPGKYITWTTDNSQQLQNIISMLNSAENLEERNPEVRLIMKVNTSPSAGYIRFYNEFAKRPIMYLNYVYTKAEVKFTNTEKLLTTIHKGLIKALDLGMGQEILVYSPIVSMTKIQKTPLPERKALPIRWITWMSYLEDPRIQFHYDKTLPELQQVPTVTDDIIAKIKHPSEFSMVFYTDGSAIKHPNVNKSHNAGMGIAQVQFKPEFTVINTWSIPLGDHTAQLAEVAAVEFACKKALKIDGPVLIVTDSFYVAESVNKELPYWQSNGFFNNKKKPLKHVSKWKSIADCIQLKPDIIIIHEKGHQPTASTFHTEGNNLADKLATQGSYVVNAGKRTADGSEFEKRTADGSEFESPKKKAKVE

SEQ ID NO: 551 - protein, 2079 aa, synthetic construct
MPAAKRVKLDGGDKKYSIGLDIGTNSVGWAVITDEYKVPSKKFKVLGNTDRHSIKKNLIGALLFDSGETAEATRLKRTARRRYTRRKNRICYLQEIFSNEMAKVDDSFFHRLEESFLVEEDKKHERHPIFGNIVDEVAYHEKYPTIYHLRKKLVDSTDKADLRLIYLALAHMIKFRGHFLIEGDLNPDNSDVDKLFIQLVQTYNQLFEENPINASGVDAKAILSARLSKSRRLENLIAQLPGEKKNGLFGNLIALSLGLTPNFKSNFDLAEDAKLQLSKDTYDDDLDNLLAQIGDQYADLFLAAKNLSDAILLSDILRVNTEITKAPLSASMIKRYDEHHQDLTLLKALVRQQLPEKYKEIFFDQSKNGYAGYIDGGASQEEFYKFIKPILEKMDGTEELLVKLNREDLLRKQRTFDNGSIPHQIHLGELHAILRRQEDFYPFLKDNREKIEKILTFRIPYYVGPLARGNSRFAWMTRKSEETITPWNFEEVVDKGASAQSFIERMTNFDKNLPNEKVLPKHSLLYEYFTVYNELTKVKYVTEGMRKPAFLSGEQKKAIVDLLFKTNRKVTVKQLKEDYFKKIECFDSVEISGVEDRFNASLGTYHDLLKIIKDKDFLDNEENEDILEDIVLTLTLFEDREMIEERLKTYAHLFDDKVMKQLKRRRYTGWGRLSRKLINGIRDKQSGKTILDFLKSDGFANRNFMQLIHDDSLTFKEDIQKAQVSGQGDSLHEHIANLAGSPAIKKGILQTVKVVDELVKVMGRHKPENIVIEMARENQTTQKGQKNSRERMKRIEEGIKELGSQILKEHPVENTQLQNEKLYLYYLQNGRDMYVDQELDINRLSDYDVDHIVPQSFLKDDSIDNKVLTRSDKARGKSDNVPSEEVVKKMKNYWRQLLNAKLITQRKFDNLTKAERGGLSELDKAGFIKRQLVETRQITKHVAQILDSRMNTKYDENDKLIREVKVITLKSKLVSDFRKDFQFYKVREINNYHHAHDAYLNAVVGTALIKKYPKLESEFVYGDYKVYDVRKMIAKSEQEIGKATAKYFFYSNIMNFFKTEITLANGEIRKRPLIETNGETGEIVWDKGRDFATVRKVLSMPQVNIVKKTEVQTGGFSKESILPKRNSDKLIARKKDWDPKKYGGFDSPTVAYSVLVVAKVEKGKSKKLKSVKELLGITIMERSSFEKNPIDFLEAKGYKEVKKDLIIKLPKYSLFELENGRKRMLASAGELQKGNELALPSKYVNFLYLASHYEKLKGSPEDNEQKQLFVEQHKHYLDEIIEQISEFSKRVILADANLDKVLSAYNKHRDKPIREQAENIIHLFTLTNLGAPAAFKYFDTTIDRKRYTSTKEVLDATLIHQSITGLYETRIDLSQLGGDGGGSSGGIPWLMKKPLQLTTLVPLQEYEERLLKQTMLTGSYKEKLQSLFLKYDALWQHWENQVGHRRIKPHHIATGTVNPRPQKQYPINPKAKASIQTVINDLLKQGVLIQQNSIMNTPVYPVPKPDGKWRMVLDYREVNKTIPLIAAQNQHSAGILSSIFRGKYKTTLDLSNGFWAHSITPESYWLTAFTWLGQQYCWTRLPQGFLNSPALFNADVVDLLKEVPNVQVYVDDIYISHDDPREHLEQLEKVFSLLLNAGYVVSLKKSEIAQHEVEFLGFNITKEGRGLTETFKQKLLNITPPRDLKQLQSILGKLNFARNFIPNFSELVKPLYNIIATAPGKYITWTTDNSQQLQNIISMLNSAENLEERNPEVRLIMKVNTSPSAGYIRFYNEFAKRPIMYLNYVYTKAEVKFTNTEKLLTTIHKGLIKALDLGMGQEILVYSPIVSMTKIQKTPLPERKALPIRWITWMSYLEDPRIQFHYDKTLPELQQVPTVTDDIIAKIKHPSEFSMVFYTDGSAIKHPNVNKSHNAGMGIAQVQFKPEFTVINTWSIPLGDHTAQLAEVAAVEFACKKALKIDGPVLIVTDSFYVAESVNKELPYWQSNGFFNNKKKPLKHVSKWKSIADCIQLKPDIIIIHEKGHQPTASTFHTEGNNLADKLATQGSYVVNAGKRTADGSEFEKRTADGSEFESPKKKAKVE

SEQ ID NO: 552 - protein, 2079 aa, synthetic construct
MPAAKRVKLDGGDKKYSIGLDIGTNSVGWAVITDEYKVPSKKFKVLGNTDRHSIKKNLIGALLFDSGETAEATRLKRTARRRYTRRKNRICYLQEIFSNEMAKVDDSFFHRLEESFLVEEDKKHERHPIFGNIVDEVAYHEKYPTIYHLRKKLVDSTDKADLRLIYLALAHMIKFRGHFLIEGDLNPDNSDVDKLFIQLVQTYNQLFEENPINASGVDAKAILSARLSKSRRLENLIAQLPGEKKNGLFGNLIALSLGLTPNFKSNFDLAEDAKLQLSKDTYDDDLDNLLAQIGDQYADLFLAAKNLSDAILLSDILRVNTEITKAPLSASMIKRYDEHHQDLTLLKALVRQQLPEKYKEIFFDQSKNGYAGYIDGGASQEEFYKFIKPILEKMDGTEELLVKLNREDLLRKQRTFDNGSIPHQIHLGELHAILRRQEDFYPFLKDNREKIEKILTFRIPYYVGPLARGNSRFAWMTRKSEETITPWNFEEVVDKGASAQSFIERMTNFDKNLPNEKVLPKHSLLYEYFTVYNELTKVKYVTEGMRKPAFLSGEQKKAIVDLLFKTNRKVTVKQLKEDYFKKIECFDSVEISGVEDRFNASLGTYHDLLKIIKDKDFLDNEENEDILEDIVLTLTLFEDREMIEERLKTYAHLFDDKVMKQLKRRRYTGWGRLSRKLINGIRDKQSGKTILDFLKSDGFANRNFMQLIHDDSLTFKEDIQKAQVSGQGDSLHEHIANLAGSPAIKKGILQTVKVVDELVKVMGRHKPENIVIEMARENQTTQKGQKNSRERMKRIEEGIKELGSQILKEHPVENTQLQNEKLYLYYLQNGRDMYVDQELDINRLSDYDVDHIVPQSFLKDDSIDNKVLTRSDKARGKSDNVPSEEVVKKMKNYWRQLLNAKLITQRKFDNLTKAERGGLSELDKAGFIKRQLVETRQITKHVAQILDSRMNTKYDENDKLIREVKVITLKSKLVSDFRKDFQFYKVREINNYHHAHDAYLNAVVGTALIKKYPKLESEFVYGDYKVYDVRKMIAKSEQEIGKATAKYFFYSNIMNFFKTEITLANGEIRKRPLIETNGETGEIVWDKGRDFATVRKVLSMPQVNIVKKTEVQTGGFSKESILPKRNSDKLIARKKDWDPKKYGGFDSPTVAYSVLVVAKVEKGKSKKLKSVKELLGITIMERSSFEKNPIDFLEAKGYKEVKKDLIIKLPKYSLFELENGRKRMLASAGELQKGNELALPSKYVNFLYLASHYEKLKGSPEDNEQKQLFVEQHKHYLDEIIEQISEFSKRVILADANLDKVLSAYNKHRDKPIREQAENIIHLFTLTNLGAPAAFKYFDTTIDRKRYTSTKEVLDATLIHQSITGLYETRIDLSQLGGDGGGGSGGIPWLMKKPLQLTTLVPLQEYEERLLKQTMLTGSYKEKLQSLFLKYDALWQHWENQVGHRRIKPHHIATGTVNPRPQKQYPINPKAKASIQTVINDLLKQGVLIQQNSIMNTPVYPVPKPDGKWRMVLDYREVNKTIPLIAAQNQHSAGILSSIFRGKYKTTLDLSNGFWAHSITPESYWLTAFTWLGQQYCWTRLPQGFLNSPALFNADVVDLLKEVPNVQVYVDDIYISHDDPREHLEQLEKVFSLLLNAGYVVSLKKSEIAQHEVEFLGFNITKEGRGLTETFKQKLLNITPPRDLKQLQSILGKLNFARNFIPNFSELVKPLYNIIATAPGKYITWTTDNSQQLQNIISMLNSAENLEERNPEVRLIMKVNTSPSAGYIRFYNEFAKRPIMYLNYVYTKAEVKFTNTEKLLTTIHKGLIKALDLGMGQEILVYSPIVSMTKIQKTPLPERKALPIRWITWMSYLEDPRIQFHYDKTLPELQQVPTVTDDIIAKIKHPSEFSMVFYTDGSAIKHPNVNKSHNAGMGIAQVQFKPEFTVINTWSIPLGDHTAQLAEVAAVEFACKKALKIDGPVLIVTDSFYVAESVNKELPYWQSNGFFNNKKKPLKHVSKWKSIADCIQLKPDIIIIHEKGHQPTASTFHTEGNNLADKLATQGSYVVNAGKRTADGSEFEKRTADGSEFESPKKKAKVE

SEQ ID NO: 553 - protein, 2087 aa, synthetic construct
MPAAKRVKLDGGDKKYSIGLDIGTNSVGWAVITDEYKVPSKKFKVLGNTDRHSIKKNLIGALLFDSGETAEATRLKRTARRRYTRRKNRICYLQEIFSNEMAKVDDSFFHRLEESFLVEEDKKHERHPIFGNIVDEVAYHEKYPTIYHLRKKLVDSTDKADLRLIYLALAHMIKFRGHFLIEGDLNPDNSDVDKLFIQLVQTYNQLFEENPINASGVDAKAILSARLSKSRRLENLIAQLPGEKKNGLFGNLIALSLGLTPNFKSNFDLAEDAKLQLSKDTYDDDLDNLLAQIGDQYADLFLAAKNLSDAILLSDILRVNTEITKAPLSASMIKRYDEHHQDLTLLKALVRQQLPEKYKEIFFDQSKNGYAGYIDGGASQEEFYKFIKPILEKMDGTEELLVKLNREDLLRKQRTFDNGSIPHQIHLGELHAILRRQEDFYPFLKDNREKIEKILTFRIPYYVGPLARGNSRFAWMTRKSEETITPWNFEEVVDKGASAQSFIERMTNFDKNLPNEKVLPKHSLLYEYFTVYNELTKVKYVTEGMRKPAFLSGEQKKAIVDLLFKTNRKVTVKQLKEDYFKKIECFDSVEISGVEDRFNASLGTYHDLLKIIKDKDFLDNEENEDILEDIVLTLTLFEDREMIEERLKTYAHLFDDKVMKQLKRRRYTGWGRLSRKLINGIRDKQSGKTILDFLKSDGFANRNFMQLIHDDSLTFKEDIQKAQVSGQGDSLHEHIANLAGSPAIKKGILQTVKVVDELVKVMGRHKPENIVIEMARENQTTQKGQKNSRERMKRIEEGIKELGSQILKEHPVENTQLQNEKLYLYYLQNGRDMYVDQELDINRLSDYDVDHIVPQSFLKDDSIDNKVLTRSDKARGKSDNVPSEEVVKKMKNYWRQLLNAKLITQRKFDNLTKAERGGLSELDKAGFIKRQLVETRQITKHVAQILDSRMNTKYDENDKLIREVKVITLKSKLVSDFRKDFQFYKVREINNYHHAHDAYLNAVVGTALIKKYPKLESEFVYGDYKVYDVRKMIAKSEQEIGKATAKYFFYSNIMNFFKTEITLANGEIRKRPLIETNGETGEIVWDKGRDFATVRKVLSMPQVNIVKKTEVQTGGFSKESILPKRNSDKLIARKKDWDPKKYGGFDSPTVAYSVLVVAKVEKGKSKKLKSVKELLGITIMERSSFEKNPIDFLEAKGYKEVKKDLIIKLPKYSLFELENGRKRMLASAGELQKGNELALPSKYVNFLYLASHYEKLKGSPEDNEQKQLFVEQHKHYLDEIIEQISEFSKRVILADANLDKVLSAYNKHRDKPIREQAENIIHLFTLTNLGAPAAFKYFDTTIDRKRYTSTKEVLDATLIHQSITGLYETRIDLSQLGGDGGGSSEAAAKPAPGGIPWLMKKPLQLTTLVPLQEYEERLLKQTMLTGSYKEKLQSLFLKYDALWQHWENQVGHRRIKPHHIATGTVNPRPQKQYPINPKAKASIQTVINDLLKQGVLIQQNSIMNTPVYPVPKPDGKWRMVLDYREVNKTIPLIAAQNQHSAGILSSIFRGKYKTTLDLSNGFWAHSITPESYWLTAFTWLGQQYCWTRLPQGFLNSPALFNADVVDLLKEVPNVQVYVDDIYISHDDPREHLEQLEKVFSLLLNAGYVVSLKKSEIAQHEVEFLGFNITKEGRGLTETFKQKLLNITPPRDLKQLQSILGKLNFARNFIPNFSELVKPLYNIIATAPGKYITWTTDNSQQLQNIISMLNSAENLEERNPEVRLIMKVNTSPSAGYIRFYNEFAKRPIMYLNYVYTKAEVKFTNTEKLLTTIHKGLIKALDLGMGQEILVYSPIVSMTKIQKTPLPERKALPIRWITWMSYLEDPRIQFHYDKTLPELQQVPTVTDDIIAKIKHPSEFSMVFYTDGSAIKHPNVNKSHNAGMGIAQVQFKPEFTVINTWSIPLGDHTAQLAEVAAVEFACKKALKIDGPVLIVTDSFYVAESVNKELPYWQSNGFFNNKKKPLKHVSKWKSIADCIQLKPDIIIIHEKGHQPTASTFHTEGNNLADKLATQGSYVVNAGKRTADGSEFEKRTADGSEFESPKKKAKVE

SEQ ID NO: 554 - protein, 2081 aa, synthetic construct
MPAAKRVKLDGGDKKYSIGLDIGTNSVGWAVITDEYKVPSKKFKVLGNTDRHSIKKNLIGALLFDSGETAEATRLKRTARRRYTRRKNRICYLQEIFSNEMAKVDDSFFHRLEESFLVEEDKKHERHPIFGNIVDEVAYHEKYPTIYHLRKKLVDSTDKADLRLIYLALAHMIKFRGHFLIEGDLNPDNSDVDKLFIQLVQTYNQLFEENPINASGVDAKAILSARLSKSRRLENLIAQLPGEKKNGLFGNLIALSLGLTPNFKSNFDLAEDAKLQLSKDTYDDDLDNLLAQIGDQYADLFLAAKNLSDAILLSDILRVNTEITKAPLSASMIKRYDEHHQDLTLLKALVRQQLPEKYKEIFFDQSKNGYAGYIDGGASQEEFYKFIKPILEKMDGTEELLVKLNREDLLRKQRTFDNGSIPHQIHLGELHAILRRQEDFYPFLKDNREKIEKILTFRIPYYVGPLARGNSRFAWMTRKSEETITPWNFEEVVDKGASAQSFIERMTNFDKNLPNEKVLPKHSLLYEYFTVYNELTKVKYVTEGMRKPAFLSGEQKKAIVDLLFKTNRKVTVKQLKEDYFKKIECFDSVEISGVEDRFNASLGTYHDLLKIIKDKDFLDNEENEDILEDIVLTLTLFEDREMIEERLKTYAHLFDDKVMKQLKRRRYTGWGRLSRKLINGIRDKQSGKTILDFLKSDGFANRNFMQLIHDDSLTFKEDIQKAQVSGQGDSLHEHIANLAGSPAIKKGILQTVKVVDELVKVMGRHKPENIVIEMARENQTTQKGQKNSRERMKRIEEGIKELGSQILKEHPVENTQLQNEKLYLYYLQNGRDMYVDQELDINRLSDYDVDHIVPQSFLKDDSIDNKVLTRSDKARGKSDNVPSEEVVKKMKNYWRQLLNAKLITQRKFDNLTKAERGGLSELDKAGFIKRQLVETRQITKHVAQILDSRMNTKYDENDKLIREVKVITLKSKLVSDFRKDFQFYKVREINNYHHAHDAYLNAVVGTALIKKYPKLESEFVYGDYKVYDVRKMIAKSEQEIGKATAKYFFYSNIMNFFKTEITLANGEIRKRPLIETNGETGEIVWDKGRDFATVRKVLSMPQVNIVKKTEVQTGGFSKESILPKRNSDKLIARKKDWDPKKYGGFDSPTVAYSVLVVAKVEKGKSKKLKSVKELLGITIMERSSFEKNPIDFLEAKGYKEVKKDLIIKLPKYSLFELENGRKRMLASAGELQKGNELALPSKYVNFLYLASHYEKLKGSPEDNEQKQLFVEQHKHYLDEIIEQISEFSKRVILADANLDKVLSAYNKHRDKPIREQAENIIHLFTLTNLGAPAAFKYFDTTIDRKRYTSTKEVLDATLIHQSITGLYETRIDLSQLGGDGGEAAAKGGIPWLMKKPLQLTTLVPLQEYEERLLKQTMLTGSYKEKLQSLFLKYDALWQHWENQVGHRRIKPHHIATGTVNPRPQKQYPINPKAKASIQTVINDLLKQGVLIQQNSIMNTPVYPVPKPDGKWRMVLDYREVNKTIPLIAAQNQHSAGILSSIFRGKYKTTLDLSNGFWAHSITPESYWLTAFTWLGQQYCWTRLPQGFLNSPALFNADVVDLLKEVPNVQVYVDDIYISHDDPREHLEQLEKVFSLLLNAGYVVSLKKSEIAQHEVEFLGFNITKEGRGLTETFKQKLLNITPPRDLKQLQSILGKLNFARNFIPNFSELVKPLYNIIATAPGKYITWTTDNSQQLQNIISMLNSAENLEERNPEVRLIMKVNTSPSAGYIRFYNEFAKRPIMYLNYVYTKAEVKFTNTEKLLTTIHKGLIKALDLGMGQEILVYSPIVSMTKIQKTPLPERKALPIRWITWMSYLEDPRIQFHYDKTLPELQQVPTVTDDIIAKIKHPSEFSMVFYTDGSAIKHPNVNKSHNAGMGIAQVQFKPEFTVINTWSIPLGDHTAQLAEVAAVEFACKKALKIDGPVLIVTDSFYVAESVNKELPYWQSNGFFNNKKKPLKHVSKWKSIADCIQLKPDIIIIHEKGHQPTASTFHTEGNNLADKLATQGSYVVNAGKRTADGSEFEKRTADGSEFESPKKKAKVE

SEQ ID NO: 555 - protein, 2087 aa, synthetic construct
MPAAKRVKLDGGDKKYSIGLDIGTNSVGWAVITDEYKVPSKKFKVLGNTDRHSIKKNLIGALLFDSGETAEATRLKRTARRRYTRRKNRICYLQEIFSNEMAKVDDSFFHRLEESFLVEEDKKHERHPIFGNIVDEVAYHEKYPTIYHLRKKLVDSTDKADLRLIYLALAHMIKFRGHFLIEGDLNPDNSDVDKLFIQLVQTYNQLFEENPINASGVDAKAILSARLSKSRRLENLIAQLPGEKKNGLFGNLIALSLGLTPNFKSNFDLAEDAKLQLSKDTYDDDLDNLLAQIGDQYADLFLAAKNLSDAILLSDILRVNTEITKAPLSASMIKRYDEHHQDLTLLKALVRQQLPEKYKEIFFDQSKNGYAGYIDGGASQEEFYKFIKPILEKMDGTEELLVKLNREDLLRKQRTFDNGSIPHQIHLGELHAILRRQEDFYPFLKDNREKIEKILTFRIPYYVGPLARGNSRFAWMTRKSEETITPWNFEEVVDKGASAQSFIERMTNFDKNLPNEKVLPKHSLLYEYFTVYNELTKVKYVTEGMRKPAFLSGEQKKAIVDLLFKTNRKVTVKQLKEDYFKKIECFDSVEISGVEDRFNASLGTYHDLLKIIKDKDFLDNEENEDILEDIVLTLTLFEDREMIEERLKTYAHLFDDKVMKQLKRRRYTGWGRLSRKLINGIRDKQSGKTILDFLKSDGFANRNFMQLIHDDSLTFKEDIQKAQVSGQGDSLHEHIANLAGSPAIKKGILQTVKVVDELVKVMGRHKPENIVIEMARENQTTQKGQKNSRERMKRIEEGIKELGSQILKEHPVENTQLQNEKLYLYYLQNGRDMYVDQELDINRLSDYDVDHIVPQSFLKDDSIDNKVLTRSDKARGKSDNVPSEEVVKKMKNYWRQLLNAKLITQRKFDNLTKAERGGLSELDKAGFIKRQLVETRQITKHVAQILDSRMNTKYDENDKLIREVKVITLKSKLVSDFRKDFQFYKVREINNYHHAHDAYLNAVVGTALIKKYPKLESEFVYGDYKVYDVRKMIAKSEQEIGKATAKYFFYSNIMNFFKTEITLANGEIRKRPLIETNGETGEIVWDKGRDFATVRKVLSMPQVNIVKKTEVQTGGFSKESILPKRNSDKLIARKKDWDPKKYGGFDSPTVAYSVLVVAKVEKGKSKKLKSVKELLGITIMERSSFEKNPIDFLEAKGYKEVKKDLIIKLPKYSLFELENGRKRMLASAGELQKGNELALPSKYVNFLYLASHYEKLKGSPEDNEQKQLFVEQHKHYLDEIIEQISEFSKRVILADANLDKVLSAYNKHRDKPIREQAENIIHLFTLTNLGAPAAFKYFDTTIDRKRYTSTKEVLDATLIHQSITGLYETRIDLSQLGGDGGEAAAKGGSGGGGGIPWLMKKPLQLTTLVPLQEYEERLLKQTMLTGSYKEKLQSLFLKYDALWQHWENQVGHRRIKPHHIATGTVNPRPQKQYPINPKAKASIQTVINDLLKQGVLIQQNSIMNTPVYPVPKPDGKWRMVLDYREVNKTIPLIAAQNQHSAGILSSIFRGKYKTTLDLSNGFWAHSITPESYWLTAFTWLGQQYCWTRLPQGFLNSPALFNADVVDLLKEVPNVQVYVDDIYISHDDPREHLEQLEKVFSLLLNAGYVVSLKKSEIAQHEVEFLGFNITKEGRGLTETFKQKLLNITPPRDLKQLQSILGKLNFARNFIPNFSELVKPLYNIIATAPGKYITWTTDNSQQLQNIISMLNSAENLEERNPEVRLIMKVNTSPSAGYIRFYNEFAKRPIMYLNYVYTKAEVKFTNTEKLLTTIHKGLIKALDLGMGQEILVYSPIVSMTKIQKTPLPERKALPIRWITWMSYLEDPRIQFHYDKTLPELQQVPTVTDDIIAKIKHPSEFSMVFYTDGSAIKHPNVNKSHNAGMGIAQVQFKPEFTVINTWSIPLGDHTAQLAEVAAVEFACKKALKIDGPVLIVTDSFYVAESVNKELPYWQSNGFFNNKKKPLKHVSKWKSIADCIQLKPDIIIIHEKGHQPTASTFHTEGNNLADKLATQGSYVVNAGKRTADGSEFEKRTADGSEFESPKKKAKVE

SEQ ID NO: 556 - protein, 2096 aa, synthetic construct
MPAAKRVKLDGGDKKYSIGLDIGTNSVGWAVITDEYKVPSKKFKVLGNTDRHSIKKNLIGALLFDSGETAEATRLKRTARRRYTRRKNRICYLQEIFSNEMAKVDDSFFHRLEESFLVEEDKKHERHPIFGNIVDEVAYHEKYPTIYHLRKKLVDSTDKADLRLIYLALAHMIKFRGHFLIEGDLNPDNSDVDKLFIQLVQTYNQLFEENPINASGVDAKAILSARLSKSRRLENLIAQLPGEKKNGLFGNLIALSLGLTPNFKSNFDLAEDAKLQLSKDTYDDDLDNLLAQIGDQYADLFLAAKNLSDAILLSDILRVNTEITKAPLSASMIKRYDEHHQDLTLLKALVRQQLPEKYKEIFFDQSKNGYAGYIDGGASQEEFYKFIKPILEKMDGTEELLVKLNREDLLRKQRTFDNGSIPHQIHLGELHAILRRQEDFYPFLKDNREKIEKILTFRIPYYVGPLARGNSRFAWMTRKSEETITPWNFEEVVDKGASAQSFIERMTNFDKNLPNEKVLPKHSLLYEYFTVYNELTKVKYVTEGMRKPAFLSGEQKKAIVDLLFKTNRKVTVKQLKEDYFKKIECFDSVEISGVEDRFNASLGTYHDLLKIIKDKDFLDNEENEDILEDIVLTLTLFEDREMIEERLKTYAHLFDDKVMKQLKRRRYTGWGRLSRKLINGIRDKQSGKTILDFLKSDGFANRNFMQLIHDDSLTFKEDIQKAQVSGQGDSLHEHIANLAGSPAIKKGILQTVKVVDELVKVMGRHKPENIVIEMARENQTTQKGQKNSRERMKRIEEGIKELGSQILKEHPVENTQLQNEKLYLYYLQNGRDMYVDQELDINRLSDYDVDHIVPQSFLKDDSIDNKVLTRSDKARGKSDNVPSEEVVKKMKNYWRQLLNAKLITQRKFDNLTKAERGGLSELDKAGFIKRQLVETRQITKHVAQILDSRMNTKYDENDKLIREVKVITLKSKLVSDFRKDFQFYKVREINNYHHAHDAYLNAVVGTALIKKYPKLESEFVYGDYKVYDVRKMIAKSEQEIGKATAKYFFYSNIMNFFKTEITLANGEIRKRPLIETNGETGEIVWDKGRDFATVRKVLSMPQVNIVKKTEVQTGGFSKESILPKRNSDKLIARKKDWDPKKYGGFDSPTVAYSVLVVAKVEKGKSKKLKSVKELLGITIMERSSFEKNPIDFLEAKGYKEVKKDLIIKLPKYSLFELENGRKRMLASAGELQKGNELALPSKYVNFLYLASHYEKLKGSPEDNEQKQLFVEQHKHYLDEIIEQISEFSKRVILADANLDKVLSAYNKHRDKPIREQAENIIHLFTLTNLGAPAAFKYFDTTIDRKRYTSTKEVLDATLIHQSITGLYETRIDLSQLGGDGGEAAAKEAAAKEAAAKEAAAKGGIPWLMKKPLQLTTLVPLQEYEERLLKQTMLTGSYKEKLQSLFLKYDALWQHWENQVGHRRIKPHHIATGTVNPRPQKQYPINPKAKASIQTVINDLLKQGVLIQQNSIMNTPVYPVPKPDGKWRMVLDYREVNKTIPLIAAQNQHSAGILSSIFRGKYKTTLDLSNGFWAHSITPESYWLTAFTWLGQQYCWTRLPQGFLNSPALFNADVVDLLKEVPNVQVYVDDIYISHDDPREHLEQLEKVFSLLLNAGYVVSLKKSEIAQHEVEFLGFNITKEGRGLTETFKQKLLNITPPRDLKQLQSILGKLNFARNFIPNFSELVKPLYNIIATAPGKYITWTTDNSQQLQNIISMLNSAENLEERNPEVRLIMKVNTSPSAGYIRFYNEFAKRPIMYLNYVYTKAEVKFTNTEKLLTTIHKGLIKALDLGMGQEILVYSPIVSMTKIQKTPLPERKALPIRWITWMSYLEDPRIQFHYDKTLPELQQVPTVTDDIIAKIKHPSEFSMVFYTDGSAIKHPNVNKSHNAGMGIAQVQFKPEFTVINTWSIPLGDHTAQLAEVAAVEFACKKALKIDGPVLIVTDSFYVAESVNKELPYWQSNGFFNNKKKPLKHVSKWKSIADCIQLKPDIIIIHEKGHQPTASTFHTEGNNLADKLATQGSYVVNAGKRTADGSEFEKRTADGSEFESPKKKAKVE

SEQ ID NO: 557 - protein, 2086 aa, synthetic construct
MPAAKRVKLDGGDKKYSIGLDIGTNSVGWAVITDEYKVPSKKFKVLGNTDRHSIKKNLIGALLFDSGETAEATRLKRTARRRYTRRKNRICYLQEIFSNEMAKVDDSFFHRLEESFLVEEDKKHERHPIFGNIVDEVAYHEKYPTIYHLRKKLVDSTDKADLRLIYLALAHMIKFRGHFLIEGDLNPDNSDVDKLFIQLVQTYNQLFEENPINASGVDAKAILSARLSKSRRLENLIAQLPGEKKNGLFGNLIALSLGLTPNFKSNFDLAEDAKLQLSKDTYDDDLDNLLAQIGDQYADLFLAAKNLSDAILLSDILRVNTEITKAPLSASMIKRYDEHHQDLTLLKALVRQQLPEKYKEIFFDQSKNGYAGYIDGGASQEEFYKFIKPILEKMDGTEELLVKLNREDLLRKQRTFDNGSIPHQIHLGELHAILRRQEDFYPFLKDNREKIEKILTFRIPYYVGPLARGNSRFAWMTRKSEETITPWNFEEVVDKGASAQSFIERMTNFDKNLPNEKVLPKHSLLYEYFTVYNELTKVKYVTEGMRKPAFLSGEQKKAIVDLLFKTNRKVTVKQLKEDYFKKIECFDSVEISGVEDRFNASLGTYHDLLKIIKDKDFLDNEENEDILEDIVLTLTLFEDREMIEERLKTYAHLFDDKVMKQLKRRRYTGWGRLSRKLINGIRDKQSGKTILDFLKSDGFANRNFMQLIHDDSLTFKEDIQKAQVSGQGDSLHEHIANLAGSPAIKKGILQTVKVVDELVKVMGRHKPENIVIEMARENQTTQKGQKNSRERMKRIEEGIKELGSQILKEHPVENTQLQNEKLYLYYLQNGRDMYVDQELDINRLSDYDVDHIVPQSFLKDDSIDNKVLTRSDKARGKSDNVPSEEVVKKMKNYWRQLLNAKLITQRKFDNLTKAERGGLSELDKAGFIKRQLVETRQITKHVAQILDSRMNTKYDENDKLIREVKVITLKSKLVSDFRKDFQFYKVREINNYHHAHDAYLNAVVGTALIKKYPKLESEFVYGDYKVYDVRKMIAKSEQEIGKATAKYFFYSNIMNFFKTEITLANGEIRKRPLIETNGETGEIVWDKGRDFATVRKVLSMPQVNIVKKTEVQTGGFSKESILPKRNSDKLIARKKDWDPKKYGGFDSPTVAYSVLVVAKVEKGKSKKLKSVKELLGITIMERSSFEKNPIDFLEAKGYKEVKKDLIIKLPKYSLFELENGRKRMLASAGELQKGNELALPSKYVNFLYLASHYEKLKGSPEDNEQKQLFVEQHKHYLDEIIEQISEFSKRVILADANLDKVLSAYNKHRDKPIREQAENIIHLFTLTNLGAPAAFKYFDTTIDRKRYTSTKEVLDATLIHQSITGLYETRIDLSQLGGDGGGGGGSGGGGSGGIPWLMKKPLQLTTLVPLQEYEERLLKQTMLTGSYKEKLQSLFLKYDALWQHWENQVGHRRIKPHHIATGTVNPRPQKQYPINPKAKASIQTVINDLLKQGVLIQQNSIMNTPVYPVPKPDGKWRMVLDYREVNKTIPLIAAQNQHSAGILSSIFRGKYKTTLDLSNGFWAHSITPESYWLTAFTWLGQQYCWTRLPQGFLNSPALFNADVVDLLKEVPNVQVYVDDIYISHDDPREHLEQLEKVFSLLLNAGYVVSLKKSEIAQHEVEFLGFNITKEGRGLTETFKQKLLNITPPRDLKQLQSILGKLNFARNFIPNFSELVKPLYNIIATAPGKYITWTTDNSQQLQNIISMLNSAENLEERNPEVRLIMKVNTSPSAGYIRFYNEFAKRPIMYLNYVYTKAEVKFTNTEKLLTTIHKGLIKALDLGMGQEILVYSPIVSMTKIQKTPLPERKALPIRWITWMSYLEDPRIQFHYDKTLPELQQVPTVTDDIIAKIKHPSEFSMVFYTDGSAIKHPNVNKSHNAGMGIAQVQFKPEFTVINTWSIPLGDHTAQLAEVAAVEFACKKALKIDGPVLIVTDSFYVAESVNKELPYWQSNGFFNNKKKPLKHVSKWKSIADCIQLKPDIIIIHEKGHQPTASTFHTEGNNLADKLATQGSYVVNAGKRTADGSEFEKRTADGSEFESPKKKAKVE

SEQ ID NO: 558 - protein, 2087 aa, synthetic construct
MPAAKRVKLDGGDKKYSIGLDIGTNSVGWAVITDEYKVPSKKFKVLGNTDRHSIKKNLIGALLFDSGETAEATRLKRTARRRYTRRKNRICYLQEIFSNEMAKVDDSFFHRLEESFLVEEDKKHERHPIFGNIVDEVAYHEKYPTIYHLRKKLVDSTDKADLRLIYLALAHMIKFRGHFLIEGDLNPDNSDVDKLFIQLVQTYNQLFEENPINASGVDAKAILSARLSKSRRLENLIAQLPGEKKNGLFGNLIALSLGLTPNFKSNFDLAEDAKLQLSKDTYDDDLDNLLAQIGDQYADLFLAAKNLSDAILLSDILRVNTEITKAPLSASMIKRYDEHHQDLTLLKALVRQQLPEKYKEIFFDQSKNGYAGYIDGGASQEEFYKFIKPILEKMDGTEELLVKLNREDLLRKQRTFDNGSIPHQIHLGELHAILRRQEDFYPFLKDNREKIEKILTFRIPYYVGPLARGNSRFAWMTRKSEETITPWNFEEVVDKGASAQSFIERMTNFDKNLPNEKVLPKHSLLYEYFTVYNELTKVKYVTEGMRKPAFLSGEQKKAIVDLLFKTNRKVTVKQLKEDYFKKIECFDSVEISGVEDRFNASLGTYHDLLKIIKDKDFLDNEENEDILEDIVLTLTLFEDREMIEERLKTYAHLFDDKVMKQLKRRRYTGWGRLSRKLINGIRDKQSGKTILDFLKSDGFANRNFMQLIHDDSLTFKEDIQKAQVSGQGDSLHEHIANLAGSPAIKKGILQTVKVVDELVKVMGRHKPENIVIEMARENQTTQKGQKNSRERMKRIEEGIKELGSQILKEHPVENTQLQNEKLYLYYLQNGRDMYVDQELDINRLSDYDVDHIVPQSFLKDDSIDNKVLTRSDKARGKSDNVPSEEVVKKMKNYWRQLLNAKLITQRKFDNLTKAERGGLSELDKAGFIKRQLVETRQITKHVAQILDSRMNTKYDENDKLIREVKVITLKSKLVSDFRKDFQFYKVREINNYHHAHDAYLNAVVGTALIKKYPKLESEFVYGDYKVYDVRKMIAKSEQEIGKATAKYFFYSNIMNFFKTEITLANGEIRKRPLIETNGETGEIVWDKGRDFATVRKVLSMPQVNIVKKTEVQTGGFSKESILPKRNSDKLIARKKDWDPKKYGGFDSPTVAYSVLVVAKVEKGKSKKLKSVKELLGITIMERSSFEKNPIDFLEAKGYKEVKKDLIIKLPKYSLFELENGRKRMLASAGELQKGNELALPSKYVNFLYLASHYEKLKGSPEDNEQKQLFVEQHKHYLDEIIEQISEFSKRVILADANLDKVLSAYNKHRDKPIREQAENIIHLFTLTNLGAPAAFKYFDTTIDRKRYTSTKEVLDATLIHQSITGLYETRIDLSQLGGDGGEAAAKPAPGSSGGIPWLMKKPLQLTTLVPLQEYEERLLKQTMLTGSYKEKLQSLFLKYDALWQHWENQVGHRRIKPHHIATGTVNPRPQKQYPINPKAKASIQTVINDLLKQGVLIQQNSIMNTPVYPVPKPDGKWRMVLDYREVNKTIPLIAAQNQHSAGILSSIFRGKYKTTLDLSNGFWAHSITPESYWLTAFTWLGQQYCWTRLPQGFLNSPALFNADVVDLLKEVPNVQVYVDDIYISHDDPREHLEQLEKVFSLLLNAGYVVSLKKSEIAQHEVEFLGFNITKEGRGLTETFKQKLLNITPPRDLKQLQSILGKLNFARNFIPNFSELVKPLYNIIATAPGKYITWTTDNSQQLQNIISMLNSAENLEERNPEVRLIMKVNTSPSAGYIRFYNEFAKRPIMYLNYVYTKAEVKFTNTEKLLTTIHKGLIKALDLGMGQEILVYSPIVSMTKIQKTPLPERKALPIRWITWMSYLEDPRIQFHYDKTLPELQQVPTVTDDIIAKIKHPSEFSMVFYTDGSAIKHPNVNKSHNAGMGIAQVQFKPEFTVINTWSIPLGDHTAQLAEVAAVEFACKKALKIDGPVLIVTDSFYVAESVNKELPYWQSNGFFNNKKKPLKHVSKWKSIADCIQLKPDIIIIHEKGHQPTASTFHTEGNNLADKLATQGSYVVNAGKRTADGSEFEKRTADGSEFESPKKKAKVE

SEQ ID NO: 559 - protein, 2087 aa, synthetic construct
MPAAKRVKLDGGDKKYSIGLDIGTNSVGWAVITDEYKVPSKKFKVLGNTDRHSIKKNLIGALLFDSGETAEATRLKRTARRRYTRRKNRICYLQEIFSNEMAKVDDSFFHRLEESFLVEEDKKHERHPIFGNIVDEVAYHEKYPTIYHLRKKLVDSTDKADLRLIYLALAHMIKFRGHFLIEGDLNPDNSDVDKLFIQLVQTYNQLFEENPINASGVDAKAILSARLSKSRRLENLIAQLPGEKKNGLFGNLIALSLGLTPNFKSNFDLAEDAKLQLSKDTYDDDLDNLLAQIGDQYADLFLAAKNLSDAILLSDILRVNTEITKAPLSASMIKRYDEHHQDLTLLKALVRQQLPEKYKEIFFDQSKNGYAGYIDGGASQEEFYKFIKPILEKMDGTEELLVKLNREDLLRKQRTFDNGSIPHQIHLGELHAILRRQEDFYPFLKDNREKIEKILTFRIPYYVGPLARGNSRFAWMTRKSEETITPWNFEEVVDKGASAQSFIERMTNFDKNLPNEKVLPKHSLLYEYFTVYNELTKVKYVTEGMRKPAFLSGEQKKAIVDLLFKTNRKVTVKQLKEDYFKKIECFDSVEISGVEDRFNASLGTYHDLLKIIKDKDFLDNEENEDILEDIVLTLTLFEDREMIEERLKTYAHLFDDKVMKQLKRRRYTGWGRLSRKLINGIRDKQSGKTILDFLKSDGFANRNFMQLIHDDSLTFKEDIQKAQVSGQGDSLHEHIANLAGSPAIKKGILQTVKVVDELVKVMGRHKPENIVIEMARENQTTQKGQKNSRERMKRIEEGIKELGSQILKEHPVENTQLQNEKLYLYYLQNGRDMYVDQELDINRLSDYDVDHIVPQSFLKDDSIDNKVLTRSDKARGKSDNVPSEEVVKKMKNYWRQLLNAKLITQRKFDNLTKAERGGLSELDKAGFIKRQLVETRQITKHVAQILDSRMNTKYDENDKLIREVKVITLKSKLVSDFRKDFQFYKVREINNYHHAHDAYLNAVVGTALIKKYPKLESEFVYGDYKVYDVRKMIAKSEQEIGKATAKYFFYSNIMNFFKTEITLANGEIRKRPLIETNGETGEIVWDKGRDFATVRKVLSMPQVNIVKKTEVQTGGFSKESILPKRNSDKLIARKKDWDPKKYGGFDSPTVAYSVLVVAKVEKGKSKKLKSVKELLGITIMERSSFEKNPIDFLEAKGYKEVKKDLIIKLPKYSLFELENGRKRMLASAGELQKGNELALPSKYVNFLYLASHYEKLKGSPEDNEQKQLFVEQHKHYLDEIIEQISEFSKRVILADANLDKVLSAYNKHRDKPIREQAENIIHLFTLTNLGAPAAFKYFDTTIDRKRYTSTKEVLDATLIHQSITGLYETRIDLSQLGGDGGPAPEAAAKGGGGGIPWLMKKPLQLTTLVPLQEYEERLLKQTMLTGSYKEKLQSLFLKYDALWQHWENQVGHRRIKPHHIATGTVNPRPQKQYPINPKAKASIQTVINDLLKQGVLIQQNSIMNTPVYPVPKPDGKWRMVLDYREVNKTIPLIAAQNQHSAGILSSIFRGKYKTTLDLSNGFWAHSITPESYWLTAFTWLGQQYCWTRLPQGFLNSPALFNADVVDLLKEVPNVQVYVDDIYISHDDPREHLEQLEKVFSLLLNAGYVVSLKKSEIAQHEVEFLGFNITKEGRGLTETFKQKLLNITPPRDLKQLQSILGKLNFARNFIPNFSELVKPLYNIIATAPGKYITWTTDNSQQLQNIISMLNSAENLEERNPEVRLIMKVNTSPSAGYIRFYNEFAKRPIMYLNYVYTKAEVKFTNTEKLLTTIHKGLIKALDLGMGQEILVYSPIVSMTKIQKTPLPERKALPIRWITWMSYLEDPRIQFHYDKTLPELQQVPTVTDDIIAKIKHPSEFSMVFYTDGSAIKHPNVNKSHNAGMGIAQVQFKPEFTVINTWSIPLGDHTAQLAEVAAVEFACKKALKIDGPVLIVTDSFYVAESVNKELPYWQSNGFFNNKKKPLKHVSKWKSIADCIQLKPDIIIIHEKGHQPTASTFHTEGNNLADKLATQGSYVVNAGKRTADGSEFEKRTADGSEFESPKKKAKVE

SEQ ID NO: 560 - protein, 2083 aa, synthetic construct
MPAAKRVKLDGGDKKYSIGLDIGTNSVGWAVITDEYKVPSKKFKVLGNTDRHSIKKNLIGALLFDSGETAEATRLKRTARRRYTRRKNRICYLQEIFSNEMAKVDDSFFHRLEESFLVEEDKKHERHPIFGNIVDEVAYHEKYPTIYHLRKKLVDSTDKADLRLIYLALAHMIKFRGHFLIEGDLNPDNSDVDKLFIQLVQTYNQLFEENPINASGVDAKAILSARLSKSRRLENLIAQLPGEKKNGLFGNLIALSLGLTPNFKSNFDLAEDAKLQLSKDTYDDDLDNLLAQIGDQYADLFLAAKNLSDAILLSDILRVNTEITKAPLSASMIKRYDEHHQDLTLLKALVRQQLPEKYKEIFFDQSKNGYAGYIDGGASQEEFYKFIKPILEKMDGTEELLVKLNREDLLRKQRTFDNGSIPHQIHLGELHAILRRQEDFYPFLKDNREKIEKILTFRIPYYVGPLARGNSRFAWMTRKSEETITPWNFEEVVDKGASAQSFIERMTNFDKNLPNEKVLPKHSLLYEYFTVYNELTKVKYVTEGMRKPAFLSGEQKKAIVDLLFKTNRKVTVKQLKEDYFKKIECFDSVEISGVEDRFNASLGTYHDLLKIIKDKDFLDNEENEDILEDIVLTLTLFEDREMIEERLKTYAHLFDDKVMKQLKRRRYTGWGRLSRKLINGIRDKQSGKTILDFLKSDGFANRNFMQLIHDDSLTFKEDIQKAQVSGQGDSLHEHIANLAGSPAIKKGILQTVKVVDELVKVMGRHKPENIVIEMARENQTTQKGQKNSRERMKRIEEGIKELGSQILKEHPVENTQLQNEKLYLYYLQNGRDMYVDQELDINRLSDYDVDHIVPQSFLKDDSIDNKVLTRSDKARGKSDNVPSEEVVKKMKNYWRQLLNAKLITQRKFDNLTKAERGGLSELDKAGFIKRQLVETRQITKHVAQILDSRMNTKYDENDKLIREVKVITLKSKLVSDFRKDFQFYKVREINNYHHAHDAYLNAVVGTALIKKYPKLESEFVYGDYKVYDVRKMIAKSEQEIGKATAKYFFYSNIMNFFKTEITLANGEIRKRPLIETNGETGEIVWDKGRDFATVRKVLSMPQVNIVKKTEVQTGGFSKESILPKRNSDKLIARKKDWDPKKYGGFDSPTVAYSVLVVAKVEKGKSKKLKSVKELLGITIMERSSFEKNPIDFLEAKGYKEVKKDLIIKLPKYSLFELENGRKRMLASAGELQKGNELALPSKYVNFLYLASHYEKLKGSPEDNEQKQLFVEQHKHYLDEIIEQISEFSKRVILADANLDKVLSAYNKHRDKPIREQAENIIHLFTLTNLGAPAAFKYFDTTIDRKRYTSTKEVLDATLIHQSITGLYETRIDLSQLGGDGGPAPAPAPGGIPWLMKKPLQLTTLVPLQEYEERLLKQTMLTGSYKEKLQSLFLKYDALWQHWENQVGHRRIKPHHIATGTVNPRPQKQYPINPKAKASIQTVINDLLKQGVLIQQNSIMNTPVYPVPKPDGKWRMVLDYREVNKTIPLIAAQNQHSAGILSSIFRGKYKTTLDLSNGFWAHSITPESYWLTAFTWLGQQYCWTRLPQGFLNSPALFNADVVDLLKEVPNVQVYVDDIYISHDDPREHLEQLEKVFSLLLNAGYVVSLKKSEIAQHEVEFLGFNITKEGRGLTETFKQKLLNITPPRDLKQLQSILGKLNFARNFIPNFSELVKPLYNIIATAPGKYITWTTDNSQQLQNIISMLNSAENLEERNPEVRLIMKVNTSPSAGYIRFYNEFAKRPIMYLNYVYTKAEVKFTNTEKLLTTIHKGLIKALDLGMGQEILVYSPIVSMTKIQKTPLPERKALPIRWITWMSYLEDPRIQFHYDKTLPELQQVPTVTDDIIAKIKHPSEFSMVFYTDGSAIKHPNVNKSHNAGMGIAQVQFKPEFTVINTWSIPLGDHTAQLAEVAAVEFACKKALKIDGPVLIVTDSFYVAESVNKELPYWQSNGFFNNKKKPLKHVSKWKSIADCIQLKPDIIIIHEKGHQPTASTFHTEGNNLADKLATQGSYVVNAGKRTADGSEFEKRTADGSEFESPKKKAKVE

SEQ ID NO: 561 - protein, 2087 aa, synthetic construct
MPAAKRVKLDGGDKKYSIGLDIGTNSVGWAVITDEYKVPSKKFKVLGNTDRHSIKKNLIGALLFDSGETAEATRLKRTARRRYTRRKNRICYLQEIFSNEMAKVDDSFFHRLEESFLVEEDKKHERHPIFGNIVDEVAYHEKYPTIYHLRKKLVDSTDKADLRLIYLALAHMIKFRGHFLIEGDLNPDNSDVDKLFIQLVQTYNQLFEENPINASGVDAKAILSARLSKSRRLENLIAQLPGEKKNGLFGNLIALSLGLTPNFKSNFDLAEDAKLQLSKDTYDDDLDNLLAQIGDQYADLFLAAKNLSDAILLSDILRVNTEITKAPLSASMIKRYDEHHQDLTLLKALVRQQLPEKYKEIFFDQSKNGYAGYIDGGASQEEFYKFIKPILEKMDGTEELLVKLNREDLLRKQRTFDNGSIPHQIHLGELHAILRRQEDFYPFLKDNREKIEKILTFRIPYYVGPLARGNSRFAWMTRKSEETITPWNFEEVVDKGASAQSFIERMTNFDKNLPNEKVLPKHSLLYEYFTVYNELTKVKYVTEGMRKPAFLSGEQKKAIVDLLFKTNRKVTVKQLKEDYFKKIECFDSVEISGVEDRFNASLGTYHDLLKIIKDKDFLDNEENEDILEDIVLTLTLFEDREMIEERLKTYAHLFDDKVMKQLKRRRYTGWGRLSRKLINGIRDKQSGKTILDFLKSDGFANRNFMQLIHDDSLTFKEDIQKAQVSGQGDSLHEHIANLAGSPAIKKGILQTVKVVDELVKVMGRHKPENIVIEMARENQTTQKGQKNSRERMKRIEEGIKELGSQILKEHPVENTQLQNEKLYLYYLQNGRDMYVDQELDINRLSDYDVDHIVPQSFLKDDSIDNKVLTRSDKARGKSDNVPSEEVVKKMKNYWRQLLNAKLITQRKFDNLTKAERGGLSELDKAGFIKRQLVETRQITKHVAQILDSRMNTKYDENDKLIREVKVITLKSKLVSDFRKDFQFYKVREINNYHHAHDAYLNAVVGTALIKKYPKLESEFVYGDYKVYDVRKMIAKSEQEIGKATAKYFFYSNIMNFFKTEITLANGEIRKRPLIETNGETGEIVWDKGRDFATVRKVLSMPQVNIVKKTEVQTGGFSKESILPKRNSDKLIARKKDWDPKKYGGFDSPTVAYSVLVVAKVEKGKSKKLKSVKELLGITIMERSSFEKNPIDFLEAKGYKEVKKDLIIKLPKYSLFELENGRKRMLASAGELQKGNELALPSKYVNFLYLASHYEKLKGSPEDNEQKQLFVEQHKHYLDEIIEQISEFSKRVILADANLDKVLSAYNKHRDKPIREQAENIIHLFTLTNLGAPAAFKYFDTTIDRKRYTSTKEVLDATLIHQSITGLYETRIDLSQLGGDGGGGSEAAAKGSSGGIPWLMKKPLQLTTLVPLQEYEERLLKQTMLTGSYKEKLQSLFLKYDALWQHWENQVGHRRIKPHHIATGTVNPRPQKQYPINPKAKASIQTVINDLLKQGVLIQQNSIMNTPVYPVPKPDGKWRMVLDYREVNKTIPLIAAQNQHSAGILSSIFRGKYKTTLDLSNGFWAHSITPESYWLTAFTWLGQQYCWTRLPQGFLNSPALFNADVVDLLKEVPNVQVYVDDIYISHDDPREHLEQLEKVFSLLLNAGYVVSLKKSEIAQHEVEFLGFNITKEGRGLTETFKQKLLNITPPRDLKQLQSILGKLNFARNFIPNFSELVKPLYNIIATAPGKYITWTTDNSQQLQNIISMLNSAENLEERNPEVRLIMKVNTSPSAGYIRFYNEFAKRPIMYLNYVYTKAEVKFTNTEKLLTTIHKGLIKALDLGMGQEILVYSPIVSMTKIQKTPLPERKALPIRWITWMSYLEDPRIQFHYDKTLPELQQVPTVTDDIIAKIKHPSEFSMVFYTDGSAIKHPNVNKSHNAGMGIAQVQFKPEFTVINTWSIPLGDHTAQLAEVAAVEFACKKALKIDGPVLIVTDSFYVAESVNKELPYWQSNGFFNNKKKPLKHVSKWKSIADCIQLKPDIIIIHEKGHQPTASTFHTEGNNLADKLATQGSYVVNAGKRTADGSEFEKRTADGSEFESPKKKAKVE

SEQ ID NO: 562 - protein, 2085 aa, synthetic construct
MPAAKRVKLDGGDKKYSIGLDIGTNSVGWAVITDEYKVPSKKFKVLGNTDRHSIKKNLIGALLFDSGETAEATRLKRTARRRYTRRKNRICYLQEIFSNEMAKVDDSFFHRLEESFLVEEDKKHERHPIFGNIVDEVAYHEKYPTIYHLRKKLVDSTDKADLRLIYLALAHMIKFRGHFLIEGDLNPDNSDVDKLFIQLVQTYNQLFEENPINASGVDAKAILSARLSKSRRLENLIAQLPGEKKNGLFGNLIALSLGLTPNFKSNFDLAEDAKLQLSKDTYDDDLDNLLAQIGDQYADLFLAAKNLSDAILLSDILRVNTEITKAPLSASMIKRYDEHHQDLTLLKALVRQQLPEKYKEIFFDQSKNGYAGYIDGGASQEEFYKFIKPILEKMDGTEELLVKLNREDLLRKQRTFDNGSIPHQIHLGELHAILRRQEDFYPFLKDNREKIEKILTFRIPYYVGPLARGNSRFAWMTRKSEETITPWNFEEVVDKGASAQSFIERMTNFDKNLPNEKVLPKHSLLYEYFTVYNELTKVKYVTEGMRKPAFLSGEQKKAIVDLLFKTNRKVTVKQLKEDYFKKIECFDSVEISGVEDRFNASLGTYHDLLKIIKDKDFLDNEENEDILEDIVLTLTLFEDREMIEERLKTYAHLFDDKVMKQLKRRRYTGWGRLSRKLINGIRDKQSGKTILDFLKSDGFANRNFMQLIHDDSLTFKEDIQKAQVSGQGDSLHEHIANLAGSPAIKKGILQTVKVVDELVKVMGRHKPENIVIEMARENQTTQKGQKNSRERMKRIEEGIKELGSQILKEHPVENTQLQNEKLYLYYLQNGRDMYVDQELDINRLSDYDVDHIVPQSFLKDDSIDNKVLTRSDKARGKSDNVPSEEVVKKMKNYWRQLLNAKLITQRKFDNLTKAERGGLSELDKAGFIKRQLVETRQITKHVAQILDSRMNTKYDENDKLIREVKVITLKSKLVSDFRKDFQFYKVREINNYHHAHDAYLNAVVGTALIKKYPKLESEFVYGDYKVYDVRKMIAKSEQEIGKATAKYFFYSNIMNFFKTEITLANGEIRKRPLIETNGETGEIVWDKGRDFATVRKVLSMPQVNIVKKTEVQTGGFSKESILPKRNSDKLIARKKDWDPKKYGGFDSPTVAYSVLVVAKVEKGKSKKLKSVKELLGITIMERSSFEKNPIDFLEAKGYKEVKKDLIIKLPKYSLFELENGRKRMLASAGELQKGNELALPSKYVNFLYLASHYEKLKGSPEDNEQKQLFVEQHKHYLDEIIEQISEFSKRVILADANLDKVLSAYNKHRDKPIREQAENIIHLFTLTNLGAPAAFKYFDTTIDRKRYTSTKEVLDATLIHQSITGLYETRIDLSQLGGDGGGSSPAPGGGGGIPWLMKKPLQLTTLVPLQEYEERLLKQTMLTGSYKEKLQSLFLKYDALWQHWENQVGHRRIKPHHIATGTVNPRPQKQYPINPKAKASIQTVINDLLKQGVLIQQNSIMNTPVYPVPKPDGKWRMVLDYREVNKTIPLIAAQNQHSAGILSSIFRGKYKTTLDLSNGFWAHSITPESYWLTAFTWLGQQYCWTRLPQGFLNSPALFNADVVDLLKEVPNVQVYVDDIYISHDDPREHLEQLEKVFSLLLNAGYVVSLKKSEIAQHEVEFLGFNITKEGRGLTETFKQKLLNITPPRDLKQLQSILGKLNFARNFIPNFSELVKPLYNIIATAPGKYITWTTDNSQQLQNIISMLNSAENLEERNPEVRLIMKVNTSPSAGYIRFYNEFAKRPIMYLNYVYTKAEVKFTNTEKLLTTIHKGLIKALDLGMGQEILVYSPIVSMTKIQKTPLPERKALPIRWITWMSYLEDPRIQFHYDKTLPELQQVPTVTDDIIAKIKHPSEFSMVFYTDGSAIKHPNVNKSHNAGMGIAQVQFKPEFTVINTWSIPLGDHTAQLAEVAAVEFACKKALKIDGPVLIVTDSFYVAESVNKELPYWQSNGFFNNKKKPLKHVSKWKSIADCIQLKPDIIIIHEKGHQPTASTFHTEGNNLADKLATQGSYVVNAGKRTADGSEFEKRTADGSEFESPKKKAKVE

SEQ ID NO: 563 - protein, 2087 aa, synthetic construct
MPAAKRVKLDGGDKKYSIGLDIGTNSVGWAVITDEYKVPSKKFKVLGNTDRHSIKKNLIGALLFDSGETAEATRLKRTARRRYTRRKNRICYLQEIFSNEMAKVDDSFFHRLEESFLVEEDKKHERHPIFGNIVDEVAYHEKYPTIYHLRKKLVDSTDKADLRLIYLALAHMIKFRGHFLIEGDLNPDNSDVDKLFIQLVQTYNQLFEENPINASGVDAKAILSARLSKSRRLENLIAQLPGEKKNGLFGNLIALSLGLTPNFKSNFDLAEDAKLQLSKDTYDDDLDNLLAQIGDQYADLFLAAKNLSDAILLSDILRVNTEITKAPLSASMIKRYDEHHQDLTLLKALVRQQLPEKYKEIFFDQSKNGYAGYIDGGASQEEFYKFIKPILEKMDGTEELLVKLNREDLLRKQRTFDNGSIPHQIHLGELHAILRRQEDFYPFLKDNREKIEKILTFRIPYYVGPLARGNSRFAWMTRKSEETITPWNFEEVVDKGASAQSFIERMTNFDKNLPNEKVLPKHSLLYEYFTVYNELTKVKYVTEGMRKPAFLSGEQKKAIVDLLFKTNRKVTVKQLKEDYFKKIECFDSVEISGVEDRFNASLGTYHDLLKIIKDKDFLDNEENEDILEDIVLTLTLFEDREMIEERLKTYAHLFDDKVMKQLKRRRYTGWGRLSRKLINGIRDKQSGKTILDFLKSDGFANRNFMQLIHDDSLTFKEDIQKAQVSGQGDSLHEHIANLAGSPAIKKGILQTVKVVDELVKVMGRHKPENIVIEMARENQTTQKGQKNSRERMKRIEEGIKELGSQILKEHPVENTQLQNEKLYLYYLQNGRDMYVDQELDINRLSDYDVDHIVPQSFLKDDSIDNKVLTRSDKARGKSDNVPSEEVVKKMKNYWRQLLNAKLITQRKFDNLTKAERGGLSELDKAGFIKRQLVETRQITKHVAQILDSRMNTKYDENDKLIREVKVITLKSKLVSDFRKDFQFYKVREINNYHHAHDAYLNAVVGTALIKKYPKLESEFVYGDYKVYDVRKMIAKSEQEIGKATAKYFFYSNIMNFFKTEITLANGEIRKRPLIETNGETGEIVWDKGRDFATVRKVLSMPQVNIVKKTEVQTGGFSKESILPKRNSDKLIARKKDWDPKKYGGFDSPTVAYSVLVVAKVEKGKSKKLKSVKELLGITIMERSSFEKNPIDFLEAKGYKEVKKDLIIKLPKYSLFELENGRKRMLASAGELQKGNELALPSKYVNFLYLASHYEKLKGSPEDNEQKQLFVEQHKHYLDEIIEQISEFSKRVILADANLDKVLSAYNKHRDKPIREQAENIIHLFTLTNLGAPAAFKYFDTTIDRKRYTSTKEVLDATLIHQSITGLYETRIDLSQLGGDGGGGSEAAAKGGGGGIPWLMKKPLQLTTLVPLQEYEERLLKQTMLTGSYKEKLQSLFLKYDALWQHWENQVGHRRIKPHHIATGTVNPRPQKQYPINPKAKASIQTVINDLLKQGVLIQQNSIMNTPVYPVPKPDGKWRMVLDYREVNKTIPLIAAQNQHSAGILSSIFRGKYKTTLDLSNGFWAHSITPESYWLTAFTWLGQQYCWTRLPQGFLNSPALFNADVVDLLKEVPNVQVYVDDIYISHDDPREHLEQLEKVFSLLLNAGYVVSLKKSEIAQHEVEFLGFNITKEGRGLTETFKQKLLNITPPRDLKQLQSILGKLNFARNFIPNFSELVKPLYNIIATAPGKYITWTTDNSQQLQNIISMLNSAENLEERNPEVRLIMKVNTSPSAGYIRFYNEFAKRPIMYLNYVYTKAEVKFTNTEKLLTTIHKGLIKALDLGMGQEILVYSPIVSMTKIQKTPLPERKALPIRWITWMSYLEDPRIQFHYDKTLPELQQVPTVTDDIIAKIKHPSEFSMVFYTDGSAIKHPNVNKSHNAGMGIAQVQFKPEFTVINTWSIPLGDHTAQLAEVAAVEFACKKALKIDGPVLIVTDSFYVAESVNKELPYWQSNGFFNNKKKPLKHVSKWKSIADCIQLKPDIIIIHEKGHQPTASTFHTEGNNLADKLATQGSYVVNAGKRTADGSEFEKRTADGSEFESPKKKAKVE

SEQ ID NO: 564 - protein, 2082 aa, synthetic construct
MPAAKRVKLDGGDKKYSIGLDIGTNSVGWAVITDEYKVPSKKFKVLGNTDRHSIKKNLIGALLFDSGETAEATRLKRTARRRYTRRKNRICYLQEIFSNEMAKVDDSFFHRLEESFLVEEDKKHERHPIFGNIVDEVAYHEKYPTIYHLRKKLVDSTDKADLRLIYLALAHMIKFRGHFLIEGDLNPDNSDVDKLFIQLVQTYNQLFEENPINASGVDAKAILSARLSKSRRLENLIAQLPGEKKNGLFGNLIALSLGLTPNFKSNFDLAEDAKLQLSKDTYDDDLDNLLAQIGDQYADLFLAAKNLSDAILLSDILRVNTEITKAPLSASMIKRYDEHHQDLTLLKALVRQQLPEKYKEIFFDQSKNGYAGYIDGGASQEEFYKFIKPILEKMDGTEELLVKLNREDLLRKQRTFDNGSIPHQIHLGELHAILRRQEDFYPFLKDNREKIEKILTFRIPYYVGPLARGNSRFAWMTRKSEETITPWNFEEVVDKGASAQSFIERMTNFDKNLPNEKVLPKHSLLYEYFTVYNELTKVKYVTEGMRKPAFLSGEQKKAIVDLLFKTNRKVTVKQLKEDYFKKIECFDSVEISGVEDRFNASLGTYHDLLKIIKDKDFLDNEENEDILEDIVLTLTLFEDREMIEERLKTYAHLFDDKVMKQLKRRRYTGWGRLSRKLINGIRDKQSGKTILDFLKSDGFANRNFMQLIHDDSLTFKEDIQKAQVSGQGDSLHEHIANLAGSPAIKKGILQTVKVVDELVKVMGRHKPENIVIEMARENQTTQKGQKNSRERMKRIEEGIKELGSQILKEHPVENTQLQNEKLYLYYLQNGRDMYVDQELDINRLSDYDVDHIVPQSFLKDDSIDNKVLTRSDKARGKSDNVPSEEVVKKMKNYWRQLLNAKLITQRKFDNLTKAERGGLSELDKAGFIKRQLVETRQITKHVAQILDSRMNTKYDENDKLIREVKVITLKSKLVSDFRKDFQFYKVREINNYHHAHDAYLNAVVGTALIKKYPKLESEFVYGDYKVYDVRKMIAKSEQEIGKATAKYFFYSNIMNFFKTEITLANGEIRKRPLIETNGETGEIVWDKGRDFATVRKVLSMPQVNIVKKTEVQTGGFSKESILPKRNSDKLIARKKDWDPKKYGGFDSPTVAYSVLVVAKVEKGKSKKLKSVKELLGITIMERSSFEKNPIDFLEAKGYKEVKKDLIIKLPKYSLFELENGRKRMLASAGELQKGNELALPSKYVNFLYLASHYEKLKGSPEDNEQKQLFVEQHKHYLDEIIEQISEFSKRVILADANLDKVLSAYNKHRDKPIREQAENIIHLFTLTNLGAPAAFKYFDTTIDRKRYTSTKEVLDATLIHQSITGLYETRIDLSQLGGDGGGGGGSSGGIPWLMKKPLQLTTLVPLQEYEERLLKQTMLTGSYKEKLQSLFLKYDALWQHWENQVGHRRIKPHHIATGTVNPRPQKQYPINPKAKASIQTVINDLLKQGVLIQQNSIMNTPVYPVPKPDGKWRMVLDYREVNKTIPLIAAQNQHSAGILSSIFRGKYKTTLDLSNGFWAHSITPESYWLTAFTWLGQQYCWTRLPQGFLNSPALFNADVVDLLKEVPNVQVYVDDIYISHDDPREHLEQLEKVFSLLLNAGYVVSLKKSEIAQHEVEFLGFNITKEGRGLTETFKQKLLNITPPRDLKQLQSILGKLNFARNFIPNFSELVKPLYNIIATAPGKYITWTTDNSQQLQNIISMLNSAENLEERNPEVRLIMKVNTSPSAGYIRFYNEFAKRPIMYLNYVYTKAEVKFTNTEKLLTTIHKGLIKALDLGMGQEILVYSPIVSMTKIQKTPLPERKALPIRWITWMSYLEDPRIQFHYDKTLPELQQVPTVTDDIIAKIKHPSEFSMVFYTDGSAIKHPNVNKSHNAGMGIAQVQFKPEFTVINTWSIPLGDHTAQLAEVAAVEFACKKALKIDGPVLIVTDSFYVAESVNKELPYWQSNGFFNNKKKPLKHVSKWKSIADCIQLKPDIIIIHEKGHQPTASTFHTEGNNLADKLATQGSYVVNAGKRTADGSEFEKRTADGSEFESPKKKAKVE

SEQ ID NO: 565 - protein, 2085 aa, synthetic construct
MPAAKRVKLDGGDKKYSIGLDIGTNSVGWAVITDEYKVPSKKFKVLGNTDRHSIKKNLIGALLFDSGETAEATRLKRTARRRYTRRKNRICYLQEIFSNEMAKVDDSFFHRLEESFLVEEDKKHERHPIFGNIVDEVAYHEKYPTIYHLRKKLVDSTDKADLRLIYLALAHMIKFRGHFLIEGDLNPDNSDVDKLFIQLVQTYNQLFEENPINASGVDAKAILSARLSKSRRLENLIAQLPGEKKNGLFGNLIALSLGLTPNFKSNFDLAEDAKLQLSKDTYDDDLDNLLAQIGDQYADLFLAAKNLSDAILLSDILRVNTEITKAPLSASMIKRYDEHHQDLTLLKALVRQQLPEKYKEIFFDQSKNGYAGYIDGGASQEEFYKFIKPILEKMDGTEELLVKLNREDLLRKQRTFDNGSIPHQIHLGELHAILRRQEDFYPFLKDNREKIEKILTFRIPYYVGPLARGNSRFAWMTRKSEETITPWNFEEVVDKGASAQSFIERMTNFDKNLPNEKVLPKHSLLYEYFTVYNELTKVKYVTEGMRKPAFLSGEQKKAIVDLLFKTNRKVTVKQLKEDYFKKIECFDSVEISGVEDRFNASLGTYHDLLKIIKDKDFLDNEENEDILEDIVLTLTLFEDREMIEERLKTYAHLFDDKVMKQLKRRRYTGWGRLSRKLINGIRDKQSGKTILDFLKSDGFANRNFMQLIHDDSLTFKEDIQKAQVSGQGDSLHEHIANLAGSPAIKKGILQTVKVVDELVKVMGRHKPENIVIEMARENQTTQKGQKNSRERMKRIEEGIKELGSQILKEHPVENTQLQNEKLYLYYLQNGRDMYVDQELDINRLSDYDVDHIVPQSFLKDDSIDNKVLTRSDKARGKSDNVPSEEVVKKMKNYWRQLLNAKLITQRKFDNLTKAERGGLSELDKAGFIKRQLVETRQITKHVAQILDSRMNTKYDENDKLIREVKVITLKSKLVSDFRKDFQFYKVREINNYHHAHDAYLNAVVGTALIKKYPKLESEFVYGDYKVYDVRKMIAKSEQEIGKATAKYFFYSNIMNFFKTEITLANGEIRKRPLIETNGETGEIVWDKGRDFATVRKVLSMPQVNIVKKTEVQTGGFSKESILPKRNSDKLIARKKDWDPKKYGGFDSPTVAYSVLVVAKVEKGKSKKLKSVKELLGITIMERSSFEKNPIDFLEAKGYKEVKKDLIIKLPKYSLFELENGRKRMLASAGELQKGNELALPSKYVNFLYLASHYEKLKGSPEDNEQKQLFVEQHKHYLDEIIEQISEFSKRVILADANLDKVLSAYNKHRDKPIREQAENIIHLFTLTNLGAPAAFKYFDTTIDRKRYTSTKEVLDATLIHQSITGLYETRIDLSQLGGDGGGGSGSSGGGGGIPWLMKKPLQLTTLVPLQEYEERLLKQTMLTGSYKEKLQSLFLKYDALWQHWENQVGHRRIKPHHIATGTVNPRPQKQYPINPKAKASIQTVINDLLKQGVLIQQNSIMNTPVYPVPKPDGKWRMVLDYREVNKTIPLIAAQNQHSAGILSSIFRGKYKTTLDLSNGFWAHSITPESYWLTAFTWLGQQYCWTRLPQGFLNSPALFNADVVDLLKEVPNVQVYVDDIYISHDDPREHLEQLEKVFSLLLNAGYVVSLKKSEIAQHEVEFLGFNITKEGRGLTETFKQKLLNITPPRDLKQLQSILGKLNFARNFIPNFSELVKPLYNIIATAPGKYITWTTDNSQQLQNIISMLNSAENLEERNPEVRLIMKVNTSPSAGYIRFYNEFAKRPIMYLNYVYTKAEVKFTNTEKLLTTIHKGLIKALDLGMGQEILVYSPIVSMTKIQKTPLPERKALPIRWITWMSYLEDPRIQFHYDKTLPELQQVPTVTDDIIAKIKHPSEFSMVFYTDGSAIKHPNVNKSHNAGMGIAQVQFKPEFTVINTWSIPLGDHTAQLAEVAAVEFACKKALKIDGPVLIVTDSFYVAESVNKELPYWQSNGFFNNKKKPLKHVSKWKSIADCIQLKPDIIIIHEKGHQPTASTFHTEGNNLADKLATQGSYVVNAGKRTADGSEFEKRTADGSEFESPKKKAKVE

SEQ ID NO: 566 - protein, 2091 aa, synthetic construct
MPAAKRVKLDGGDKKYSIGLDIGTNSVGWAVITDEYKVPSKKFKVLGNTDRHSIKKNLIGALLFDSGETAEATRLKRTARRRYTRRKNRICYLQEIFSNEMAKVDDSFFHRLEESFLVEEDKKHERHPIFGNIVDEVAYHEKYPTIYHLRKKLVDSTDKADLRLIYLALAHMIKFRGHFLIEGDLNPDNSDVDKLFIQLVQTYNQLFEENPINASGVDAKAILSARLSKSRRLENLIAQLPGEKKNGLFGNLIALSLGLTPNFKSNFDLAEDAKLQLSKDTYDDDLDNLLAQIGDQYADLFLAAKNLSDAILLSDILRVNTEITKAPLSASMIKRYDEHHQDLTLLKALVRQQLPEKYKEIFFDQSKNGYAGYIDGGASQEEFYKFIKPILEKMDGTEELLVKLNREDLLRKQRTFDNGSIPHQIHLGELHAILRRQEDFYPFLKDNREKIEKILTFRIPYYVGPLARGNSRFAWMTRKSEETITPWNFEEVVDKGASAQSFIERMTNFDKNLPNEKVLPKHSLLYEYFTVYNELTKVKYVTEGMRKPAFLSGEQKKAIVDLLFKTNRKVTVKQLKEDYFKKIECFDSVEISGVEDRFNASLGTYHDLLKIIKDKDFLDNEENEDILEDIVLTLTLFEDREMIEERLKTYAHLFDDKVMKQLKRRRYTGWGRLSRKLINGIRDKQSGKTILDFLKSDGFANRNFMQLIHDDSLTFKEDIQKAQVSGQGDSLHEHIANLAGSPAIKKGILQTVKVVDELVKVMGRHKPENIVIEMARENQTTQKGQKNSRERMKRIEEGIKELGSQILKEHPVENTQLQNEKLYLYYLQNGRDMYVDQELDINRLSDYDVDHIVPQSFLKDDSIDNKVLTRSDKARGKSDNVPSEEVVKKMKNYWRQLLNAKLITQRKFDNLTKAERGGLSELDKAGFIKRQLVETRQITKHVAQILDSRMNTKYDENDKLIREVKVITLKSKLVSDFRKDFQFYKVREINNYHHAHDAYLNAVVGTALIKKYPKLESEFVYGDYKVYDVRKMIAKSEQEIGKATAKYFFYSNIMNFFKTEITLANGEIRKRPLIETNGETGEIVWDKGRDFATVRKVLSMPQVNIVKKTEVQTGGFSKESILPKRNSDKLIARKKDWDPKKYGGFDSPTVAYSVLVVAKVEKGKSKKLKSVKELLGITIMERSSFEKNPIDFLEAKGYKEVKKDLIIKLPKYSLFELENGRKRMLASAGELQKGNELALPSKYVNFLYLASHYEKLKGSPEDNEQKQLFVEQHKHYLDEIIEQISEFSKRVILADANLDKVLSAYNKHRDKPIREQAENIIHLFTLTNLGAPAAFKYFDTTIDRKRYTSTKEVLDATLIHQSITGLYETRIDLSQLGGDGGGGSGGSGGSGGSGGSGGIPWLMKKPLQLTTLVPLQEYEERLLKQTMLTGSYKEKLQSLFLKYDALWQHWENQVGHRRIKPHHIATGTVNPRPQKQYPINPKAKASIQTVINDLLKQGVLIQQNSIMNTPVYPVPKPDGKWRMVLDYREVNKTIPLIAAQNQHSAGILSSIFRGKYKTTLDLSNGFWAHSITPESYWLTAFTWLGQQYCWTRLPQGFLNSPALFNADVVDLLKEVPNVQVYVDDIYISHDDPREHLEQLEKVFSLLLNAGYVVSLKKSEIAQHEVEFLGFNITKEGRGLTETFKQKLLNITPPRDLKQLQSILGKLNFARNFIPNFSELVKPLYNIIATAPGKYITWTTDNSQQLQNIISMLNSAENLEERNPEVRLIMKVNTSPSAGYIRFYNEFAKRPIMYLNYVYTKAEVKFTNTEKLLTTIHKGLIKALDLGMGQEILVYSPIVSMTKIQKTPLPERKALPIRWITWMSYLEDPRIQFHYDKTLPELQQVPTVTDDIIAKIKHPSEFSMVFYTDGSAIKHPNVNKSHNAGMGIAQVQFKPEFTVINTWSIPLGDHTAQLAEVAAVEFACKKALKIDGPVLIVTDSFYVAESVNKELPYWQSNGFFNNKKKPLKHVSKWKSIADCIQLKPDIIIIHEKGHQPTASTFHTEGNNLADKLATQGSYVVNAGKRTADGSEFEKRTADGSEFESPKKKAKVE

SEQ ID NO: 567 - protein, 2087 aa, synthetic construct
MPAAKRVKLDGGDKKYSIGLDIGTNSVGWAVITDEYKVPSKKFKVLGNTDRHSIKKNLIGALLFDSGETAEATRLKRTARRRYTRRKNRICYLQEIFSNEMAKVDDSFFHRLEESFLVEEDKKHERHPIFGNIVDEVAYHEKYPTIYHLRKKLVDSTDKADLRLIYLALAHMIKFRGHFLIEGDLNPDNSDVDKLFIQLVQTYNQLFEENPINASGVDAKAILSARLSKSRRLENLIAQLPGEKKNGLFGNLIALSLGLTPNFKSNFDLAEDAKLQLSKDTYDDDLDNLLAQIGDQYADLFLAAKNLSDAILLSDILRVNTEITKAPLSASMIKRYDEHHQDLTLLKALVRQQLPEKYKEIFFDQSKNGYAGYIDGGASQEEFYKFIKPILEKMDGTEELLVKLNREDLLRKQRTFDNGSIPHQIHLGELHAILRRQEDFYPFLKDNREKIEKILTFRIPYYVGPLARGNSRFAWMTRKSEETITPWNFEEVVDKGASAQSFIERMTNFDKNLPNEKVLPKHSLLYEYFTVYNELTKVKYVTEGMRKPAFLSGEQKKAIVDLLFKTNRKVTVKQLKEDYFKKIECFDSVEISGVEDRFNASLGTYHDLLKIIKDKDFLDNEENEDILEDIVLTLTLFEDREMIEERLKTYAHLFDDKVMKQLKRRRYTGWGRLSRKLINGIRDKQSGKTILDFLKSDGFANRNFMQLIHDDSLTFKEDIQKAQVSGQGDSLHEHIANLAGSPAIKKGILQTVKVVDELVKVMGRHKPENIVIEMARENQTTQKGQKNSRERMKRIEEGIKELGSQILKEHPVENTQLQNEKLYLYYLQNGRDMYVDQELDINRLSDYDVDHIVPQSFLKDDSIDNKVLTRSDKARGKSDNVPSEEVVKKMKNYWRQLLNAKLITQRKFDNLTKAERGGLSELDKAGFIKRQLVETRQITKHVAQILDSRMNTKYDENDKLIREVKVITLKSKLVSDFRKDFQFYKVREINNYHHAHDAYLNAVVGTALIKKYPKLESEFVYGDYKVYDVRKMIAKSEQEIGKATAKYFFYSNIMNFFKTEITLANGEIRKRPLIETNGETGEIVWDKGRDFATVRKVLSMPQVNIVKKTEVQTGGFSKESILPKRNSDKLIARKKDWDPKKYGGFDSPTVAYSVLVVAKVEKGKSKKLKSVKELLGITIMERSSFEKNPIDFLEAKGYKEVKKDLIIKLPKYSLFELENGRKRMLASAGELQKGNELALPSKYVNFLYLASHYEKLKGSPEDNEQKQLFVEQHKHYLDEIIEQISEFSKRVILADANLDKVLSAYNKHRDKPIREQAENIIHLFTLTNLGAPAAFKYFDTTIDRKRYTSTKEVLDATLIHQSITGLYETRIDLSQLGGDGGGSSEAAAKGGGGGIPWLMKKPLQLTTLVPLQEYEERLLKQTMLTGSYKEKLQSLFLKYDALWQHWENQVGHRRIKPHHIATGTVNPRPQKQYPINPKAKASIQTVINDLLKQGVLIQQNSIMNTPVYPVPKPDGKWRMVLDYREVNKTIPLIAAQNQHSAGILSSIFRGKYKTTLDLSNGFWAHSITPESYWLTAFTWLGQQYCWTRLPQGFLNSPALFNADVVDLLKEVPNVQVYVDDIYISHDDPREHLEQLEKVFSLLLNAGYVVSLKKSEIAQHEVEFLGFNITKEGRGLTETFKQKLLNITPPRDLKQLQSILGKLNFARNFIPNFSELVKPLYNIIATAPGKYITWTTDNSQQLQNIISMLNSAENLEERNPEVRLIMKVNTSPSAGYIRFYNEFAKRPIMYLNYVYTKAEVKFTNTEKLLTTIHKGLIKALDLGMGQEILVYSPIVSMTKIQKTPLPERKALPIRWITWMSYLEDPRIQFHYDKTLPELQQVPTVTDDIIAKIKHPSEFSMVFYTDGSAIKHPNVNKSHNAGMGIAQVQFKPEFTVINTWSIPLGDHTAQLAEVAAVEFACKKALKIDGPVLIVTDSFYVAESVNKELPYWQSNGFFNNKKKPLKHVSKWKSIADCIQLKPDIIIIHEKGHQPTASTFHTEGNNLADKLATQGSYVVNAGKRTADGSEFEKRTADGSEFESPKKKAKVE

SEQ ID NO: 568 - protein, 2085 aa, synthetic construct
MPAAKRVKLDGGDKKYSIGLDIGTNSVGWAVITDEYKVPSKKFKVLGNTDRHSIKKNLIGALLFDSGETAEATRLKRTARRRYTRRKNRICYLQEIFSNEMAKVDDSFFHRLEESFLVEEDKKHERHPIFGNIVDEVAYHEKYPTIYHLRKKLVDSTDKADLRLIYLALAHMIKFRGHFLIEGDLNPDNSDVDKLFIQLVQTYNQLFEENPINASGVDAKAILSARLSKSRRLENLIAQLPGEKKNGLFGNLIALSLGLTPNFKSNFDLAEDAKLQLSKDTYDDDLDNLLAQIGDQYADLFLAAKNLSDAILLSDILRVNTEITKAPLSASMIKRYDEHHQDLTLLKALVRQQLPEKYKEIFFDQSKNGYAGYIDGGASQEEFYKFIKPILEKMDGTEELLVKLNREDLLRKQRTFDNGSIPHQIHLGELHAILRRQEDFYPFLKDNREKIEKILTFRIPYYVGPLARGNSRFAWMTRKSEETITPWNFEEVVDKGASAQSFIERMTNFDKNLPNEKVLPKHSLLYEYFTVYNELTKVKYVTEGMRKPAFLSGEQKKAIVDLLFKTNRKVTVKQLKEDYFKKIECFDSVEISGVEDRFNASLGTYHDLLKIIKDKDFLDNEENEDILEDIVLTLTLFEDREMIEERLKTYAHLFDDKVMKQLKRRRYTGWGRLSRKLINGIRDKQSGKTILDFLKSDGFANRNFMQLIHDDSLTFKEDIQKAQVSGQGDSLHEHIANLAGSPAIKKGILQTVKVVDELVKVMGRHKPENIVIEMARENQTTQKGQKNSRERMKRIEEGIKELGSQILKEHPVENTQLQNEKLYLYYLQNGRDMYVDQELDINRLSDYDVDHIVPQSFLKDDSIDNKVLTRSDKARGKSDNVPSEEVVKKMKNYWRQLLNAKLITQRKFDNLTKAERGGLSELDKAGFIKRQLVETRQITKHVAQILDSRMNTKYDENDKLIREVKVITLKSKLVSDFRKDFQFYKVREINNYHHAHDAYLNAVVGTALIKKYPKLESEFVYGDYKVYDVRKMIAKSEQEIGKATAKYFFYSNIMNFFKTEITLANGEIRKRPLIETNGETGEIVWDKGRDFATVRKVLSMPQVNIVKKTEVQTGGFSKESILPKRNSDKLIARKKDWDPKKYGGFDSPTVAYSVLVVAKVEKGKSKKLKSVKELLGITIMERSSFEKNPIDFLEAKGYKEVKKDLIIKLPKYSLFELENGRKRMLASAGELQKGNELALPSKYVNFLYLASHYEKLKGSPEDNEQKQLFVEQHKHYLDEIIEQISEFSKRVILADANLDKVLSAYNKHRDKPIREQAENIIHLFTLTNLGAPAAFKYFDTTIDRKRYTSTKEVLDATLIHQSITGLYETRIDLSQLGGDGGGGGPAPGSSGGIPWLMKKPLQLTTLVPLQEYEERLLKQTMLTGSYKEKLQSLFLKYDALWQHWENQVGHRRIKPHHIATGTVNPRPQKQYPINPKAKASIQTVINDLLKQGVLIQQNSIMNTPVYPVPKPDGKWRMVLDYREVNKTIPLIAAQNQHSAGILSSIFRGKYKTTLDLSNGFWAHSITPESYWLTAFTWLGQQYCWTRLPQGFLNSPALFNADVVDLLKEVPNVQVYVDDIYISHDDPREHLEQLEKVFSLLLNAGYVVSLKKSEIAQHEVEFLGFNITKEGRGLTETFKQKLLNITPPRDLKQLQSILGKLNFARNFIPNFSELVKPLYNIIATAPGKYITWTTDNSQQLQNIISMLNSAENLEERNPEVRLIMKVNTSPSAGYIRFYNEFAKRPIMYLNYVYTKAEVKFTNTEKLLTTIHKGLIKALDLGMGQEILVYSPIVSMTKIQKTPLPERKALPIRWITWMSYLEDPRIQFHYDKTLPELQQVPTVTDDIIAKIKHPSEFSMVFYTDGSAIKHPNVNKSHNAGMGIAQVQFKPEFTVINTWSIPLGDHTAQLAEVAAVEFACKKALKIDGPVLIVTDSFYVAESVNKELPYWQSNGFFNNKKKPLKHVSKWKSIADCIQLKPDIIIIHEKGHQPTASTFHTEGNNLADKLATQGSYVVNAGKRTADGSEFEKRTADGSEFESPKKKAKVE

SEQ ID NO: 569 - protein, 2087 aa, synthetic construct
MPAAKRVKLDGGDKKYSIGLDIGTNSVGWAVITDEYKVPSKKFKVLGNTDRHSIKKNLIGALLFDSGETAEATRLKRTARRRYTRRKNRICYLQEIFSNEMAKVDDSFFHRLEESFLVEEDKKHERHPIFGNIVDEVAYHEKYPTIYHLRKKLVDSTDKADLRLIYLALAHMIKFRGHFLIEGDLNPDNSDVDKLFIQLVQTYNQLFEENPINASGVDAKAILSARLSKSRRLENLIAQLPGEKKNGLFGNLIALSLGLTPNFKSNFDLAEDAKLQLSKDTYDDDLDNLLAQIGDQYADLFLAAKNLSDAILLSDILRVNTEITKAPLSASMIKRYDEHHQDLTLLKALVRQQLPEKYKEIFFDQSKNGYAGYIDGGASQEEFYKFIKPILEKMDGTEELLVKLNREDLLRKQRTFDNGSIPHQIHLGELHAILRRQEDFYPFLKDNREKIEKILTFRIPYYVGPLARGNSRFAWMTRKSEETITPWNFEEVVDKGASAQSFIERMTNFDKNLPNEKVLPKHSLLYEYFTVYNELTKVKYVTEGMRKPAFLSGEQKKAIVDLLFKTNRKVTVKQLKEDYFKKIECFDSVEISGVEDRFNASLGTYHDLLKIIKDKDFLDNEENEDILEDIVLTLTLFEDREMIEERLKTYAHLFDDKVMKQLKRRRYTGWGRLSRKLINGIRDKQSGKTILDFLKSDGFANRNFMQLIHDDSLTFKEDIQKAQVSGQGDSLHEHIANLAGSPAIKKGILQTVKVVDELVKVMGRHKPENIVIEMARENQTTQKGQKNSRERMKRIEEGIKELGSQILKEHPVENTQLQNEKLYLYYLQNGRDMYVDQELDINRLSDYDVDHIVPQSFLKDDSIDNKVLTRSDKARGKSDNVPSEEVVKKMKNYWRQLLNAKLITQRKFDNLTKAERGGLSELDKAGFIKRQLVETRQITKHVAQILDSRMNTKYDENDKLIREVKVITLKSKLVSDFRKDFQFYKVREINNYHHAHDAYLNAVVGTALIKKYPKLESEFVYGDYKVYDVRKMIAKSEQEIGKATAKYFFYSNIMNFFKTEITLANGEIRKRPLIETNGETGEIVWDKGRDFATVRKVLSMPQVNIVKKTEVQTGGFSKESILPKRNSDKLIARKKDWDPKKYGGFDSPTVAYSVLVVAKVEKGKSKKLKSVKELLGITIMERSSFEKNPIDFLEAKGYKEVKKDLIIKLPKYSLFELENGRKRMLASAGELQKGNELALPSKYVNFLYLASHYEKLKGSPEDNEQKQLFVEQHKHYLDEIIEQISEFSKRVILADANLDKVLSAYNKHRDKPIREQAENIIHLFTLTNLGAPAAFKYFDTTIDRKRYTSTKEVLDATLIHQSITGLYETRIDLSQLGGDGGPAPAPAPAPAPGGIPWLMKKPLQLTTLVPLQEYEERLLKQTMLTGSYKEKLQSLFLKYDALWQHWENQVGHRRIKPHHIATGTVNPRPQKQYPINPKAKASIQTVINDLLKQGVLIQQNSIMNTPVYPVPKPDGKWRMVLDYREVNKTIPLIAAQNQHSAGILSSIFRGKYKTTLDLSNGFWAHSITPESYWLTAFTWLGQQYCWTRLPQGFLNSPALFNADVVDLLKEVPNVQVYVDDIYISHDDPREHLEQLEKVFSLLLNAGYVVSLKKSEIAQHEVEFLGFNITKEGRGLTETFKQKLLNITPPRDLKQLQSILGKLNFARNFIPNFSELVKPLYNIIATAPGKYITWTTDNSQQLQNIISMLNSAENLEERNPEVRLIMKVNTSPSAGYIRFYNEFAKRPIMYLNYVYTKAEVKFTNTEKLLTTIHKGLIKALDLGMGQEILVYSPIVSMTKIQKTPLPERKALPIRWITWMSYLEDPRIQFHYDKTLPELQQVPTVTDDIIAKIKHPSEFSMVFYTDGSAIKHPNVNKSHNAGMGIAQVQFKPEFTVINTWSIPLGDHTAQLAEVAAVEFACKKALKIDGPVLIVTDSFYVAESVNKELPYWQSNGFFNNKKKPLKHVSKWKSIADCIQLKPDIIIIHEKGHQPTASTFHTEGNNLADKLATQGSYVVNAGKRTADGSEFEKRTADGSEFESPKKKAKVE

SEQ ID NO: 570 - protein, 2101 aa, synthetic construct
MPAAKRVKLDGGDKKYSIGLDIGTNSVGWAVITDEYKVPSKKFKVLGNTDRHSIKKNLIGALLFDSGETAEATRLKRTARRRYTRRKNRICYLQEIFSNEMAKVDDSFFHRLEESFLVEEDKKHERHPIFGNIVDEVAYHEKYPTIYHLRKKLVDSTDKADLRLIYLALAHMIKFRGHFLIEGDLNPDNSDVDKLFIQLVQTYNQLFEENPINASGVDAKAILSARLSKSRRLENLIAQLPGEKKNGLFGNLIALSLGLTPNFKSNFDLAEDAKLQLSKDTYDDDLDNLLAQIGDQYADLFLAAKNLSDAILLSDILRVNTEITKAPLSASMIKRYDEHHQDLTLLKALVRQQLPEKYKEIFFDQSKNGYAGYIDGGASQEEFYKFIKPILEKMDGTEELLVKLNREDLLRKQRTFDNGSIPHQIHLGELHAILRRQEDFYPFLKDNREKIEKILTFRIPYYVGPLARGNSRFAWMTRKSEETITPWNFEEVVDKGASAQSFIERMTNFDKNLPNEKVLPKHSLLYEYFTVYNELTKVKYVTEGMRKPAFLSGEQKKAIVDLLFKTNRKVTVKQLKEDYFKKIECFDSVEISGVEDRFNASLGTYHDLLKIIKDKDFLDNEENEDILEDIVLTLTLFEDREMIEERLKTYAHLFDDKVMKQLKRRRYTGWGRLSRKLINGIRDKQSGKTILDFLKSDGFANRNFMQLIHDDSLTFKEDIQKAQVSGQGDSLHEHIANLAGSPAIKKGILQTVKVVDELVKVMGRHKPENIVIEMARENQTTQKGQKNSRERMKRIEEGIKELGSQILKEHPVENTQLQNEKLYLYYLQNGRDMYVDQELDINRLSDYDVDHIVPQSFLKDDSIDNKVLTRSDKARGKSDNVPSEEVVKKMKNYWRQLLNAKLITQRKFDNLTKAERGGLSELDKAGFIKRQLVETRQITKHVAQILDSRMNTKYDENDKLIREVKVITLKSKLVSDFRKDFQFYKVREINNYHHAHDAYLNAVVGTALIKKYPKLESEFVYGDYKVYDVRKMIAKSEQEIGKATAKYFFYSNIMNFFKTEITLANGEIRKRPLIETNGETGEIVWDKGRDFATVRKVLSMPQVNIVKKTEVQTGGFSKESILPKRNSDKLIARKKDWDPKKYGGFDSPTVAYSVLVVAKVEKGKSKKLKSVKELLGITIMERSSFEKNPIDFLEAKGYKEVKKDLIIKLPKYSLFELENGRKRMLASAGELQKGNELALPSKYVNFLYLASHYEKLKGSPEDNEQKQLFVEQHKHYLDEIIEQISEFSKRVILADANLDKVLSAYNKHRDKPIREQAENIIHLFTLTNLGAPAAFKYFDTTIDRKRYTSTKEVLDATLIHQSITGLYETRIDLSQLGGDGGEAAAKEAAAKEAAAKEAAAKEAAAKGGIPWLMKKPLQLTTLVPLQEYEERLLKQTMLTGSYKEKLQSLFLKYDALWQHWENQVGHRRIKPHHIATGTVNPRPQKQYPINPKAKASIQTVINDLLKQGVLIQQNSIMNTPVYPVPKPDGKWRMVLDYREVNKTIPLIAAQNQHSAGILSSIFRGKYKTTLDLSNGFWAHSITPESYWLTAFTWLGQQYCWTRLPQGFLNSPALFNADVVDLLKEVPNVQVYVDDIYISHDDPREHLEQLEKVFSLLLNAGYVVSLKKSEIAQHEVEFLGFNITKEGRGLTETFKQKLLNITPPRDLKQLQSILGKLNFARNFIPNFSELVKPLYNIIATAPGKYITWTTDNSQQLQNIISMLNSAENLEERNPEVRLIMKVNTSPSAGYIRFYNEFAKRPIMYLNYVYTKAEVKFTNTEKLLTTIHKGLIKALDLGMGQEILVYSPIVSMTKIQKTPLPERKALPIRWITWMSYLEDPRIQFHYDKTLPELQQVPTVTDDIIAKIKHPSEFSMVFYTDGSAIKHPNVNKSHNAGMGIAQVQFKPEFTVINTWSIPLGDHTAQLAEVAAVEFACKKALKIDGPVLIVTDSFYVAESVNKELPYWQSNGFFNNKKKPLKHVSKWKSIADCIQLKPDIIIIHEKGHQPTASTFHTEGNNLADKLATQGSYVVNAGKRTADGSEFEKRTADGSEFESPKKKAKVE

SEQ ID NO: 571 - protein, 2087 aa, synthetic construct
MPAAKRVKLDGGDKKYSIGLDIGTNSVGWAVITDEYKVPSKKFKVLGNTDRHSIKKNLIGALLFDSGETAEATRLKRTARRRYTRRKNRICYLQEIFSNEMAKVDDSFFHRLEESFLVEEDKKHERHPIFGNIVDEVAYHEKYPTIYHLRKKLVDSTDKADLRLIYLALAHMIKFRGHFLIEGDLNPDNSDVDKLFIQLVQTYNQLFEENPINASGVDAKAILSARLSKSRRLENLIAQLPGEKKNGLFGNLIALSLGLTPNFKSNFDLAEDAKLQLSKDTYDDDLDNLLAQIGDQYADLFLAAKNLSDAILLSDILRVNTEITKAPLSASMIKRYDEHHQDLTLLKALVRQQLPEKYKEIFFDQSKNGYAGYIDGGASQEEFYKFIKPILEKMDGTEELLVKLNREDLLRKQRTFDNGSIPHQIHLGELHAILRRQEDFYPFLKDNREKIEKILTFRIPYYVGPLARGNSRFAWMTRKSEETITPWNFEEVVDKGASAQSFIERMTNFDKNLPNEKVLPKHSLLYEYFTVYNELTKVKYVTEGMRKPAFLSGEQKKAIVDLLFKTNRKVTVKQLKEDYFKKIECFDSVEISGVEDRFNASLGTYHDLLKIIKDKDFLDNEENEDILEDIVLTLTLFEDREMIEERLKTYAHLFDDKVMKQLKRRRYTGWGRLSRKLINGIRDKQSGKTILDFLKSDGFANRNFMQLIHDDSLTFKEDIQKAQVSGQGDSLHEHIANLAGSPAIKKGILQTVKVVDELVKVMGRHKPENIVIEMARENQTTQKGQKNSRERMKRIEEGIKELGSQILKEHPVENTQLQNEKLYLYYLQNGRDMYVDQELDINRLSDYDVDHIVPQSFLKDDSIDNKVLTRSDKARGKSDNVPSEEVVKKMKNYWRQLLNAKLITQRKFDNLTKAERGGLSELDKAGFIKRQLVETRQITKHVAQILDSRMNTKYDENDKLIREVKVITLKSKLVSDFRKDFQFYKVREINNYHHAHDAYLNAVVGTALIKKYPKLESEFVYGDYKVYDVRKMIAKSEQEIGKATAKYFFYSNIMNFFKTEITLANGEIRKRPLIETNGETGEIVWDKGRDFATVRKVLSMPQVNIVKKTEVQTGGFSKESILPKRNSDKLIARKKDWDPKKYGGFDSPTVAYSVLVVAKVEKGKSKKLKSVKELLGITIMERSSFEKNPIDFLEAKGYKEVKKDLIIKLPKYSLFELENGRKRMLASAGELQKGNELALPSKYVNFLYLASHYEKLKGSPEDNEQKQLFVEQHKHYLDEIIEQISEFSKRVILADANLDKVLSAYNKHRDKPIREQAENIIHLFTLTNLGAPAAFKYFDTTIDRKRYTSTKEVLDATLIHQSITGLYETRIDLSQLGGDGGGGSGSSEAAAKGGIPWLMKKPLQLTTLVPLQEYEERLLKQTMLTGSYKEKLQSLFLKYDALWQHWENQVGHRRIKPHHIATGTVNPRPQKQYPINPKAKASIQTVINDLLKQGVLIQQNSIMNTPVYPVPKPDGKWRMVLDYREVNKTIPLIAAQNQHSAGILSSIFRGKYKTTLDLSNGFWAHSITPESYWLTAFTWLGQQYCWTRLPQGFLNSPALFNADVVDLLKEVPNVQVYVDDIYISHDDPREHLEQLEKVFSLLLNAGYVVSLKKSEIAQHEVEFLGFNITKEGRGLTETFKQKLLNITPPRDLKQLQSILGKLNFARNFIPNFSELVKPLYNIIATAPGKYITWTTDNSQQLQNIISMLNSAENLEERNPEVRLIMKVNTSPSAGYIRFYNEFAKRPIMYLNYVYTKAEVKFTNTEKLLTTIHKGLIKALDLGMGQEILVYSPIVSMTKIQKTPLPERKALPIRWITWMSYLEDPRIQFHYDKTLPELQQVPTVTDDIIAKIKHPSEFSMVFYTDGSAIKHPNVNKSHNAGMGIAQVQFKPEFTVINTWSIPLGDHTAQLAEVAAVEFACKKALKIDGPVLIVTDSFYVAESVNKELPYWQSNGFFNNKKKPLKHVSKWKSIADCIQLKPDIIIIHEKGHQPTASTFHTEGNNLADKLATQGSYVVNAGKRTADGSEFEKRTADGSEFESPKKKAKVE

SEQ ID NO: 572 - protein, 2087 aa, synthetic construct
MPAAKRVKLDGGDKKYSIGLDIGTNSVGWAVITDEYKVPSKKFKVLGNTDRHSIKKNLIGALLFDSGETAEATRLKRTARRRYTRRKNRICYLQEIFSNEMAKVDDSFFHRLEESFLVEEDKKHERHPIFGNIVDEVAYHEKYPTIYHLRKKLVDSTDKADLRLIYLALAHMIKFRGHFLIEGDLNPDNSDVDKLFIQLVQTYNQLFEENPINASGVDAKAILSARLSKSRRLENLIAQLPGEKKNGLFGNLIALSLGLTPNFKSNFDLAEDAKLQLSKDTYDDDLDNLLAQIGDQYADLFLAAKNLSDAILLSDILRVNTEITKAPLSASMIKRYDEHHQDLTLLKALVRQQLPEKYKEIFFDQSKNGYAGYIDGGASQEEFYKFIKPILEKMDGTEELLVKLNREDLLRKQRTFDNGSIPHQIHLGELHAILRRQEDFYPFLKDNREKIEKILTFRIPYYVGPLARGNSRFAWMTRKSEETITPWNFEEVVDKGASAQSFIERMTNFDKNLPNEKVLPKHSLLYEYFTVYNELTKVKYVTEGMRKPAFLSGEQKKAIVDLLFKTNRKVTVKQLKEDYFKKIECFDSVEISGVEDRFNASLGTYHDLLKIIKDKDFLDNEENEDILEDIVLTLTLFEDREMIEERLKTYAHLFDDKVMKQLKRRRYTGWGRLSRKLINGIRDKQSGKTILDFLKSDGFANRNFMQLIHDDSLTFKEDIQKAQVSGQGDSLHEHIANLAGSPAIKKGILQTVKVVDELVKVMGRHKPENIVIEMARENQTTQKGQKNSRERMKRIEEGIKELGSQILKEHPVENTQLQNEKLYLYYLQNGRDMYVDQELDINRLSDYDVDHIVPQSFLKDDSIDNKVLTRSDKARGKSDNVPSEEVVKKMKNYWRQLLNAKLITQRKFDNLTKAERGGLSELDKAGFIKRQLVETRQITKHVAQILDSRMNTKYDENDKLIREVKVITLKSKLVSDFRKDFQFYKVREINNYHHAHDAYLNAVVGTALIKKYPKLESEFVYGDYKVYDVRKMIAKSEQEIGKATAKYFFYSNIMNFFKTEITLANGEIRKRPLIETNGETGEIVWDKGRDFATVRKVLSMPQVNIVKKTEVQTGGFSKESILPKRNSDKLIARKKDWDPKKYGGFDSPTVAYSVLVVAKVEKGKSKKLKSVKELLGITIMERSSFEKNPIDFLEAKGYKEVKKDLIIKLPKYSLFELENGRKRMLASAGELQKGNELALPSKYVNFLYLASHYEKLKGSPEDNEQKQLFVEQHKHYLDEIIEQISEFSKRVILADANLDKVLSAYNKHRDKPIREQAENIIHLFTLTNLGAPAAFKYFDTTIDRKRYTSTKEVLDATLIHQSITGLYETRIDLSQLGGDGGEAAAKGGSPAPGGIPWLMKKPLQLTTLVPLQEYEERLLKQTMLTGSYKEKLQSLFLKYDALWQHWENQVGHRRIKPHHIATGTVNPRPQKQYPINPKAKASIQTVINDLLKQGVLIQQNSIMNTPVYPVPKPDGKWRMVLDYREVNKTIPLIAAQNQHSAGILSSIFRGKYKTTLDLSNGFWAHSITPESYWLTAFTWLGQQYCWTRLPQGFLNSPALFNADVVDLLKEVPNVQVYVDDIYISHDDPREHLEQLEKVFSLLLNAGYVVSLKKSEIAQHEVEFLGFNITKEGRGLTETFKQKLLNITPPRDLKQLQSILGKLNFARNFIPNFSELVKPLYNIIATAPGKYITWTTDNSQQLQNIISMLNSAENLEERNPEVRLIMKVNTSPSAGYIRFYNEFAKRPIMYLNYVYTKAEVKFTNTEKLLTTIHKGLIKALDLGMGQEILVYSPIVSMTKIQKTPLPERKALPIRWITWMSYLEDPRIQFHYDKTLPELQQVPTVTDDIIAKIKHPSEFSMVFYTDGSAIKHPNVNKSHNAGMGIAQVQFKPEFTVINTWSIPLGDHTAQLAEVAAVEFACKKALKIDGPVLIVTDSFYVAESVNKELPYWQSNGFFNNKKKPLKHVSKWKSIADCIQLKPDIIIIHEKGHQPTASTFHTEGNNLADKLATQGSYVVNAGKRTADGSEFEKRTADGSEFESPKKKAKVE

SEQ ID NO: 573 - protein, 2085 aa, synthetic construct
MPAAKRVKLDGGDKKYSIGLDIGTNSVGWAVITDEYKVPSKKFKVLGNTDRHSIKKNLIGALLFDSGETAEATRLKRTARRRYTRRKNRICYLQEIFSNEMAKVDDSFFHRLEESFLVEEDKKHERHPIFGNIVDEVAYHEKYPTIYHLRKKLVDSTDKADLRLIYLALAHMIKFRGHFLIEGDLNPDNSDVDKLFIQLVQTYNQLFEENPINASGVDAKAILSARLSKSRRLENLIAQLPGEKKNGLFGNLIALSLGLTPNFKSNFDLAEDAKLQLSKDTYDDDLDNLLAQIGDQYADLFLAAKNLSDAILLSDILRVNTEITKAPLSASMIKRYDEHHQDLTLLKALVRQQLPEKYKEIFFDQSKNGYAGYIDGGASQEEFYKFIKPILEKMDGTEELLVKLNREDLLRKQRTFDNGSIPHQIHLGELHAILRRQEDFYPFLKDNREKIEKILTFRIPYYVGPLARGNSRFAWMTRKSEETITPWNFEEVVDKGASAQSFIERMTNFDKNLPNEKVLPKHSLLYEYFTVYNELTKVKYVTEGMRKPAFLSGEQKKAIVDLLFKTNRKVTVKQLKEDYFKKIECFDSVEISGVEDRFNASLGTYHDLLKIIKDKDFLDNEENEDILEDIVLTLTLFEDREMIEERLKTYAHLFDDKVMKQLKRRRYTGWGRLSRKLINGIRDKQSGKTILDFLKSDGFANRNFMQLIHDDSLTFKEDIQKAQVSGQGDSLHEHIANLAGSPAIKKGILQTVKVVDELVKVMGRHKPENIVIEMARENQTTQKGQKNSRERMKRIEEGIKELGSQILKEHPVENTQLQNEKLYLYYLQNGRDMYVDQELDINRLSDYDVDHIVPQSFLKDDSIDNKVLTRSDKARGKSDNVPSEEVVKKMKNYWRQLLNAKLITQRKFDNLTKAERGGLSELDKAGFIKRQLVETRQITKHVAQILDSRMNTKYDENDKLIREVKVITLKSKLVSDFRKDFQFYKVREINNYHHAHDAYLNAVVGTALIKKYPKLESEFVYGDYKVYDVRKMIAKSEQEIGKATAKYFFYSNIMNFFKTEITLANGEIRKRPLIETNGETGEIVWDKGRDFATVRKVLSMPQVNIVKKTEVQTGGFSKESILPKRNSDKLIARKKDWDPKKYGGFDSPTVAYSVLVVAKVEKGKSKKLKSVKELLGITIMERSSFEKNPIDFLEAKGYKEVKKDLIIKLPKYSLFELENGRKRMLASAGELQKGNELALPSKYVNFLYLASHYEKLKGSPEDNEQKQLFVEQHKHYLDEIIEQISEFSKRVILADANLDKVLSAYNKHRDKPIREQAENIIHLFTLTNLGAPAAFKYFDTTIDRKRYTSTKEVLDATLIHQSITGLYETRIDLSQLGGDGGGGSPAPGGGGGIPWLMKKPLQLTTLVPLQEYEERLLKQTMLTGSYKEKLQSLFLKYDALWQHWENQVGHRRIKPHHIATGTVNPRPQKQYPINPKAKASIQTVINDLLKQGVLIQQNSIMNTPVYPVPKPDGKWRMVLDYREVNKTIPLIAAQNQHSAGILSSIFRGKYKTTLDLSNGFWAHSITPESYWLTAFTWLGQQYCWTRLPQGFLNSPALFNADVVDLLKEVPNVQVYVDDIYISHDDPREHLEQLEKVFSLLLNAGYVVSLKKSEIAQHEVEFLGFNITKEGRGLTETFKQKLLNITPPRDLKQLQSILGKLNFARNFIPNFSELVKPLYNIIATAPGKYITWTTDNSQQLQNIISMLNSAENLEERNPEVRLIMKVNTSPSAGYIRFYNEFAKRPIMYLNYVYTKAEVKFTNTEKLLTTIHKGLIKALDLGMGQEILVYSPIVSMTKIQKTPLPERKALPIRWITWMSYLEDPRIQFHYDKTLPELQQVPTVTDDIIAKIKHPSEFSMVFYTDGSAIKHPNVNKSHNAGMGIAQVQFKPEFTVINTWSIPLGDHTAQLAEVAAVEFACKKALKIDGPVLIVTDSFYVAESVNKELPYWQSNGFFNNKKKPLKHVSKWKSIADCIQLKPDIIIIHEKGHQPTASTFHTEGNNLADKLATQGSYVVNAGKRTADGSEFEKRTADGSEFESPKKKAKVE

SEQ ID NO: 574 - protein, 2091 aa, synthetic construct
MPAAKRVKLDGGDKKYSIGLDIGTNSVGWAVITDEYKVPSKKFKVLGNTDRHSIKKNLIGALLFDSGETAEATRLKRTARRRYTRRKNRICYLQEIFSNEMAKVDDSFFHRLEESFLVEEDKKHERHPIFGNIVDEVAYHEKYPTIYHLRKKLVDSTDKADLRLIYLALAHMIKFRGHFLIEGDLNPDNSDVDKLFIQLVQTYNQLFEENPINASGVDAKAILSARLSKSRRLENLIAQLPGEKKNGLFGNLIALSLGLTPNFKSNFDLAEDAKLQLSKDTYDDDLDNLLAQIGDQYADLFLAAKNLSDAILLSDILRVNTEITKAPLSASMIKRYDEHHQDLTLLKALVRQQLPEKYKEIFFDQSKNGYAGYIDGGASQEEFYKFIKPILEKMDGTEELLVKLNREDLLRKQRTFDNGSIPHQIHLGELHAILRRQEDFYPFLKDNREKIEKILTFRIPYYVGPLARGNSRFAWMTRKSEETITPWNFEEVVDKGASAQSFIERMTNFDKNLPNEKVLPKHSLLYEYFTVYNELTKVKYVTEGMRKPAFLSGEQKKAIVDLLFKTNRKVTVKQLKEDYFKKIECFDSVEISGVEDRFNASLGTYHDLLKIIKDKDFLDNEENEDILEDIVLTLTLFEDREMIEERLKTYAHLFDDKVMKQLKRRRYTGWGRLSRKLINGIRDKQSGKTILDFLKSDGFANRNFMQLIHDDSLTFKEDIQKAQVSGQGDSLHEHIANLAGSPAIKKGILQTVKVVDELVKVMGRHKPENIVIEMARENQTTQKGQKNSRERMKRIEEGIKELGSQILKEHPVENTQLQNEKLYLYYLQNGRDMYVDQELDINRLSDYDVDHIVPQSFLKDDSIDNKVLTRSDKARGKSDNVPSEEVVKKMKNYWRQLLNAKLITQRKFDNLTKAERGGLSELDKAGFIKRQLVETRQITKHVAQILDSRMNTKYDENDKLIREVKVITLKSKLVSDFRKDFQFYKVREINNYHHAHDAYLNAVVGTALIKKYPKLESEFVYGDYKVYDVRKMIAKSEQEIGKATAKYFFYSNIMNFFKTEITLANGEIRKRPLIETNGETGEIVWDKGRDFATVRKVLSMPQVNIVKKTEVQTGGFSKESILPKRNSDKLIARKKDWDPKKYGGFDSPTVAYSVLVVAKVEKGKSKKLKSVKELLGITIMERSSFEKNPIDFLEAKGYKEVKKDLIIKLPKYSLFELENGRKRMLASAGELQKGNELALPSKYVNFLYLASHYEKLKGSPEDNEQKQLFVEQHKHYLDEIIEQISEFSKRVILADANLDKVLSAYNKHRDKPIREQAENIIHLFTLTNLGAPAAFKYFDTTIDRKRYTSTKEVLDATLIHQSITGLYETRIDLSQLGGDGGEAAAKGGGGSEAAAKGGIPWLMKKPLQLTTLVPLQEYEERLLKQTMLTGSYKEKLQSLFLKYDALWQHWENQVGHRRIKPHHIATGTVNPRPQKQYPINPKAKASIQTVINDLLKQGVLIQQNSIMNTPVYPVPKPDGKWRMVLDYREVNKTIPLIAAQNQHSAGILSSIFRGKYKTTLDLSNGFWAHSITPESYWLTAFTWLGQQYCWTRLPQGFLNSPALFNADVVDLLKEVPNVQVYVDDIYISHDDPREHLEQLEKVFSLLLNAGYVVSLKKSEIAQHEVEFLGFNITKEGRGLTETFKQKLLNITPPRDLKQLQSILGKLNFARNFIPNFSELVKPLYNIIATAPGKYITWTTDNSQQLQNIISMLNSAENLEERNPEVRLIMKVNTSPSAGYIRFYNEFAKRPIMYLNYVYTKAEVKFTNTEKLLTTIHKGLIKALDLGMGQEILVYSPIVSMTKIQKTPLPERKALPIRWITWMSYLEDPRIQFHYDKTLPELQQVPTVTDDIIAKIKHPSEFSMVFYTDGSAIKHPNVNKSHNAGMGIAQVQFKPEFTVINTWSIPLGDHTAQLAEVAAVEFACKKALKIDGPVLIVTDSFYVAESVNKELPYWQSNGFFNNKKKPLKHVSKWKSIADCIQLKPDIIIIHEKGHQPTASTFHTEGNNLADKLATQGSYVVNAGKRTADGSEFEKRTADGSEFESPKKKAKVE

SEQ ID NO: 575 - protein, 2082 aa, synthetic construct
MPAAKRVKLDGGDKKYSIGLDIGTNSVGWAVITDEYKVPSKKFKVLGNTDRHSIKKNLIGALLFDSGETAEATRLKRTARRRYTRRKNRICYLQEIFSNEMAKVDDSFFHRLEESFLVEEDKKHERHPIFGNIVDEVAYHEKYPTIYHLRKKLVDSTDKADLRLIYLALAHMIKFRGHFLIEGDLNPDNSDVDKLFIQLVQTYNQLFEENPINASGVDAKAILSARLSKSRRLENLIAQLPGEKKNGLFGNLIALSLGLTPNFKSNFDLAEDAKLQLSKDTYDDDLDNLLAQIGDQYADLFLAAKNLSDAILLSDILRVNTEITKAPLSASMIKRYDEHHQDLTLLKALVRQQLPEKYKEIFFDQSKNGYAGYIDGGASQEEFYKFIKPILEKMDGTEELLVKLNREDLLRKQRTFDNGSIPHQIHLGELHAILRRQEDFYPFLKDNREKIEKILTFRIPYYVGPLARGNSRFAWMTRKSEETITPWNFEEVVDKGASAQSFIERMTNFDKNLPNEKVLPKHSLLYEYFTVYNELTKVKYVTEGMRKPAFLSGEQKKAIVDLLFKTNRKVTVKQLKEDYFKKIECFDSVEISGVEDRFNASLGTYHDLLKIIKDKDFLDNEENEDILEDIVLTLTLFEDREMIEERLKTYAHLFDDKVMKQLKRRRYTGWGRLSRKLINGIRDKQSGKTILDFLKSDGFANRNFMQLIHDDSLTFKEDIQKAQVSGQGDSLHEHIANLAGSPAIKKGILQTVKVVDELVKVMGRHKPENIVIEMARENQTTQKGQKNSRERMKRIEEGIKELGSQILKEHPVENTQLQNEKLYLYYLQNGRDMYVDQELDINRLSDYDVDHIVPQSFLKDDSIDNKVLTRSDKARGKSDNVPSEEVVKKMKNYWRQLLNAKLITQRKFDNLTKAERGGLSELDKAGFIKRQLVETRQITKHVAQILDSRMNTKYDENDKLIREVKVITLKSKLVSDFRKDFQFYKVREINNYHHAHDAYLNAVVGTALIKKYPKLESEFVYGDYKVYDVRKMIAKSEQEIGKATAKYFFYSNIMNFFKTEITLANGEIRKRPLIETNGETGEIVWDKGRDFATVRKVLSMPQVNIVKKTEVQTGGFSKESILPKRNSDKLIARKKDWDPKKYGGFDSPTVAYSVLVVAKVEKGKSKKLKSVKELLGITIMERSSFEKNPIDFLEAKGYKEVKKDLIIKLPKYSLFELENGRKRMLASAGELQKGNELALPSKYVNFLYLASHYEKLKGSPEDNEQKQLFVEQHKHYLDEIIEQISEFSKRVILADANLDKVLSAYNKHRDKPIREQAENIIHLFTLTNLGAPAAFKYFDTTIDRKRYTSTKEVLDATLIHQSITGLYETRIDLSQLGGDGGGSSPAPGGIPWLMKKPLQLTTLVPLQEYEERLLKQTMLTGSYKEKLQSLFLKYDALWQHWENQVGHRRIKPHHIATGTVNPRPQKQYPINPKAKASIQTVINDLLKQGVLIQQNSIMNTPVYPVPKPDGKWRMVLDYREVNKTIPLIAAQNQHSAGILSSIFRGKYKTTLDLSNGFWAHSITPESYWLTAFTWLGQQYCWTRLPQGFLNSPALFNADVVDLLKEVPNVQVYVDDIYISHDDPREHLEQLEKVFSLLLNAGYVVSLKKSEIAQHEVEFLGFNITKEGRGLTETFKQKLLNITPPRDLKQLQSILGKLNFARNFIPNFSELVKPLYNIIATAPGKYITWTTDNSQQLQNIISMLNSAENLEERNPEVRLIMKVNTSPSAGYIRFYNEFAKRPIMYLNYVYTKAEVKFTNTEKLLTTIHKGLIKALDLGMGQEILVYSPIVSMTKIQKTPLPERKALPIRWITWMSYLEDPRIQFHYDKTLPELQQVPTVTDDIIAKIKHPSEFSMVFYTDGSAIKHPNVNKSHNAGMGIAQVQFKPEFTVINTWSIPLGDHTAQLAEVAAVEFACKKALKIDGPVLIVTDSFYVAESVNKELPYWQSNGFFNNKKKPLKHVSKWKSIADCIQLKPDIIIIHEKGHQPTASTFHTEGNNLADKLATQGSYVVNAGKRTADGSEFEKRTADGSEFESPKKKAKVE

SEQ ID NO: 576 - protein, 2087 aa, synthetic construct
MPAAKRVKLDGGDKKYSIGLDIGTNSVGWAVITDEYKVPSKKFKVLGNTDRHSIKKNLIGALLFDSGETAEATRLKRTARRRYTRRKNRICYLQEIFSNEMAKVDDSFFHRLEESFLVEEDKKHERHPIFGNIVDEVAYHEKYPTIYHLRKKLVDSTDKADLRLIYLALAHMIKFRGHFLIEGDLNPDNSDVDKLFIQLVQTYNQLFEENPINASGVDAKAILSARLSKSRRLENLIAQLPGEKKNGLFGNLIALSLGLTPNFKSNFDLAEDAKLQLSKDTYDDDLDNLLAQIGDQYADLFLAAKNLSDAILLSDILRVNTEITKAPLSASMIKRYDEHHQDLTLLKALVRQQLPEKYKEIFFDQSKNGYAGYIDGGASQEEFYKFIKPILEKMDGTEELLVKLNREDLLRKQRTFDNGSIPHQIHLGELHAILRRQEDFYPFLKDNREKIEKILTFRIPYYVGPLARGNSRFAWMTRKSEETITPWNFEEVVDKGASAQSFIERMTNFDKNLPNEKVLPKHSLLYEYFTVYNELTKVKYVTEGMRKPAFLSGEQKKAIVDLLFKTNRKVTVKQLKEDYFKKIECFDSVEISGVEDRFNASLGTYHDLLKIIKDKDFLDNEENEDILEDIVLTLTLFEDREMIEERLKTYAHLFDDKVMKQLKRRRYTGWGRLSRKLINGIRDKQSGKTILDFLKSDGFANRNFMQLIHDDSLTFKEDIQKAQVSGQGDSLHEHIANLAGSPAIKKGILQTVKVVDELVKVMGRHKPENIVIEMARENQTTQKGQKNSRERMKRIEEGIKELGSQILKEHPVENTQLQNEKLYLYYLQNGRDMYVDQELDINRLSDYDVDHIVPQSFLKDDSIDNKVLTRSDKARGKSDNVPSEEVVKKMKNYWRQLLNAKLITQRKFDNLTKAERGGLSELDKAGFIKRQLVETRQITKHVAQILDSRMNTKYDENDKLIREVKVITLKSKLVSDFRKDFQFYKVREINNYHHAHDAYLNAVVGTALIKKYPKLESEFVYGDYKVYDVRKMIAKSEQEIGKATAKYFFYSNIMNFFKTEITLANGEIRKRPLIETNGETGEIVWDKGRDFATVRKVLSMPQVNIVKKTEVQTGGFSKESILPKRNSDKLIARKKDWDPKKYGGFDSPTVAYSVLVVAKVEKGKSKKLKSVKELLGITIMERSSFEKNPIDFLEAKGYKEVKKDLIIKLPKYSLFELENGRKRMLASAGELQKGNELALPSKYVNFLYLASHYEKLKGSPEDNEQKQLFVEQHKHYLDEIIEQISEFSKRVILADANLDKVLSAYNKHRDKPIREQAENIIHLFTLTNLGAPAAFKYFDTTIDRKRYTSTKEVLDATLIHQSITGLYETRIDLSQLGGDGGPAPGGSEAAAKGGIPWLMKKPLQLTTLVPLQEYEERLLKQTMLTGSYKEKLQSLFLKYDALWQHWENQVGHRRIKPHHIATGTVNPRPQKQYPINPKAKASIQTVINDLLKQGVLIQQNSIMNTPVYPVPKPDGKWRMVLDYREVNKTIPLIAAQNQHSAGILSSIFRGKYKTTLDLSNGFWAHSITPESYWLTAFTWLGQQYCWTRLPQGFLNSPALFNADVVDLLKEVPNVQVYVDDIYISHDDPREHLEQLEKVFSLLLNAGYVVSLKKSEIAQHEVEFLGFNITKEGRGLTETFKQKLLNITPPRDLKQLQSILGKLNFARNFIPNFSELVKPLYNIIATAPGKYITWTTDNSQQLQNIISMLNSAENLEERNPEVRLIMKVNTSPSAGYIRFYNEFAKRPIMYLNYVYTKAEVKFTNTEKLLTTIHKGLIKALDLGMGQEILVYSPIVSMTKIQKTPLPERKALPIRWITWMSYLEDPRIQFHYDKTLPELQQVPTVTDDIIAKIKHPSEFSMVFYTDGSAIKHPNVNKSHNAGMGIAQVQFKPEFTVINTWSIPLGDHTAQLAEVAAVEFACKKALKIDGPVLIVTDSFYVAESVNKELPYWQSNGFFNNKKKPLKHVSKWKSIADCIQLKPDIIIIHEKGHQPTASTFHTEGNNLADKLATQGSYVVNAGKRTADGSEFEKRTADGSEFESPKKKAKVE

SEQ ID NO: 577 - protein, 2087 aa, synthetic construct
MPAAKRVKLDGGDKKYSIGLDIGTNSVGWAVITDEYKVPSKKFKVLGNTDRHSIKKNLIGALLFDSGETAEATRLKRTARRRYTRRKNRICYLQEIFSNEMAKVDDSFFHRLEESFLVEEDKKHERHPIFGNIVDEVAYHEKYPTIYHLRKKLVDSTDKADLRLIYLALAHMIKFRGHFLIEGDLNPDNSDVDKLFIQLVQTYNQLFEENPINASGVDAKAILSARLSKSRRLENLIAQLPGEKKNGLFGNLIALSLGLTPNFKSNFDLAEDAKLQLSKDTYDDDLDNLLAQIGDQYADLFLAAKNLSDAILLSDILRVNTEITKAPLSASMIKRYDEHHQDLTLLKALVRQQLPEKYKEIFFDQSKNGYAGYIDGGASQEEFYKFIKPILEKMDGTEELLVKLNREDLLRKQRTFDNGSIPHQIHLGELHAILRRQEDFYPFLKDNREKIEKILTFRIPYYVGPLARGNSRFAWMTRKSEETITPWNFEEVVDKGASAQSFIERMTNFDKNLPNEKVLPKHSLLYEYFTVYNELTKVKYVTEGMRKPAFLSGEQKKAIVDLLFKTNRKVTVKQLKEDYFKKIECFDSVEISGVEDRFNASLGTYHDLLKIIKDKDFLDNEENEDILEDIVLTLTLFEDREMIEERLKTYAHLFDDKVMKQLKRRRYTGWGRLSRKLINGIRDKQSGKTILDFLKSDGFANRNFMQLIHDDSLTFKEDIQKAQVSGQGDSLHEHIANLAGSPAIKKGILQTVKVVDELVKVMGRHKPENIVIEMARENQTTQKGQKNSRERMKRIEEGIKELGSQILKEHPVENTQLQNEKLYLYYLQNGRDMYVDQELDINRLSDYDVDHIVPQSFLKDDSIDNKVLTRSDKARGKSDNVPSEEVVKKMKNYWRQLLNAKLITQRKFDNLTKAERGGLSELDKAGFIKRQLVETRQITKHVAQILDSRMNTKYDENDKLIREVKVITLKSKLVSDFRKDFQFYKVREINNYHHAHDAYLNAVVGTALIKKYPKLESEFVYGDYKVYDVRKMIAKSEQEIGKATAKYFFYSNIMNFFKTEITLANGEIRKRPLIETNGETGEIVWDKGRDFATVRKVLSMPQVNIVKKTEVQTGGFSKESILPKRNSDKLIARKKDWDPKKYGGFDSPTVAYSVLVVAKVEKGKSKKLKSVKELLGITIMERSSFEKNPIDFLEAKGYKEVKKDLIIKLPKYSLFELENGRKRMLASAGELQKGNELALPSKYVNFLYLASHYEKLKGSPEDNEQKQLFVEQHKHYLDEIIEQISEFSKRVILADANLDKVLSAYNKHRDKPIREQAENIIHLFTLTNLGAPAAFKYFDTTIDRKRYTSTKEVLDATLIHQSITGLYETRIDLSQLGGDGGGGGEAAAKGGSGGIPWLMKKPLQLTTLVPLQEYEERLLKQTMLTGSYKEKLQSLFLKYDALWQHWENQVGHRRIKPHHIATGTVNPRPQKQYPINPKAKASIQTVINDLLKQGVLIQQNSIMNTPVYPVPKPDGKWRMVLDYREVNKTIPLIAAQNQHSAGILSSIFRGKYKTTLDLSNGFWAHSITPESYWLTAFTWLGQQYCWTRLPQGFLNSPALFNADVVDLLKEVPNVQVYVDDIYISHDDPREHLEQLEKVFSLLLNAGYVVSLKKSEIAQHEVEFLGFNITKEGRGLTETFKQKLLNITPPRDLKQLQSILGKLNFARNFIPNFSELVKPLYNIIATAPGKYITWTTDNSQQLQNIISMLNSAENLEERNPEVRLIMKVNTSPSAGYIRFYNEFAKRPIMYLNYVYTKAEVKFTNTEKLLTTIHKGLIKALDLGMGQEILVYSPIVSMTKIQKTPLPERKALPIRWITWMSYLEDPRIQFHYDKTLPELQQVPTVTDDIIAKIKHPSEFSMVFYTDGSAIKHPNVNKSHNAGMGIAQVQFKPEFTVINTWSIPLGDHTAQLAEVAAVEFACKKALKIDGPVLIVTDSFYVAESVNKELPYWQSNGFFNNKKKPLKHVSKWKSIADCIQLKPDIIIIHEKGHQPTASTFHTEGNNLADKLATQGSYVVNAGKRTADGSEFEKRTADGSEFESPKKKAKVE

SEQ ID NO: 578 - protein, 2084 aa, synthetic construct
MPAAKRVKLDGGDKKYSIGLDIGTNSVGWAVITDEYKVPSKKFKVLGNTDRHSIKKNLIGALLFDSGETAEATRLKRTARRRYTRRKNRICYLQEIFSNEMAKVDDSFFHRLEESFLVEEDKKHERHPIFGNIVDEVAYHEKYPTIYHLRKKLVDSTDKADLRLIYLALAHMIKFRGHFLIEGDLNPDNSDVDKLFIQLVQTYNQLFEENPINASGVDAKAILSARLSKSRRLENLIAQLPGEKKNGLFGNLIALSLGLTPNFKSNFDLAEDAKLQLSKDTYDDDLDNLLAQIGDQYADLFLAAKNLSDAILLSDILRVNTEITKAPLSASMIKRYDEHHQDLTLLKALVRQQLPEKYKEIFFDQSKNGYAGYIDGGASQEEFYKFIKPILEKMDGTEELLVKLNREDLLRKQRTFDNGSIPHQIHLGELHAILRRQEDFYPFLKDNREKIEKILTFRIPYYVGPLARGNSRFAWMTRKSEETITPWNFEEVVDKGASAQSFIERMTNFDKNLPNEKVLPKHSLLYEYFTVYNELTKVKYVTEGMRKPAFLSGEQKKAIVDLLFKTNRKVTVKQLKEDYFKKIECFDSVEISGVEDRFNASLGTYHDLLKIIKDKDFLDNEENEDILEDIVLTLTLFEDREMIEERLKTYAHLFDDKVMKQLKRRRYTGWGRLSRKLINGIRDKQSGKTILDFLKSDGFANRNFMQLIHDDSLTFKEDIQKAQVSGQGDSLHEHIANLAGSPAIKKGILQTVKVVDELVKVMGRHKPENIVIEMARENQTTQKGQKNSRERMKRIEEGIKELGSQILKEHPVENTQLQNEKLYLYYLQNGRDMYVDQELDINRLSDYDVDHIVPQSFLKDDSIDNKVLTRSDKARGKSDNVPSEEVVKKMKNYWRQLLNAKLITQRKFDNLTKAERGGLSELDKAGFIKRQLVETRQITKHVAQILDSRMNTKYDENDKLIREVKVITLKSKLVSDFRKDFQFYKVREINNYHHAHDAYLNAVVGTALIKKYPKLESEFVYGDYKVYDVRKMIAKSEQEIGKATAKYFFYSNIMNFFKTEITLANGEIRKRPLIETNGETGEIVWDKGRDFATVRKVLSMPQVNIVKKTEVQTGGFSKESILPKRNSDKLIARKKDWDPKKYGGFDSPTVAYSVLVVAKVEKGKSKKLKSVKELLGITIMERSSFEKNPIDFLEAKGYKEVKKDLIIKLPKYSLFELENGRKRMLASAGELQKGNELALPSKYVNFLYLASHYEKLKGSPEDNEQKQLFVEQHKHYLDEIIEQISEFSKRVILADANLDKVLSAYNKHRDKPIREQAENIIHLFTLTNLGAPAAFKYFDTTIDRKRYTSTKEVLDATLIHQSITGLYETRIDLSQLGGDGGGGGGGGGGGGIPWLMKKPLQLTTLVPLQEYEERLLKQTMLTGSYKEKLQSLFLKYDALWQHWENQVGHRRIKPHHIATGTVNPRPQKQYPINPKAKASIQTVINDLLKQGVLIQQNSIMNTPVYPVPKPDGKWRMVLDYREVNKTIPLIAAQNQHSAGILSSIFRGKYKTTLDLSNGFWAHSITPESYWLTAFTWLGQQYCWTRLPQGFLNSPALFNADVVDLLKEVPNVQVYVDDIYISHDDPREHLEQLEKVFSLLLNAGYVVSLKKSEIAQHEVEFLGFNITKEGRGLTETFKQKLLNITPPRDLKQLQSILGKLNFARNFIPNFSELVKPLYNIIATAPGKYITWTTDNSQQLQNIISMLNSAENLEERNPEVRLIMKVNTSPSAGYIRFYNEFAKRPIMYLNYVYTKAEVKFTNTEKLLTTIHKGLIKALDLGMGQEILVYSPIVSMTKIQKTPLPERKALPIRWITWMSYLEDPRIQFHYDKTLPELQQVPTVTDDIIAKIKHPSEFSMVFYTDGSAIKHPNVNKSHNAGMGIAQVQFKPEFTVINTWSIPLGDHTAQLAEVAAVEFACKKALKIDGPVLIVTDSFYVAESVNKELPYWQSNGFFNNKKKPLKHVSKWKSIADCIQLKPDIIIIHEKGHQPTASTFHTEGNNLADKLATQGSYVVNAGKRTADGSEFEKRTADGSEFESPKKKAKVE

SEQ ID NO: 579 - protein, 2087 aa, synthetic construct
MPAAKRVKLDGGDKKYSIGLDIGTNSVGWAVITDEYKVPSKKFKVLGNTDRHSIKKNLIGALLFDSGETAEATRLKRTARRRYTRRKNRICYLQEIFSNEMAKVDDSFFHRLEESFLVEEDKKHERHPIFGNIVDEVAYHEKYPTIYHLRKKLVDSTDKADLRLIYLALAHMIKFRGHFLIEGDLNPDNSDVDKLFIQLVQTYNQLFEENPINASGVDAKAILSARLSKSRRLENLIAQLPGEKKNGLFGNLIALSLGLTPNFKSNFDLAEDAKLQLSKDTYDDDLDNLLAQIGDQYADLFLAAKNLSDAILLSDILRVNTEITKAPLSASMIKRYDEHHQDLTLLKALVRQQLPEKYKEIFFDQSKNGYAGYIDGGASQEEFYKFIKPILEKMDGTEELLVKLNREDLLRKQRTFDNGSIPHQIHLGELHAILRRQEDFYPFLKDNREKIEKILTFRIPYYVGPLARGNSRFAWMTRKSEETITPWNFEEVVDKGASAQSFIERMTNFDKNLPNEKVLPKHSLLYEYFTVYNELTKVKYVTEGMRKPAFLSGEQKKAIVDLLFKTNRKVTVKQLKEDYFKKIECFDSVEISGVEDRFNASLGTYHDLLKIIKDKDFLDNEENEDILEDIVLTLTLFEDREMIEERLKTYAHLFDDKVMKQLKRRRYTGWGRLSRKLINGIRDKQSGKTILDFLKSDGFANRNFMQLIHDDSLTFKEDIQKAQVSGQGDSLHEHIANLAGSPAIKKGILQTVKVVDELVKVMGRHKPENIVIEMARENQTTQKGQKNSRERMKRIEEGIKELGSQILKEHPVENTQLQNEKLYLYYLQNGRDMYVDQELDINRLSDYDVDHIVPQSFLKDDSIDNKVLTRSDKARGKSDNVPSEEVVKKMKNYWRQLLNAKLITQRKFDNLTKAERGGLSELDKAGFIKRQLVETRQITKHVAQILDSRMNTKYDENDKLIREVKVITLKSKLVSDFRKDFQFYKVREINNYHHAHDAYLNAVVGTALIKKYPKLESEFVYGDYKVYDVRKMIAKSEQEIGKATAKYFFYSNIMNFFKTEITLANGEIRKRPLIETNGETGEIVWDKGRDFATVRKVLSMPQVNIVKKTEVQTGGFSKESILPKRNSDKLIARKKDWDPKKYGGFDSPTVAYSVLVVAKVEKGKSKKLKSVKELLGITIMERSSFEKNPIDFLEAKGYKEVKKDLIIKLPKYSLFELENGRKRMLASAGELQKGNELALPSKYVNFLYLASHYEKLKGSPEDNEQKQLFVEQHKHYLDEIIEQISEFSKRVILADANLDKVLSAYNKHRDKPIREQAENIIHLFTLTNLGAPAAFKYFDTTIDRKRYTSTKEVLDATLIHQSITGLYETRIDLSQLGGDGGPAPGSSEAAAKGGIPWLMKKPLQLTTLVPLQEYEERLLKQTMLTGSYKEKLQSLFLKYDALWQHWENQVGHRRIKPHHIATGTVNPRPQKQYPINPKAKASIQTVINDLLKQGVLIQQNSIMNTPVYPVPKPDGKWRMVLDYREVNKTIPLIAAQNQHSAGILSSIFRGKYKTTLDLSNGFWAHSITPESYWLTAFTWLGQQYCWTRLPQGFLNSPALFNADVVDLLKEVPNVQVYVDDIYISHDDPREHLEQLEKVFSLLLNAGYVVSLKKSEIAQHEVEFLGFNITKEGRGLTETFKQKLLNITPPRDLKQLQSILGKLNFARNFIPNFSELVKPLYNIIATAPGKYITWTTDNSQQLQNIISMLNSAENLEERNPEVRLIMKVNTSPSAGYIRFYNEFAKRPIMYLNYVYTKAEVKFTNTEKLLTTIHKGLIKALDLGMGQEILVYSPIVSMTKIQKTPLPERKALPIRWITWMSYLEDPRIQFHYDKTLPELQQVPTVTDDIIAKIKHPSEFSMVFYTDGSAIKHPNVNKSHNAGMGIAQVQFKPEFTVINTWSIPLGDHTAQLAEVAAVEFACKKALKIDGPVLIVTDSFYVAESVNKELPYWQSNGFFNNKKKPLKHVSKWKSIADCIQLKPDIIIIHEKGHQPTASTFHTEGNNLADKLATQGSYVVNAGKRTADGSEFEKRTADGSEFESPKKKAKVE

SEQ ID NO: 580 - protein, 2087 aa, synthetic construct
MPAAKRVKLDGGDKKYSIGLDIGTNSVGWAVITDEYKVPSKKFKVLGNTDRHSIKKNLIGALLFDSGETAEATRLKRTARRRYTRRKNRICYLQEIFSNEMAKVDDSFFHRLEESFLVEEDKKHERHPIFGNIVDEVAYHEKYPTIYHLRKKLVDSTDKADLRLIYLALAHMIKFRGHFLIEGDLNPDNSDVDKLFIQLVQTYNQLFEENPINASGVDAKAILSARLSKSRRLENLIAQLPGEKKNGLFGNLIALSLGLTPNFKSNFDLAEDAKLQLSKDTYDDDLDNLLAQIGDQYADLFLAAKNLSDAILLSDILRVNTEITKAPLSASMIKRYDEHHQDLTLLKALVRQQLPEKYKEIFFDQSKNGYAGYIDGGASQEEFYKFIKPILEKMDGTEELLVKLNREDLLRKQRTFDNGSIPHQIHLGELHAILRRQEDFYPFLKDNREKIEKILTFRIPYYVGPLARGNSRFAWMTRKSEETITPWNFEEVVDKGASAQSFIERMTNFDKNLPNEKVLPKHSLLYEYFTVYNELTKVKYVTEGMRKPAFLSGEQKKAIVDLLFKTNRKVTVKQLKEDYFKKIECFDSVEISGVEDRFNASLGTYHDLLKIIKDKDFLDNEENEDILEDIVLTLTLFEDREMIEERLKTYAHLFDDKVMKQLKRRRYTGWGRLSRKLINGIRDKQSGKTILDFLKSDGFANRNFMQLIHDDSLTFKEDIQKAQVSGQGDSLHEHIANLAGSPAIKKGILQTVKVVDELVKVMGRHKPENIVIEMARENQTTQKGQKNSRERMKRIEEGIKELGSQILKEHPVENTQLQNEKLYLYYLQNGRDMYVDQELDINRLSDYDVDHIVPQSFLKDDSIDNKVLTRSDKARGKSDNVPSEEVVKKMKNYWRQLLNAKLITQRKFDNLTKAERGGLSELDKAGFIKRQLVETRQITKHVAQILDSRMNTKYDENDKLIREVKVITLKSKLVSDFRKDFQFYKVREINNYHHAHDAYLNAVVGTALIKKYPKLESEFVYGDYKVYDVRKMIAKSEQEIGKATAKYFFYSNIMNFFKTEITLANGEIRKRPLIETNGETGEIVWDKGRDFATVRKVLSMPQVNIVKKTEVQTGGFSKESILPKRNSDKLIARKKDWDPKKYGGFDSPTVAYSVLVVAKVEKGKSKKLKSVKELLGITIMERSSFEKNPIDFLEAKGYKEVKKDLIIKLPKYSLFELENGRKRMLASAGELQKGNELALPSKYVNFLYLASHYEKLKGSPEDNEQKQLFVEQHKHYLDEIIEQISEFSKRVILADANLDKVLSAYNKHRDKPIREQAENIIHLFTLTNLGAPAAFKYFDTTIDRKRYTSTKEVLDATLIHQSITGLYETRIDLSQLGGDGGGGSEAAAKPAPGGIPWLMKKPLQLTTLVPLQEYEERLLKQTMLTGSYKEKLQSLFLKYDALWQHWENQVGHRRIKPHHIATGTVNPRPQKQYPINPKAKASIQTVINDLLKQGVLIQQNSIMNTPVYPVPKPDGKWRMVLDYREVNKTIPLIAAQNQHSAGILSSIFRGKYKTTLDLSNGFWAHSITPESYWLTAFTWLGQQYCWTRLPQGFLNSPALFNADVVDLLKEVPNVQVYVDDIYISHDDPREHLEQLEKVFSLLLNAGYVVSLKKSEIAQHEVEFLGFNITKEGRGLTETFKQKLLNITPPRDLKQLQSILGKLNFARNFIPNFSELVKPLYNIIATAPGKYITWTTDNSQQLQNIISMLNSAENLEERNPEVRLIMKVNTSPSAGYIRFYNEFAKRPIMYLNYVYTKAEVKFTNTEKLLTTIHKGLIKALDLGMGQEILVYSPIVSMTKIQKTPLPERKALPIRWITWMSYLEDPRIQFHYDKTLPELQQVPTVTDDIIAKIKHPSEFSMVFYTDGSAIKHPNVNKSHNAGMGIAQVQFKPEFTVINTWSIPLGDHTAQLAEVAAVEFACKKALKIDGPVLIVTDSFYVAESVNKELPYWQSNGFFNNKKKPLKHVSKWKSIADCIQLKPDIIIIHEKGHQPTASTFHTEGNNLADKLATQGSYVVNAGKRTADGSEFEKRTADGSEFESPKKKAKVE

SEQ ID NO: 581 - protein, 2085 aa, synthetic construct
MPAAKRVKLDGGDKKYSIGLDIGTNSVGWAVITDEYKVPSKKFKVLGNTDRHSIKKNLIGALLFDSGETAEATRLKRTARRRYTRRKNRICYLQEIFSNEMAKVDDSFFHRLEESFLVEEDKKHERHPIFGNIVDEVAYHEKYPTIYHLRKKLVDSTDKADLRLIYLALAHMIKFRGHFLIEGDLNPDNSDVDKLFIQLVQTYNQLFEENPINASGVDAKAILSARLSKSRRLENLIAQLPGEKKNGLFGNLIALSLGLTPNFKSNFDLAEDAKLQLSKDTYDDDLDNLLAQIGDQYADLFLAAKNLSDAILLSDILRVNTEITKAPLSASMIKRYDEHHQDLTLLKALVRQQLPEKYKEIFFDQSKNGYAGYIDGGASQEEFYKFIKPILEKMDGTEELLVKLNREDLLRKQRTFDNGSIPHQIHLGELHAILRRQEDFYPFLKDNREKIEKILTFRIPYYVGPLARGNSRFAWMTRKSEETITPWNFEEVVDKGASAQSFIERMTNFDKNLPNEKVLPKHSLLYEYFTVYNELTKVKYVTEGMRKPAFLSGEQKKAIVDLLFKTNRKVTVKQLKEDYFKKIECFDSVEISGVEDRFNASLGTYHDLLKIIKDKDFLDNEENEDILEDIVLTLTLFEDREMIEERLKTYAHLFDDKVMKQLKRRRYTGWGRLSRKLINGIRDKQSGKTILDFLKSDGFANRNFMQLIHDDSLTFKEDIQKAQVSGQGDSLHEHIANLAGSPAIKKGILQTVKVVDELVKVMGRHKPENIVIEMARENQTTQKGQKNSRERMKRIEEGIKELGSQILKEHPVENTQLQNEKLYLYYLQNGRDMYVDQELDINRLSDYDVDHIVPQSFLKDDSIDNKVLTRSDKARGKSDNVPSEEVVKKMKNYWRQLLNAKLITQRKFDNLTKAERGGLSELDKAGFIKRQLVETRQITKHVAQILDSRMNTKYDENDKLIREVKVITLKSKLVSDFRKDFQFYKVREINNYHHAHDAYLNAVVGTALIKKYPKLESEFVYGDYKVYDVRKMIAKSEQEIGKATAKYFFYSNIMNFFKTEITLANGEIRKRPLIETNGETGEIVWDKGRDFATVRKVLSMPQVNIVKKTEVQTGGFSKESILPKRNSDKLIARKKDWDPKKYGGFDSPTVAYSVLVVAKVEKGKSKKLKSVKELLGITIMERSSFEKNPIDFLEAKGYKEVKKDLIIKLPKYSLFELENGRKRMLASAGELQKGNELALPSKYVNFLYLASHYEKLKGSPEDNEQKQLFVEQHKHYLDEIIEQISEFSKRVILADANLDKVLSAYNKHRDKPIREQAENIIHLFTLTNLGAPAAFKYFDTTIDRKRYTSTKEVLDATLIHQSITGLYETRIDLSQLGGDGGPAPGSSGGGGGIPWLMKKPLQLTTLVPLQEYEERLLKQTMLTGSYKEKLQSLFLKYDALWQHWENQVGHRRIKPHHIATGTVNPRPQKQYPINPKAKASIQTVINDLLKQGVLIQQNSIMNTPVYPVPKPDGKWRMVLDYREVNKTIPLIAAQNQHSAGILSSIFRGKYKTTLDLSNGFWAHSITPESYWLTAFTWLGQQYCWTRLPQGFLNSPALFNADVVDLLKEVPNVQVYVDDIYISHDDPREHLEQLEKVFSLLLNAGYVVSLKKSEIAQHEVEFLGFNITKEGRGLTETFKQKLLNITPPRDLKQLQSILGKLNFARNFIPNFSELVKPLYNIIATAPGKYITWTTDNSQQLQNIISMLNSAENLEERNPEVRLIMKVNTSPSAGYIRFYNEFAKRPIMYLNYVYTKAEVKFTNTEKLLTTIHKGLIKALDLGMGQEILVYSPIVSMTKIQKTPLPERKALPIRWITWMSYLEDPRIQFHYDKTLPELQQVPTVTDDIIAKIKHPSEFSMVFYTDGSAIKHPNVNKSHNAGMGIAQVQFKPEFTVINTWSIPLGDHTAQLAEVAAVEFACKKALKIDGPVLIVTDSFYVAESVNKELPYWQSNGFFNNKKKPLKHVSKWKSIADCIQLKPDIIIIHEKGHQPTASTFHTEGNNLADKLATQGSYVVNAGKRTADGSEFEKRTADGSEFESPKKKAKVE

SEQ ID NO: 582 - protein, 2087 aa, synthetic construct
MPAAKRVKLDGGDKKYSIGLDIGTNSVGWAVITDEYKVPSKKFKVLGNTDRHSIKKNLIGALLFDSGETAEATRLKRTARRRYTRRKNRICYLQEIFSNEMAKVDDSFFHRLEESFLVEEDKKHERHPIFGNIVDEVAYHEKYPTIYHLRKKLVDSTDKADLRLIYLALAHMIKFRGHFLIEGDLNPDNSDVDKLFIQLVQTYNQLFEENPINASGVDAKAILSARLSKSRRLENLIAQLPGEKKNGLFGNLIALSLGLTPNFKSNFDLAEDAKLQLSKDTYDDDLDNLLAQIGDQYADLFLAAKNLSDAILLSDILRVNTEITKAPLSASMIKRYDEHHQDLTLLKALVRQQLPEKYKEIFFDQSKNGYAGYIDGGASQEEFYKFIKPILEKMDGTEELLVKLNREDLLRKQRTFDNGSIPHQIHLGELHAILRRQEDFYPFLKDNREKIEKILTFRIPYYVGPLARGNSRFAWMTRKSEETITPWNFEEVVDKGASAQSFIERMTNFDKNLPNEKVLPKHSLLYEYFTVYNELTKVKYVTEGMRKPAFLSGEQKKAIVDLLFKTNRKVTVKQLKEDYFKKIECFDSVEISGVEDRFNASLGTYHDLLKIIKDKDFLDNEENEDILEDIVLTLTLFEDREMIEERLKTYAHLFDDKVMKQLKRRRYTGWGRLSRKLINGIRDKQSGKTILDFLKSDGFANRNFMQLIHDDSLTFKEDIQKAQVSGQGDSLHEHIANLAGSPAIKKGILQTVKVVDELVKVMGRHKPENIVIEMARENQTTQKGQKNSRERMKRIEEGIKELGSQILKEHPVENTQLQNEKLYLYYLQNGRDMYVDQELDINRLSDYDVDHIVPQSFLKDDSIDNKVLTRSDKARGKSDNVPSEEVVKKMKNYWRQLLNAKLITQRKFDNLTKAERGGLSELDKAGFIKRQLVETRQITKHVAQILDSRMNTKYDENDKLIREVKVITLKSKLVSDFRKDFQFYKVREINNYHHAHDAYLNAVVGTALIKKYPKLESEFVYGDYKVYDVRKMIAKSEQEIGKATAKYFFYSNIMNFFKTEITLANGEIRKRPLIETNGETGEIVWDKGRDFATVRKVLSMPQVNIVKKTEVQTGGFSKESILPKRNSDKLIARKKDWDPKKYGGFDSPTVAYSVLVVAKVEKGKSKKLKSVKELLGITIMERSSFEKNPIDFLEAKGYKEVKKDLIIKLPKYSLFELENGRKRMLASAGELQKGNELALPSKYVNFLYLASHYEKLKGSPEDNEQKQLFVEQHKHYLDEIIEQISEFSKRVILADANLDKVLSAYNKHRDKPIREQAENIIHLFTLTNLGAPAAFKYFDTTIDRKRYTSTKEVLDATLIHQSITGLYETRIDLSQLGGDGGGGGGSSEAAAKGGIPWLMKKPLQLTTLVPLQEYEERLLKQTMLTGSYKEKLQSLFLKYDALWQHWENQVGHRRIKPHHIATGTVNPRPQKQYPINPKAKASIQTVINDLLKQGVLIQQNSIMNTPVYPVPKPDGKWRMVLDYREVNKTIPLIAAQNQHSAGILSSIFRGKYKTTLDLSNGFWAHSITPESYWLTAFTWLGQQYCWTRLPQGFLNSPALFNADVVDLLKEVPNVQVYVDDIYISHDDPREHLEQLEKVFSLLLNAGYVVSLKKSEIAQHEVEFLGFNITKEGRGLTETFKQKLLNITPPRDLKQLQSILGKLNFARNFIPNFSELVKPLYNIIATAPGKYITWTTDNSQQLQNIISMLNSAENLEERNPEVRLIMKVNTSPSAGYIRFYNEFAKRPIMYLNYVYTKAEVKFTNTEKLLTTIHKGLIKALDLGMGQEILVYSPIVSMTKIQKTPLPERKALPIRWITWMSYLEDPRIQFHYDKTLPELQQVPTVTDDIIAKIKHPSEFSMVFYTDGSAIKHPNVNKSHNAGMGIAQVQFKPEFTVINTWSIPLGDHTAQLAEVAAVEFACKKALKIDGPVLIVTDSFYVAESVNKELPYWQSNGFFNNKKKPLKHVSKWKSIADCIQLKPDIIIIHEKGHQPTASTFHTEGNNLADKLATQGSYVVNAGKRTADGSEFEKRTADGSEFESPKKKAKVE

SEQ ID NO: 583 - protein, 2087 aa, synthetic construct
MPAAKRVKLDGGDKKYSIGLDIGTNSVGWAVITDEYKVPSKKFKVLGNTDRHSIKKNLIGALLFDSGETAEATRLKRTARRRYTRRKNRICYLQEIFSNEMAKVDDSFFHRLEESFLVEEDKKHERHPIFGNIVDEVAYHEKYPTIYHLRKKLVDSTDKADLRLIYLALAHMIKFRGHFLIEGDLNPDNSDVDKLFIQLVQTYNQLFEENPINASGVDAKAILSARLSKSRRLENLIAQLPGEKKNGLFGNLIALSLGLTPNFKSNFDLAEDAKLQLSKDTYDDDLDNLLAQIGDQYADLFLAAKNLSDAILLSDILRVNTEITKAPLSASMIKRYDEHHQDLTLLKALVRQQLPEKYKEIFFDQSKNGYAGYIDGGASQEEFYKFIKPILEKMDGTEELLVKLNREDLLRKQRTFDNGSIPHQIHLGELHAILRRQEDFYPFLKDNREKIEKILTFRIPYYVGPLARGNSRFAWMTRKSEETITPWNFEEVVDKGASAQSFIERMTNFDKNLPNEKVLPKHSLLYEYFTVYNELTKVKYVTEGMRKPAFLSGEQKKAIVDLLFKTNRKVTVKQLKEDYFKKIECFDSVEISGVEDRFNASLGTYHDLLKIIKDKDFLDNEENEDILEDIVLTLTLFEDREMIEERLKTYAHLFDDKVMKQLKRRRYTGWGRLSRKLINGIRDKQSGKTILDFLKSDGFANRNFMQLIHDDSLTFKEDIQKAQVSGQGDSLHEHIANLAGSPAIKKGILQTVKVVDELVKVMGRHKPENIVIEMARENQTTQKGQKNSRERMKRIEEGIKELGSQILKEHPVENTQLQNEKLYLYYLQNGRDMYVDQELDINRLSDYDVDHIVPQSFLKDDSIDNKVLTRSDKARGKSDNVPSEEVVKKMKNYWRQLLNAKLITQRKFDNLTKAERGGLSELDKAGFIKRQLVETRQITKHVAQILDSRMNTKYDENDKLIREVKVITLKSKLVSDFRKDFQFYKVREINNYHHAHDAYLNAVVGTALIKKYPKLESEFVYGDYKVYDVRKMIAKSEQEIGKATAKYFFYSNIMNFFKTEITLANGEIRKRPLIETNGETGEIVWDKGRDFATVRKVLSMPQVNIVKKTEVQTGGFSKESILPKRNSDKLIARKKDWDPKKYGGFDSPTVAYSVLVVAKVEKGKSKKLKSVKELLGITIMERSSFEKNPIDFLEAKGYKEVKKDLIIKLPKYSLFELENGRKRMLASAGELQKGNELALPSKYVNFLYLASHYEKLKGSPEDNEQKQLFVEQHKHYLDEIIEQISEFSKRVILADANLDKVLSAYNKHRDKPIREQAENIIHLFTLTNLGAPAAFKYFDTTIDRKRYTSTKEVLDATLIHQSITGLYETRIDLSQLGGDGGGGSGGGEAAAKGGIPWLMKKPLQLTTLVPLQEYEERLLKQTMLTGSYKEKLQSLFLKYDALWQHWENQVGHRRIKPHHIATGTVNPRPQKQYPINPKAKASIQTVINDLLKQGVLIQQNSIMNTPVYPVPKPDGKWRMVLDYREVNKTIPLIAAQNQHSAGILSSIFRGKYKTTLDLSNGFWAHSITPESYWLTAFTWLGQQYCWTRLPQGFLNSPALFNADVVDLLKEVPNVQVYVDDIYISHDDPREHLEQLEKVFSLLLNAGYVVSLKKSEIAQHEVEFLGFNITKEGRGLTETFKQKLLNITPPRDLKQLQSILGKLNFARNFIPNFSELVKPLYNIIATAPGKYITWTTDNSQQLQNIISMLNSAENLEERNPEVRLIMKVNTSPSAGYIRFYNEFAKRPIMYLNYVYTKAEVKFTNTEKLLTTIHKGLIKALDLGMGQEILVYSPIVSMTKIQKTPLPERKALPIRWITWMSYLEDPRIQFHYDKTLPELQQVPTVTDDIIAKIKHPSEFSMVFYTDGSAIKHPNVNKSHNAGMGIAQVQFKPEFTVINTWSIPLGDHTAQLAEVAAVEFACKKALKIDGPVLIVTDSFYVAESVNKELPYWQSNGFFNNKKKPLKHVSKWKSIADCIQLKPDIIIIHEKGHQPTASTFHTEGNNLADKLATQGSYVVNAGKRTADGSEFEKRTADGSEFESPKKKAKVE

SEQ ID NO: 584 - protein, 2085 aa, synthetic construct
MPAAKRVKLDGGDKKYSIGLDIGTNSVGWAVITDEYKVPSKKFKVLGNTDRHSIKKNLIGALLFDSGETAEATRLKRTARRRYTRRKNRICYLQEIFSNEMAKVDDSFFHRLEESFLVEEDKKHERHPIFGNIVDEVAYHEKYPTIYHLRKKLVDSTDKADLRLIYLALAHMIKFRGHFLIEGDLNPDNSDVDKLFIQLVQTYNQLFEENPINASGVDAKAILSARLSKSRRLENLIAQLPGEKKNGLFGNLIALSLGLTPNFKSNFDLAEDAKLQLSKDTYDDDLDNLLAQIGDQYADLFLAAKNLSDAILLSDILRVNTEITKAPLSASMIKRYDEHHQDLTLLKALVRQQLPEKYKEIFFDQSKNGYAGYIDGGASQEEFYKFIKPILEKMDGTEELLVKLNREDLLRKQRTFDNGSIPHQIHLGELHAILRRQEDFYPFLKDNREKIEKILTFRIPYYVGPLARGNSRFAWMTRKSEETITPWNFEEVVDKGASAQSFIERMTNFDKNLPNEKVLPKHSLLYEYFTVYNELTKVKYVTEGMRKPAFLSGEQKKAIVDLLFKTNRKVTVKQLKEDYFKKIECFDSVEISGVEDRFNASLGTYHDLLKIIKDKDFLDNEENEDILEDIVLTLTLFEDREMIEERLKTYAHLFDDKVMKQLKRRRYTGWGRLSRKLINGIRDKQSGKTILDFLKSDGFANRNFMQLIHDDSLTFKEDIQKAQVSGQGDSLHEHIANLAGSPAIKKGILQTVKVVDELVKVMGRHKPENIVIEMARENQTTQKGQKNSRERMKRIEEGIKELGSQILKEHPVENTQLQNEKLYLYYLQNGRDMYVDQELDINRLSDYDVDHIVPQSFLKDDSIDNKVLTRSDKARGKSDNVPSEEVVKKMKNYWRQLLNAKLITQRKFDNLTKAERGGLSELDKAGFIKRQLVETRQITKHVAQILDSRMNTKYDENDKLIREVKVITLKSKLVSDFRKDFQFYKVREINNYHHAHDAYLNAVVGTALIKKYPKLESEFVYGDYKVYDVRKMIAKSEQEIGKATAKYFFYSNIMNFFKTEITLANGEIRKRPLIETNGETGEIVWDKGRDFATVRKVLSMPQVNIVKKTEVQTGGFSKESILPKRNSDKLIARKKDWDPKKYGGFDSPTVAYSVLVVAKVEKGKSKKLKSVKELLGITIMERSSFEKNPIDFLEAKGYKEVKKDLIIKLPKYSLFELENGRKRMLASAGELQKGNELALPSKYVNFLYLASHYEKLKGSPEDNEQKQLFVEQHKHYLDEIIEQISEFSKRVILADANLDKVLSAYNKHRDKPIREQAENIIHLFTLTNLGAPAAFKYFDTTIDRKRYTSTKEVLDATLIHQSITGLYETRIDLSQLGGDGGGSSGGSPAPGGIPWLMKKPLQLTTLVPLQEYEERLLKQTMLTGSYKEKLQSLFLKYDALWQHWENQVGHRRIKPHHIATGTVNPRPQKQYPINPKAKASIQTVINDLLKQGVLIQQNSIMNTPVYPVPKPDGKWRMVLDYREVNKTIPLIAAQNQHSAGILSSIFRGKYKTTLDLSNGFWAHSITPESYWLTAFTWLGQQYCWTRLPQGFLNSPALFNADVVDLLKEVPNVQVYVDDIYISHDDPREHLEQLEKVFSLLLNAGYVVSLKKSEIAQHEVEFLGFNITKEGRGLTETFKQKLLNITPPRDLKQLQSILGKLNFARNFIPNFSELVKPLYNIIATAPGKYITWTTDNSQQLQNIISMLNSAENLEERNPEVRLIMKVNTSPSAGYIRFYNEFAKRPIMYLNYVYTKAEVKFTNTEKLLTTIHKGLIKALDLGMGQEILVYSPIVSMTKIQKTPLPERKALPIRWITWMSYLEDPRIQFHYDKTLPELQQVPTVTDDIIAKIKHPSEFSMVFYTDGSAIKHPNVNKSHNAGMGIAQVQFKPEFTVINTWSIPLGDHTAQLAEVAAVEFACKKALKIDGPVLIVTDSFYVAESVNKELPYWQSNGFFNNKKKPLKHVSKWKSIADCIQLKPDIIIIHEKGHQPTASTFHTEGNNLADKLATQGSYVVNAGKRTADGSEFEKRTADGSEFESPKKKAKVE

SEQ ID NO: 585 - protein, 2109 aa, synthetic construct
MPAAKRVKLDGGDKKYSIGLDIGTNSVGWAVITDEYKVPSKKFKVLGNTDRHSIKKNLIGALLFDSGETAEATRLKRTARRRYTRRKNRICYLQEIFSNEMAKVDDSFFHRLEESFLVEEDKKHERHPIFGNIVDEVAYHEKYPTIYHLRKKLVDSTDKADLRLIYLALAHMIKFRGHFLIEGDLNPDNSDVDKLFIQLVQTYNQLFEENPINASGVDAKAILSARLSKSRRLENLIAQLPGEKKNGLFGNLIALSLGLTPNFKSNFDLAEDAKLQLSKDTYDDDLDNLLAQIGDQYADLFLAAKNLSDAILLSDILRVNTEITKAPLSASMIKRYDEHHQDLTLLKALVRQQLPEKYKEIFFDQSKNGYAGYIDGGASQEEFYKFIKPILEKMDGTEELLVKLNREDLLRKQRTFDNGSIPHQIHLGELHAILRRQEDFYPFLKDNREKIEKILTFRIPYYVGPLARGNSRFAWMTRKSEETITPWNFEEVVDKGASAQSFIERMTNFDKNLPNEKVLPKHSLLYEYFTVYNELTKVKYVTEGMRKPAFLSGEQKKAIVDLLFKTNRKVTVKQLKEDYFKKIECFDSVEISGVEDRFNASLGTYHDLLKIIKDKDFLDNEENEDILEDIVLTLTLFEDREMIEERLKTYAHLFDDKVMKQLKRRRYTGWGRLSRKLINGIRDKQSGKTILDFLKSDGFANRNFMQLIHDDSLTFKEDIQKAQVSGQGDSLHEHIANLAGSPAIKKGILQTVKVVDELVKVMGRHKPENIVIEMARENQTTQKGQKNSRERMKRIEEGIKELGSQILKEHPVENTQLQNEKLYLYYLQNGRDMYVDQELDINRLSDYDVDHIVPQSFLKDDSIDNKVLTRSDKARGKSDNVPSEEVVKKMKNYWRQLLNAKLITQRKFDNLTKAERGGLSELDKAGFIKRQLVETRQITKHVAQILDSRMNTKYDENDKLIREVKVITLKSKLVSDFRKDFQFYKVREINNYHHAHDAYLNAVVGTALIKKYPKLESEFVYGDYKVYDVRKMIAKSEQEIGKATAKYFFYSNIMNFFKTEITLANGEIRKRPLIETNGETGEIVWDKGRDFATVRKVLSMPQVNIVKKTEVQTGGFSKESILPKRNSDKLIARKKDWDPKKYGGFDSPTVAYSVLVVAKVEKGKSKKLKSVKELLGITIMERSSFEKNPIDFLEAKGYKEVKKDLIIKLPKYSLFELENGRKRMLASAGELQKGNELALPSKYVNFLYLASHYEKLKGSPEDNEQKQLFVEQHKHYLDEIIEQISEFSKRVILADANLDKVLSAYNKHRDKPIREQAENIIHLFTLTNLGAPAAFKYFDTTIDRKRYTSTKEVLDATLIHQSITGLYETRIDLSQLGGDGGSGGSSGGSSGSETPGTSESATPESSGGSSGGSSGGIPWLMKKPLQLTTLVPLQEYEERLLKQTMLTGSYKEKLQSLFLKYDALWQHWENQVGHRRIKPHHIATGTVNPRPQKQYPINPKAKASIQTVINDLLKQGVLIQQNSIMNTPVYPVPKPDGKWRMVLDYREVNKTIPLIAAQNQHSAGILSSIFRGKYKTTLDLSNGFWAHSITPESYWLTAFTWLGQQYCWTRLPQGFLNSPALFNADVVDLLKEVPNVQVYVDDIYISHDDPREHLEQLEKVFSLLLNAGYVVSLKKSEIAQHEVEFLGFNITKEGRGLTETFKQKLLNITPPRDLKQLQSILGKLNFARNFIPNFSELVKPLYNIIATAPGKYITWTTDNSQQLQNIISMLNSAENLEERNPEVRLIMKVNTSPSAGYIRFYNEFAKRPIMYLNYVYTKAEVKFTNTEKLLTTIHKGLIKALDLGMGQEILVYSPIVSMTKIQKTPLPERKALPIRWITWMSYLEDPRIQFHYDKTLPELQQVPTVTDDIIAKIKHPSEFSMVFYTDGSAIKHPNVNKSHNAGMGIAQVQFKPEFTVINTWSIPLGDHTAQLAEVAAVEFACKKALKIDGPVLIVTDSFYVAESVNKELPYWQSNGFFNNKKKPLKHVSKWKSIADCIQLKPDIIIIHEKGHQPTASTFHTEGNNLADKLATQGSYVVNAGKRTADGSEFEKRTADGSEFESPKKKAKVE

SEQ ID NO: 586 - protein, 2088 aa, synthetic construct
MPAAKRVKLDGGDKKYSIGLDIGTNSVGWAVITDEYKVPSKKFKVLGNTDRHSIKKNLIGALLFDSGETAEATRLKRTARRRYTRRKNRICYLQEIFSNEMAKVDDSFFHRLEESFLVEEDKKHERHPIFGNIVDEVAYHEKYPTIYHLRKKLVDSTDKADLRLIYLALAHMIKFRGHFLIEGDLNPDNSDVDKLFIQLVQTYNQLFEENPINASGVDAKAILSARLSKSRRLENLIAQLPGEKKNGLFGNLIALSLGLTPNFKSNFDLAEDAKLQLSKDTYDDDLDNLLAQIGDQYADLFLAAKNLSDAILLSDILRVNTEITKAPLSASMIKRYDEHHQDLTLLKALVRQQLPEKYKEIFFDQSKNGYAGYIDGGASQEEFYKFIKPILEKMDGTEELLVKLNREDLLRKQRTFDNGSIPHQIHLGELHAILRRQEDFYPFLKDNREKIEKILTFRIPYYVGPLARGNSRFAWMTRKSEETITPWNFEEVVDKGASAQSFIERMTNFDKNLPNEKVLPKHSLLYEYFTVYNELTKVKYVTEGMRKPAFLSGEQKKAIVDLLFKTNRKVTVKQLKEDYFKKIECFDSVEISGVEDRFNASLGTYHDLLKIIKDKDFLDNEENEDILEDIVLTLTLFEDREMIEERLKTYAHLFDDKVMKQLKRRRYTGWGRLSRKLINGIRDKQSGKTILDFLKSDGFANRNFMQLIHDDSLTFKEDIQKAQVSGQGDSLHEHIANLAGSPAIKKGILQTVKVVDELVKVMGRHKPENIVIEMARENQTTQKGQKNSRERMKRIEEGIKELGSQILKEHPVENTQLQNEKLYLYYLQNGRDMYVDQELDINRLSDYDVDHIVPQSFLKDDSIDNKVLTRSDKARGKSDNVPSEEVVKKMKNYWRQLLNAKLITQRKFDNLTKAERGGLSELDKAGFIKRQLVETRQITKHVAQILDSRMNTKYDENDKLIREVKVITLKSKLVSDFRKDFQFYKVREINNYHHAHDAYLNAVVGTALIKKYPKLESEFVYGDYKVYDVRKMIAKSEQEIGKATAKYFFYSNIMNFFKTEITLANGEIRKRPLIETNGETGEIVWDKGRDFATVRKVLSMPQVNIVKKTEVQTGGFSKESILPKRNSDKLIARKKDWDPKKYGGFDSPTVAYSVLVVAKVEKGKSKKLKSVKELLGITIMERSSFEKNPIDFLEAKGYKEVKKDLIIKLPKYSLFELENGRKRMLASAGELQKGNELALPSKYVNFLYLASHYEKLKGSPEDNEQKQLFVEQHKHYLDEIIEQISEFSKRVILADANLDKVLSAYNKHRDKPIREQAENIIHLFTLTNLGAPAAFKYFDTTIDRKRYTSTKEVLDATLIHQSITGLYETRIDLSQLGGDGGGSSGSSGSSGSSGGIPWLMKKPLQLTTLVPLQEYEERLLKQTMLTGSYKEKLQSLFLKYDALWQHWENQVGHRRIKPHHIATGTVNPRPQKQYPINPKAKASIQTVINDLLKQGVLIQQNSIMNTPVYPVPKPDGKWRMVLDYREVNKTIPLIAAQNQHSAGILSSIFRGKYKTTLDLSNGFWAHSITPESYWLTAFTWLGQQYCWTRLPQGFLNSPALFNADVVDLLKEVPNVQVYVDDIYISHDDPREHLEQLEKVFSLLLNAGYVVSLKKSEIAQHEVEFLGFNITKEGRGLTETFKQKLLNITPPRDLKQLQSILGKLNFARNFIPNFSELVKPLYNIIATAPGKYITWTTDNSQQLQNIISMLNSAENLEERNPEVRLIMKVNTSPSAGYIRFYNEFAKRPIMYLNYVYTKAEVKFTNTEKLLTTIHKGLIKALDLGMGQEILVYSPIVSMTKIQKTPLPERKALPIRWITWMSYLEDPRIQFHYDKTLPELQQVPTVTDDIIAKIKHPSEFSMVFYTDGSAIKHPNVNKSHNAGMGIAQVQFKPEFTVINTWSIPLGDHTAQLAEVAAVEFACKKALKIDGPVLIVTDSFYVAESVNKELPYWQSNGFFNNKKKPLKHVSKWKSIADCIQLKPDIIIIHEKGHQPTASTFHTEGNNLADKLATQGSYVVNAGKRTADGSEFEKRTADGSEFESPKKKAKVE

SEQ ID NO: 587 - protein, 2085 aa, synthetic construct
MPAAKRVKLDGGDKKYSIGLDIGTNSVGWAVITDEYKVPSKKFKVLGNTDRHSIKKNLIGALLFDSGETAEATRLKRTARRRYTRRKNRICYLQEIFSNEMAKVDDSFFHRLEESFLVEEDKKHERHPIFGNIVDEVAYHEKYPTIYHLRKKLVDSTDKADLRLIYLALAHMIKFRGHFLIEGDLNPDNSDVDKLFIQLVQTYNQLFEENPINASGVDAKAILSARLSKSRRLENLIAQLPGEKKNGLFGNLIALSLGLTPNFKSNFDLAEDAKLQLSKDTYDDDLDNLLAQIGDQYADLFLAAKNLSDAILLSDILRVNTEITKAPLSASMIKRYDEHHQDLTLLKALVRQQLPEKYKEIFFDQSKNGYAGYIDGGASQEEFYKFIKPILEKMDGTEELLVKLNREDLLRKQRTFDNGSIPHQIHLGELHAILRRQEDFYPFLKDNREKIEKILTFRIPYYVGPLARGNSRFAWMTRKSEETITPWNFEEVVDKGASAQSFIERMTNFDKNLPNEKVLPKHSLLYEYFTVYNELTKVKYVTEGMRKPAFLSGEQKKAIVDLLFKTNRKVTVKQLKEDYFKKIECFDSVEISGVEDRFNASLGTYHDLLKIIKDKDFLDNEENEDILEDIVLTLTLFEDREMIEERLKTYAHLFDDKVMKQLKRRRYTGWGRLSRKLINGIRDKQSGKTILDFLKSDGFANRNFMQLIHDDSLTFKEDIQKAQVSGQGDSLHEHIANLAGSPAIKKGILQTVKVVDELVKVMGRHKPENIVIEMARENQTTQKGQKNSRERMKRIEEGIKELGSQILKEHPVENTQLQNEKLYLYYLQNGRDMYVDQELDINRLSDYDVDHIVPQSFLKDDSIDNKVLTRSDKARGKSDNVPSEEVVKKMKNYWRQLLNAKLITQRKFDNLTKAERGGLSELDKAGFIKRQLVETRQITKHVAQILDSRMNTKYDENDKLIREVKVITLKSKLVSDFRKDFQFYKVREINNYHHAHDAYLNAVVGTALIKKYPKLESEFVYGDYKVYDVRKMIAKSEQEIGKATAKYFFYSNIMNFFKTEITLANGEIRKRPLIETNGETGEIVWDKGRDFATVRKVLSMPQVNIVKKTEVQTGGFSKESILPKRNSDKLIARKKDWDPKKYGGFDSPTVAYSVLVVAKVEKGKSKKLKSVKELLGITIMERSSFEKNPIDFLEAKGYKEVKKDLIIKLPKYSLFELENGRKRMLASAGELQKGNELALPSKYVNFLYLASHYEKLKGSPEDNEQKQLFVEQHKHYLDEIIEQISEFSKRVILADANLDKVLSAYNKHRDKPIREQAENIIHLFTLTNLGAPAAFKYFDTTIDRKRYTSTKEVLDATLIHQSITGLYETRIDLSQLGGDGGGSSGGSGGGGGIPWLMKKPLQLTTLVPLQEYEERLLKQTMLTGSYKEKLQSLFLKYDALWQHWENQVGHRRIKPHHIATGTVNPRPQKQYPINPKAKASIQTVINDLLKQGVLIQQNSIMNTPVYPVPKPDGKWRMVLDYREVNKTIPLIAAQNQHSAGILSSIFRGKYKTTLDLSNGFWAHSITPESYWLTAFTWLGQQYCWTRLPQGFLNSPALFNADVVDLLKEVPNVQVYVDDIYISHDDPREHLEQLEKVFSLLLNAGYVVSLKKSEIAQHEVEFLGFNITKEGRGLTETFKQKLLNITPPRDLKQLQSILGKLNFARNFIPNFSELVKPLYNIIATAPGKYITWTTDNSQQLQNIISMLNSAENLEERNPEVRLIMKVNTSPSAGYIRFYNEFAKRPIMYLNYVYTKAEVKFTNTEKLLTTIHKGLIKALDLGMGQEILVYSPIVSMTKIQKTPLPERKALPIRWITWMSYLEDPRIQFHYDKTLPELQQVPTVTDDIIAKIKHPSEFSMVFYTDGSAIKHPNVNKSHNAGMGIAQVQFKPEFTVINTWSIPLGDHTAQLAEVAAVEFACKKALKIDGPVLIVTDSFYVAESVNKELPYWQSNGFFNNKKKPLKHVSKWKSIADCIQLKPDIIIIHEKGHQPTASTFHTEGNNLADKLATQGSYVVNAGKRTADGSEFEKRTADGSEFESPKKKAKVE

SEQ ID NO: 588 - protein, 2084 aa, synthetic construct
MPAAKRVKLDGGDKKYSIGLDIGTNSVGWAVITDEYKVPSKKFKVLGNTDRHSIKKNLIGALLFDSGETAEATRLKRTARRRYTRRKNRICYLQEIFSNEMAKVDDSFFHRLEESFLVEEDKKHERHPIFGNIVDEVAYHEKYPTIYHLRKKLVDSTDKADLRLIYLALAHMIKFRGHFLIEGDLNPDNSDVDKLFIQLVQTYNQLFEENPINASGVDAKAILSARLSKSRRLENLIAQLPGEKKNGLFGNLIALSLGLTPNFKSNFDLAEDAKLQLSKDTYDDDLDNLLAQIGDQYADLFLAAKNLSDAILLSDILRVNTEITKAPLSASMIKRYDEHHQDLTLLKALVRQQLPEKYKEIFFDQSKNGYAGYIDGGASQEEFYKFIKPILEKMDGTEELLVKLNREDLLRKQRTFDNGSIPHQIHLGELHAILRRQEDFYPFLKDNREKIEKILTFRIPYYVGPLARGNSRFAWMTRKSEETITPWNFEEVVDKGASAQSFIERMTNFDKNLPNEKVLPKHSLLYEYFTVYNELTKVKYVTEGMRKPAFLSGEQKKAIVDLLFKTNRKVTVKQLKEDYFKKIECFDSVEISGVEDRFNASLGTYHDLLKIIKDKDFLDNEENEDILEDIVLTLTLFEDREMIEERLKTYAHLFDDKVMKQLKRRRYTGWGRLSRKLINGIRDKQSGKTILDFLKSDGFANRNFMQLIHDDSLTFKEDIQKAQVSGQGDSLHEHIANLAGSPAIKKGILQTVKVVDELVKVMGRHKPENIVIEMARENQTTQKGQKNSRERMKRIEEGIKELGSQILKEHPVENTQLQNEKLYLYYLQNGRDMYVDQELDINRLSDYDVDHIVPQSFLKDDSIDNKVLTRSDKARGKSDNVPSEEVVKKMKNYWRQLLNAKLITQRKFDNLTKAERGGLSELDKAGFIKRQLVETRQITKHVAQILDSRMNTKYDENDKLIREVKVITLKSKLVSDFRKDFQFYKVREINNYHHAHDAYLNAVVGTALIKKYPKLESEFVYGDYKVYDVRKMIAKSEQEIGKATAKYFFYSNIMNFFKTEITLANGEIRKRPLIETNGETGEIVWDKGRDFATVRKVLSMPQVNIVKKTEVQTGGFSKESILPKRNSDKLIARKKDWDPKKYGGFDSPTVAYSVLVVAKVEKGKSKKLKSVKELLGITIMERSSFEKNPIDFLEAKGYKEVKKDLIIKLPKYSLFELENGRKRMLASAGELQKGNELALPSKYVNFLYLASHYEKLKGSPEDNEQKQLFVEQHKHYLDEIIEQISEFSKRVILADANLDKVLSAYNKHRDKPIREQAENIIHLFTLTNLGAPAAFKYFDTTIDRKRYTSTKEVLDATLIHQSITGLYETRIDLSQLGGDGGGGGEAAAKGGIPWLMKKPLQLTTLVPLQEYEERLLKQTMLTGSYKEKLQSLFLKYDALWQHWENQVGHRRIKPHHIATGTVNPRPQKQYPINPKAKASIQTVINDLLKQGVLIQQNSIMNTPVYPVPKPDGKWRMVLDYREVNKTIPLIAAQNQHSAGILSSIFRGKYKTTLDLSNGFWAHSITPESYWLTAFTWLGQQYCWTRLPQGFLNSPALFNADVVDLLKEVPNVQVYVDDIYISHDDPREHLEQLEKVFSLLLNAGYVVSLKKSEIAQHEVEFLGFNITKEGRGLTETFKQKLLNITPPRDLKQLQSILGKLNFARNFIPNFSELVKPLYNIIATAPGKYITWTTDNSQQLQNIISMLNSAENLEERNPEVRLIMKVNTSPSAGYIRFYNEFAKRPIMYLNYVYTKAEVKFTNTEKLLTTIHKGLIKALDLGMGQEILVYSPIVSMTKIQKTPLPERKALPIRWITWMSYLEDPRIQFHYDKTLPELQQVPTVTDDIIAKIKHPSEFSMVFYTDGSAIKHPNVNKSHNAGMGIAQVQFKPEFTVINTWSIPLGDHTAQLAEVAAVEFACKKALKIDGPVLIVTDSFYVAESVNKELPYWQSNGFFNNKKKPLKHVSKWKSIADCIQLKPDIIIIHEKGHQPTASTFHTEGNNLADKLATQGSYVVNAGKRTADGSEFEKRTADGSEFESPKKKAKVE

SEQ ID NO: 589 - protein, 2085 aa, synthetic construct
MPAAKRVKLDGGDKKYSIGLDIGTNSVGWAVITDEYKVPSKKFKVLGNTDRHSIKKNLIGALLFDSGETAEATRLKRTARRRYTRRKNRICYLQEIFSNEMAKVDDSFFHRLEESFLVEEDKKHERHPIFGNIVDEVAYHEKYPTIYHLRKKLVDSTDKADLRLIYLALAHMIKFRGHFLIEGDLNPDNSDVDKLFIQLVQTYNQLFEENPINASGVDAKAILSARLSKSRRLENLIAQLPGEKKNGLFGNLIALSLGLTPNFKSNFDLAEDAKLQLSKDTYDDDLDNLLAQIGDQYADLFLAAKNLSDAILLSDILRVNTEITKAPLSASMIKRYDEHHQDLTLLKALVRQQLPEKYKEIFFDQSKNGYAGYIDGGASQEEFYKFIKPILEKMDGTEELLVKLNREDLLRKQRTFDNGSIPHQIHLGELHAILRRQEDFYPFLKDNREKIEKILTFRIPYYVGPLARGNSRFAWMTRKSEETITPWNFEEVVDKGASAQSFIERMTNFDKNLPNEKVLPKHSLLYEYFTVYNELTKVKYVTEGMRKPAFLSGEQKKAIVDLLFKTNRKVTVKQLKEDYFKKIECFDSVEISGVEDRFNASLGTYHDLLKIIKDKDFLDNEENEDILEDIVLTLTLFEDREMIEERLKTYAHLFDDKVMKQLKRRRYTGWGRLSRKLINGIRDKQSGKTILDFLKSDGFANRNFMQLIHDDSLTFKEDIQKAQVSGQGDSLHEHIANLAGSPAIKKGILQTVKVVDELVKVMGRHKPENIVIEMARENQTTQKGQKNSRERMKRIEEGIKELGSQILKEHPVENTQLQNEKLYLYYLQNGRDMYVDQELDINRLSDYDVDHIVPQSFLKDDSIDNKVLTRSDKARGKSDNVPSEEVVKKMKNYWRQLLNAKLITQRKFDNLTKAERGGLSELDKAGFIKRQLVETRQITKHVAQILDSRMNTKYDENDKLIREVKVITLKSKLVSDFRKDFQFYKVREINNYHHAHDAYLNAVVGTALIKKYPKLESEFVYGDYKVYDVRKMIAKSEQEIGKATAKYFFYSNIMNFFKTEITLANGEIRKRPLIETNGETGEIVWDKGRDFATVRKVLSMPQVNIVKKTEVQTGGFSKESILPKRNSDKLIARKKDWDPKKYGGFDSPTVAYSVLVVAKVEKGKSKKLKSVKELLGITIMERSSFEKNPIDFLEAKGYKEVKKDLIIKLPKYSLFELENGRKRMLASAGELQKGNELALPSKYVNFLYLASHYEKLKGSPEDNEQKQLFVEQHKHYLDEIIEQISEFSKRVILADANLDKVLSAYNKHRDKPIREQAENIIHLFTLTNLGAPAAFKYFDTTIDRKRYTSTKEVLDATLIHQSITGLYETRIDLSQLGGDGGGGSGSSPAPGGIPWLMKKPLQLTTLVPLQEYEERLLKQTMLTGSYKEKLQSLFLKYDALWQHWENQVGHRRIKPHHIATGTVNPRPQKQYPINPKAKASIQTVINDLLKQGVLIQQNSIMNTPVYPVPKPDGKWRMVLDYREVNKTIPLIAAQNQHSAGILSSIFRGKYKTTLDLSNGFWAHSITPESYWLTAFTWLGQQYCWTRLPQGFLNSPALFNADVVDLLKEVPNVQVYVDDIYISHDDPREHLEQLEKVFSLLLNAGYVVSLKKSEIAQHEVEFLGFNITKEGRGLTETFKQKLLNITPPRDLKQLQSILGKLNFARNFIPNFSELVKPLYNIIATAPGKYITWTTDNSQQLQNIISMLNSAENLEERNPEVRLIMKVNTSPSAGYIRFYNEFAKRPIMYLNYVYTKAEVKFTNTEKLLTTIHKGLIKALDLGMGQEILVYSPIVSMTKIQKTPLPERKALPIRWITWMSYLEDPRIQFHYDKTLPELQQVPTVTDDIIAKIKHPSEFSMVFYTDGSAIKHPNVNKSHNAGMGIAQVQFKPEFTVINTWSIPLGDHTAQLAEVAAVEFACKKALKIDGPVLIVTDSFYVAESVNKELPYWQSNGFFNNKKKPLKHVSKWKSIADCIQLKPDIIIIHEKGHQPTASTFHTEGNNLADKLATQGSYVVNAGKRTADGSEFEKRTADGSEFESPKKKAKVE

SEQ ID NO: 590 - protein, 2195 aa, synthetic construct
MPAAKRVKLDGGDKKYSIGLDIGTNSVGWAVITDEYKVPSKKFKVLGNTDRHSIKKNLIGALLFDSGETAEATRLKRTARRRYTRRKNRICYLQEIFSNEMAKVDDSFFHRLEESFLVEEDKKHERHPIFGNIVDEVAYHEKYPTIYHLRKKLVDSTDKADLRLIYLALAHMIKFRGHFLIEGDLNPDNSDVDKLFIQLVQTYNQLFEENPINASGVDAKAILSARLSKSRRLENLIAQLPGEKKNGLFGNLIALSLGLTPNFKSNFDLAEDAKLQLSKDTYDDDLDNLLAQIGDQYADLFLAAKNLSDAILLSDILRVNTEITKAPLSASMIKRYDEHHQDLTLLKALVRQQLPEKYKEIFFDQSKNGYAGYIDGGASQEEFYKFIKPILEKMDGTEELLVKLNREDLLRKQRTFDNGSIPHQIHLGELHAILRRQEDFYPFLKDNREKIEKILTFRIPYYVGPLARGNSRFAWMTRKSEETITPWNFEEVVDKGASAQSFIERMTNFDKNLPNEKVLPKHSLLYEYFTVYNELTKVKYVTEGMRKPAFLSGEQKKAIVDLLFKTNRKVTVKQLKEDYFKKIECFDSVEISGVEDRFNASLGTYHDLLKIIKDKDFLDNEENEDILEDIVLTLTLFEDREMIEERLKTYAHLFDDKVMKQLKRRRYTGWGRLSRKLINGIRDKQSGKTILDFLKSDGFANRNFMQLIHDDSLTFKEDIQKAQVSGQGDSLHEHIANLAGSPAIKKGILQTVKVVDELVKVMGRHKPENIVIEMARENQTTQKGQKNSRERMKRIEEGIKELGSQILKEHPVENTQLQNEKLYLYYLQNGRDMYVDQELDINRLSDYDVDHIVPQSFLKDDSIDNKVLTRSDKARGKSDNVPSEEVVKKMKNYWRQLLNAKLITQRKFDNLTKAERGGLSELDKAGFIKRQLVETRQITKHVAQILDSRMNTKYDENDKLIREVKVITLKSKLVSDFRKDFQFYKVREINNYHHAHDAYLNAVVGTALIKKYPKLESEFVYGDYKVYDVRKMIAKSEQEIGKATAKYFFYSNIMNFFKTEITLANGEIRKRPLIETNGETGEIVWDKGRDFATVRKVLSMPQVNIVKKTEVQTGGFSKESILPKRNSDKLIARKKDWDPKKYGGFDSPTVAYSVLVVAKVEKGKSKKLKSVKELLGITIMERSSFEKNPIDFLEAKGYKEVKKDLIIKLPKYSLFELENGRKRMLASAGELQKGNELALPSKYVNFLYLASHYEKLKGSPEDNEQKQLFVEQHKHYLDEIIEQISEFSKRVILADANLDKVLSAYNKHRDKPIREQAENIIHLFTLTNLGAPAAFKYFDTTIDRKRYTSTKEVLDATLIHQSITGLYETRIDLSQLGGDGGEAAAKEAAAKEAAAKEAAAKEAAAKEAAAKGGMDPLQLLQPLEAEIKGTKLKAHWNSGATITCVPQAFLEEEVPIKNIWIKTIHGEKEQPVYYLTFKIQGRKVEAEVISSPYDYILVSPSDIPWLMKKPLQLTTLVPLQEYEERLLKQTMLTGSYKEKLQSLFLKYDALWQHWENQVGHRRIKPHHIATGTVNPRPQKQYPINPKAKASIQTVINDLLKQGVLIQQNSIMNTPVYPVPKPDGKWRMVLDYREVNKTIPLIAAQNQHSAGILSSIFRGKYKTTLDLSNGFWAHSITPESYWLTAFTWLGQQYCWTRLPQGFLNSPALFNADVVDLLKEVPNVQVYVDDIYISHDDPREHLEQLEKVFSLLLNAGYVVSLKKSEIAQHEVEFLGFNITKEGRGLTETFKQKLLNITPPRDLKQLQSILGLLNFARNFIPNFSELVKPLYNIIATAPGKYITWTTDNSQQLQNIISMLNSAENLEERNPEVRLIMKVNTSPSAGYIRFYNEFAKRPIMYLNYVYTKAEVKFTNTEKLLTTIHKGLIKALDLGMGQEILVYSPIVSMTKIQKTPLPERKALPIRWITWMSYLEDPRIQFHYDKTLPELQQVPTVTDDIIAKIKHPSEFSMVFYTDGSAIKHPNVNKSHNAGMGIAQVQFKPEFTVINTWSIPLGDHTAQLAEVAAVEFACKKALKIDGPVLIVTDSFYVAESVNKELPYWQSNGFFNNKKKPLKHVSKWKSIADCIQLKPDIIIIHEKGHQPTASTFHTEGNNLADKLATQGSYVVNAGKRTADGSEFEKRTADGSEFESPKKKAKVE

SEQ ID NO: 591 - protein, 2211 aa, synthetic construct
MPAAKRVKLDGGDKKYSIGLDIGTNSVGWAVITDEYKVPSKKFKVLGNTDRHSIKKNLIGALLFDSGETAEATRLKRTARRRYTRRKNRICYLQEIFSNEMAKVDDSFFHRLEESFLVEEDKKHERHPIFGNIVDEVAYHEKYPTIYHLRKKLVDSTDKADLRLIYLALAHMIKFRGHFLIEGDLNPDNSDVDKLFIQLVQTYNQLFEENPINASGVDAKAILSARLSKSRRLENLIAQLPGEKKNGLFGNLIALSLGLTPNFKSNFDLAEDAKLQLSKDTYDDDLDNLLAQIGDQYADLFLAAKNLSDAILLSDILRVNTEITKAPLSASMIKRYDEHHQDLTLLKALVRQQLPEKYKEIFFDQSKNGYAGYIDGGASQEEFYKFIKPILEKMDGTEELLVKLNREDLLRKQRTFDNGSIPHQIHLGELHAILRRQEDFYPFLKDNREKIEKILTFRIPYYVGPLARGNSRFAWMTRKSEETITPWNFEEVVDKGASAQSFIERMTNFDKNLPNEKVLPKHSLLYEYFTVYNELTKVKYVTEGMRKPAFLSGEQKKAIVDLLFKTNRKVTVKQLKEDYFKKIECFDSVEISGVEDRFNASLGTYHDLLKIIKDKDFLDNEENEDILEDIVLTLTLFEDREMIEERLKTYAHLFDDKVMKQLKRRRYTGWGRLSRKLINGIRDKQSGKTILDFLKSDGFANRNFMQLIHDDSLTFKEDIQKAQVSGQGDSLHEHIANLAGSPAIKKGILQTVKVVDELVKVMGRHKPENIVIEMARENQTTQKGQKNSRERMKRIEEGIKELGSQILKEHPVENTQLQNEKLYLYYLQNGRDMYVDQELDINRLSDYDVDHIVPQSFLKDDSIDNKVLTRSDKARGKSDNVPSEEVVKKMKNYWRQLLNAKLITQRKFDNLTKAERGGLSELDKAGFIKRQLVETRQITKHVAQILDSRMNTKYDENDKLIREVKVITLKSKLVSDFRKDFQFYKVREINNYHHAHDAYLNAVVGTALIKKYPKLESEFVYGDYKVYDVRKMIAKSEQEIGKATAKYFFYSNIMNFFKTEITLANGEIRKRPLIETNGETGEIVWDKGRDFATVRKVLSMPQVNIVKKTEVQTGGFSKESILPKRNSDKLIARKKDWDPKKYGGFDSPTVAYSVLVVAKVEKGKSKKLKSVKELLGITIMERSSFEKNPIDFLEAKGYKEVKKDLIIKLPKYSLFELENGRKRMLASAGELQKGNELALPSKYVNFLYLASHYEKLKGSPEDNEQKQLFVEQHKHYLDEIIEQISEFSKRVILADANLDKVLSAYNKHRDKPIREQAENIIHLFTLTNLGAPAAFKYFDTTIDRKRYTSTKEVLDATLIHQSITGLYETRIDLSQLGGDGGAEAAAKEAAAKEAAAKEAAAKALEAEAAAKEAAAKEAAAKEAAAKAGGMDPLQLLQPLEAEIKGTKLKAHWNSGATITCVPQAFLEEEVPIKNIWIKTIHGEKEQPVYYLTFKIQGRKVEAEVISSPYDYILVSPSDIPWLMKKPLQLTTLVPLQEYEERLLKQTMLTGSYKEKLQSLFLKYDALWQHWENQVGHRRIKPHHIATGTVNPRPQKQYPINPKAKASIQTVINDLLKQGVLIQQNSIMNTPVYPVPKPDGKWRMVLDYREVNKTIPLIAAQNQHSAGILSSIFRGKYKTTLDLSNGFWAHSITPESYWLTAFTWLGQQYCWTRLPQGFLNSPALFNADVVDLLKEVPNVQVYVDDIYISHDDPREHLEQLEKVFSLLLNAGYVVSLKKSEIAQHEVEFLGFNITKEGRGLTETFKQKLLNITPPRDLKQLQSILGLLNFARNFIPNFSELVKPLYNIIATAPGKYITWTTDNSQQLQNIISMLNSAENLEERNPEVRLIMKVNTSPSAGYIRFYNEFAKRPIMYLNYVYTKAEVKFTNTEKLLTTIHKGLIKALDLGMGQEILVYSPIVSMTKIQKTPLPERKALPIRWITWMSYLEDPRIQFHYDKTLPELQQVPTVTDDIIAKIKHPSEFSMVFYTDGSAIKHPNVNKSHNAGMGIAQVQFKPEFTVINTWSIPLGDHTAQLAEVAAVEFACKKALKIDGPVLIVTDSFYVAESVNKELPYWQSNGFFNNKKKPLKHVSKWKSIADCIQLKPDIIIIHEKGHQPTASTFHTEGNNLADKLATQGSYVVNAGKRTADGSEFEKRTADGSEFESPKKKAKVE

SEQ ID NO: 592 - protein, 2195 aa, synthetic construct
MPAAKRVKLDGGDKKYSIGLDIGTNSVGWAVITDEYKVPSKKFKVLGNTDRHSIKKNLIGALLFDSGETAEATRLKRTARRRYTRRKNRICYLQEIFSNEMAKVDDSFFHRLEESFLVEEDKKHERHPIFGNIVDEVAYHEKYPTIYHLRKKLVDSTDKADLRLIYLALAHMIKFRGHFLIEGDLNPDNSDVDKLFIQLVQTYNQLFEENPINASGVDAKAILSARLSKSRRLENLIAQLPGEKKNGLFGNLIALSLGLTPNFKSNFDLAEDAKLQLSKDTYDDDLDNLLAQIGDQYADLFLAAKNLSDAILLSDILRVNTEITKAPLSASMIKRYDEHHQDLTLLKALVRQQLPEKYKEIFFDQSKNGYAGYIDGGASQEEFYKFIKPILEKMDGTEELLVKLNREDLLRKQRTFDNGSIPHQIHLGELHAILRRQEDFYPFLKDNREKIEKILTFRIPYYVGPLARGNSRFAWMTRKSEETITPWNFEEVVDKGASAQSFIERMTNFDKNLPNEKVLPKHSLLYEYFTVYNELTKVKYVTEGMRKPAFLSGEQKKAIVDLLFKTNRKVTVKQLKEDYFKKIECFDSVEISGVEDRFNASLGTYHDLLKIIKDKDFLDNEENEDILEDIVLTLTLFEDREMIEERLKTYAHLFDDKVMKQLKRRRYTGWGRLSRKLINGIRDKQSGKTILDFLKSDGFANRNFMQLIHDDSLTFKEDIQKAQVSGQGDSLHEHIANLAGSPAIKKGILQTVKVVDELVKVMGRHKPENIVIEMARENQTTQKGQKNSRERMKRIEEGIKELGSQILKEHPVENTQLQNEKLYLYYLQNGRDMYVDQELDINRLSDYDVDHIVPQSFLKDDSIDNKVLTRSDKARGKSDNVPSEEVVKKMKNYWRQLLNAKLITQRKFDNLTKAERGGLSELDKAGFIKRQLVETRQITKHVAQILDSRMNTKYDENDKLIREVKVITLKSKLVSDFRKDFQFYKVREINNYHHAHDAYLNAVVGTALIKKYPKLESEFVYGDYKVYDVRKMIAKSEQEIGKATAKYFFYSNIMNFFKTEITLANGEIRKRPLIETNGETGEIVWDKGRDFATVRKVLSMPQVNIVKKTEVQTGGFSKESILPKRNSDKLIARKKDWDPKKYGGFDSPTVAYSVLVVAKVEKGKSKKLKSVKELLGITIMERSSFEKNPIDFLEAKGYKEVKKDLIIKLPKYSLFELENGRKRMLASAGELQKGNELALPSKYVNFLYLASHYEKLKGSPEDNEQKQLFVEQHKHYLDEIIEQISEFSKRVILADANLDKVLSAYNKHRDKPIREQAENIIHLFTLTNLGAPAAFKYFDTTIDRKRYTSTKEVLDATLIHQSITGLYETRIDLSQLGGDGGGGGGSGGGGSGGGGSGGGGSGGGGSGGGGSGGMDPLQLLQPLEAEIKGTKLKAHWNSGATITCVPQAFLEEEVPIKNIWIKTIHGEKEQPVYYLTFKIQGRKVEAEVISSPYDYILVSPSDIPWLMKKPLQLTTLVPLQEYEERLLKQTMLTGSYKEKLQSLFLKYDALWQHWENQVGHRRIKPHHIATGTVNPRPQKQYPINPKAKASIQTVINDLLKQGVLIQQNSIMNTPVYPVPKPDGKWRMVLDYREVNKTIPLIAAQNQHSAGILSSIFRGKYKTTLDLSNGFWAHSITPESYWLTAFTWLGQQYCWTRLPQGFLNSPALFNADVVDLLKEVPNVQVYVDDIYISHDDPREHLEQLEKVFSLLLNAGYVVSLKKSEIAQHEVEFLGFNITKEGRGLTETFKQKLLNITPPRDLKQLQSILGLLNFARNFIPNFSELVKPLYNIIATAPGKYITWTTDNSQQLQNIISMLNSAENLEERNPEVRLIMKVNTSPSAGYIRFYNEFAKRPIMYLNYVYTKAEVKFTNTEKLLTTIHKGLIKALDLGMGQEILVYSPIVSMTKIQKTPLPERKALPIRWITWMSYLEDPRIQFHYDKTLPELQQVPTVTDDIIAKIKHPSEFSMVFYTDGSAIKHPNVNKSHNAGMGIAQVQFKPEFTVINTWSIPLGDHTAQLAEVAAVEFACKKALKIDGPVLIVTDSFYVAESVNKELPYWQSNGFFNNKKKPLKHVSKWKSIADCIQLKPDIIIIHEKGHQPTASTFHTEGNNLADKLATQGSYVVNAGKRTADGSEFEKRTADGSEFESPKKKAKVE

SEQ ID NO: 593 - protein, 2190 aa, synthetic construct
MPAAKRVKLDGGDKKYSIGLDIGTNSVGWAVITDEYKVPSKKFKVLGNTDRHSIKKNLIGALLFDSGETAEATRLKRTARRRYTRRKNRICYLQEIFSNEMAKVDDSFFHRLEESFLVEEDKKHERHPIFGNIVDEVAYHEKYPTIYHLRKKLVDSTDKADLRLIYLALAHMIKFRGHFLIEGDLNPDNSDVDKLFIQLVQTYNQLFEENPINASGVDAKAILSARLSKSRRLENLIAQLPGEKKNGLFGNLIALSLGLTPNFKSNFDLAEDAKLQLSKDTYDDDLDNLLAQIGDQYADLFLAAKNLSDAILLSDILRVNTEITKAPLSASMIKRYDEHHQDLTLLKALVRQQLPEKYKEIFFDQSKNGYAGYIDGGASQEEFYKFIKPILEKMDGTEELLVKLNREDLLRKQRTFDNGSIPHQIHLGELHAILRRQEDFYPFLKDNREKIEKILTFRIPYYVGPLARGNSRFAWMTRKSEETITPWNFEEVVDKGASAQSFIERMTNFDKNLPNEKVLPKHSLLYEYFTVYNELTKVKYVTEGMRKPAFLSGEQKKAIVDLLFKTNRKVTVKQLKEDYFKKIECFDSVEISGVEDRFNASLGTYHDLLKIIKDKDFLDNEENEDILEDIVLTLTLFEDREMIEERLKTYAHLFDDKVMKQLKRRRYTGWGRLSRKLINGIRDKQSGKTILDFLKSDGFANRNFMQLIHDDSLTFKEDIQKAQVSGQGDSLHEHIANLAGSPAIKKGILQTVKVVDELVKVMGRHKPENIVIEMARENQTTQKGQKNSRERMKRIEEGIKELGSQILKEHPVENTQLQNEKLYLYYLQNGRDMYVDQELDINRLSDYDVDHIVPQSFLKDDSIDNKVLTRSDKARGKSDNVPSEEVVKKMKNYWRQLLNAKLITQRKFDNLTKAERGGLSELDKAGFIKRQLVETRQITKHVAQILDSRMNTKYDENDKLIREVKVITLKSKLVSDFRKDFQFYKVREINNYHHAHDAYLNAVVGTALIKKYPKLESEFVYGDYKVYDVRKMIAKSEQEIGKATAKYFFYSNIMNFFKTEITLANGEIRKRPLIETNGETGEIVWDKGRDFATVRKVLSMPQVNIVKKTEVQTGGFSKESILPKRNSDKLIARKKDWDPKKYGGFDSPTVAYSVLVVAKVEKGKSKKLKSVKELLGITIMERSSFEKNPIDFLEAKGYKEVKKDLIIKLPKYSLFELENGRKRMLASAGELQKGNELALPSKYVNFLYLASHYEKLKGSPEDNEQKQLFVEQHKHYLDEIIEQISEFSKRVILADANLDKVLSAYNKHRDKPIREQAENIIHLFTLTNLGAPAAFKYFDTTIDRKRYTSTKEVLDATLIHQSITGLYETRIDLSQLGGDGGEAAAKEAAAKEAAAKEAAAKEAAAKGGMDPLQLLQPLEAEIKGTKLKAHWNSGATITCVPQAFLEEEVPIKNIWIKTIHGEKEQPVYYLTFKIQGRKVEAEVISSPYDYILVSPSDIPWLMKKPLQLTTLVPLQEYEERLLKQTMLTGSYKEKLQSLFLKYDALWQHWENQVGHRRIKPHHIATGTVNPRPQKQYPINPKAKASIQTVINDLLKQGVLIQQNSIMNTPVYPVPKPDGKWRMVLDYREVNKTIPLIAAQNQHSAGILSSIFRGKYKTTLDLSNGFWAHSITPESYWLTAFTWLGQQYCWTRLPQGFLNSPALFNADVVDLLKEVPNVQVYVDDIYISHDDPREHLEQLEKVFSLLLNAGYVVSLKKSEIAQHEVEFLGFNITKEGRGLTETFKQKLLNITPPRDLKQLQSILGLLNFARNFIPNFSELVKPLYNIIATAPGKYITWTTDNSQQLQNIISMLNSAENLEERNPEVRLIMKVNTSPSAGYIRFYNEFAKRPIMYLNYVYTKAEVKFTNTEKLLTTIHKGLIKALDLGMGQEILVYSPIVSMTKIQKTPLPERKALPIRWITWMSYLEDPRIQFHYDKTLPELQQVPTVTDDIIAKIKHPSEFSMVFYTDGSAIKHPNVNKSHNAGMGIAQVQFKPEFTVINTWSIPLGDHTAQLAEVAAVEFACKKALKIDGPVLIVTDSFYVAESVNKELPYWQSNGFFNNKKKPLKHVSKWKSIADCIQLKPDIIIIHEKGHQPTASTFHTEGNNLADKLATQGSYVVNAGKRTADGSEFEKRTADGSEFESPKKKAKVE

SEQ ID NO: 594 - protein, 2174 aa, synthetic construct
MPAAKRVKLDGGDKKYSIGLDIGTNSVGWAVITDEYKVPSKKFKVLGNTDRHSIKKNLIGALLFDSGETAEATRLKRTARRRYTRRKNRICYLQEIFSNEMAKVDDSFFHRLEESFLVEEDKKHERHPIFGNIVDEVAYHEKYPTIYHLRKKLVDSTDKADLRLIYLALAHMIKFRGHFLIEGDLNPDNSDVDKLFIQLVQTYNQLFEENPINASGVDAKAILSARLSKSRRLENLIAQLPGEKKNGLFGNLIALSLGLTPNFKSNFDLAEDAKLQLSKDTYDDDLDNLLAQIGDQYADLFLAAKNLSDAILLSDILRVNTEITKAPLSASMIKRYDEHHQDLTLLKALVRQQLPEKYKEIFFDQSKNGYAGYIDGGASQEEFYKFIKPILEKMDGTEELLVKLNREDLLRKQRTFDNGSIPHQIHLGELHAILRRQEDFYPFLKDNREKIEKILTFRIPYYVGPLARGNSRFAWMTRKSEETITPWNFEEVVDKGASAQSFIERMTNFDKNLPNEKVLPKHSLLYEYFTVYNELTKVKYVTEGMRKPAFLSGEQKKAIVDLLFKTNRKVTVKQLKEDYFKKIECFDSVEISGVEDRFNASLGTYHDLLKIIKDKDFLDNEENEDILEDIVLTLTLFEDREMIEERLKTYAHLFDDKVMKQLKRRRYTGWGRLSRKLINGIRDKQSGKTILDFLKSDGFANRNFMQLIHDDSLTFKEDIQKAQVSGQGDSLHEHIANLAGSPAIKKGILQTVKVVDELVKVMGRHKPENIVIEMARENQTTQKGQKNSRERMKRIEEGIKELGSQILKEHPVENTQLQNEKLYLYYLQNGRDMYVDQELDINRLSDYDVDHIVPQSFLKDDSIDNKVLTRSDKARGKSDNVPSEEVVKKMKNYWRQLLNAKLITQRKFDNLTKAERGGLSELDKAGFIKRQLVETRQITKHVAQILDSRMNTKYDENDKLIREVKVITLKSKLVSDFRKDFQFYKVREINNYHHAHDAYLNAVVGTALIKKYPKLESEFVYGDYKVYDVRKMIAKSEQEIGKATAKYFFYSNIMNFFKTEITLANGEIRKRPLIETNGETGEIVWDKGRDFATVRKVLSMPQVNIVKKTEVQTGGFSKESILPKRNSDKLIARKKDWDPKKYGGFDSPTVAYSVLVVAKVEKGKSKKLKSVKELLGITIMERSSFEKNPIDFLEAKGYKEVKKDLIIKLPKYSLFELENGRKRMLASAGELQKGNELALPSKYVNFLYLASHYEKLKGSPEDNEQKQLFVEQHKHYLDEIIEQISEFSKRVILADANLDKVLSAYNKHRDKPIREQAENIIHLFTLTNLGAPAAFKYFDTTIDRKRYTSTKEVLDATLIHQSITGLYETRIDLSQLGGDGGGGGPAPGGSGGMDPLQLLQPLEAEIKGTKLKAHWNSGATITCVPQAFLEEEVPIKNIWIKTIHGEKEQPVYYLTFKIQGRKVEAEVISSPYDYILVSPSDIPWLMKKPLQLTTLVPLQEYEERLLKQTMLTGSYKEKLQSLFLKYDALWQHWENQVGHRRIKPHHIATGTVNPRPQKQYPINPKAKASIQTVINDLLKQGVLIQQNSIMNTPVYPVPKPDGKWRMVLDYREVNKTIPLIAAQNQHSAGILSSIFRGKYKTTLDLSNGFWAHSITPESYWLTAFTWLGQQYCWTRLPQGFLNSPALFNADVVDLLKEVPNVQVYVDDIYISHDDPREHLEQLEKVFSLLLNAGYVVSLKKSEIAQHEVEFLGFNITKEGRGLTETFKQKLLNITPPRDLKQLQSILGLLNFARNFIPNFSELVKPLYNIIATAPGKYITWTTDNSQQLQNIISMLNSAENLEERNPEVRLIMKVNTSPSAGYIRFYNEFAKRPIMYLNYVYTKAEVKFTNTEKLLTTIHKGLIKALDLGMGQEILVYSPIVSMTKIQKTPLPERKALPIRWITWMSYLEDPRIQFHYDKTLPELQQVPTVTDDIIAKIKHPSEFSMVFYTDGSAIKHPNVNKSHNAGMGIAQVQFKPEFTVINTWSIPLGDHTAQLAEVAAVEFACKKALKIDGPVLIVTDSFYVAESVNKELPYWQSNGFFNNKKKPLKHVSKWKSIADCIQLKPDIIIIHEKGHQPTASTFHTEGNNLADKLATQGSYVVNAGKRTADGSEFEKRTADGSEFESPKKKAKVE

SEQ ID NO: 595 - protein, 2176 aa, synthetic construct
MPAAKRVKLDGGDKKYSIGLDIGTNSVGWAVITDEYKVPSKKFKVLGNTDRHSIKKNLIGALLFDSGETAEATRLKRTARRRYTRRKNRICYLQEIFSNEMAKVDDSFFHRLEESFLVEEDKKHERHPIFGNIVDEVAYHEKYPTIYHLRKKLVDSTDKADLRLIYLALAHMIKFRGHFLIEGDLNPDNSDVDKLFIQLVQTYNQLFEENPINASGVDAKAILSARLSKSRRLENLIAQLPGEKKNGLFGNLIALSLGLTPNFKSNFDLAEDAKLQLSKDTYDDDLDNLLAQIGDQYADLFLAAKNLSDAILLSDILRVNTEITKAPLSASMIKRYDEHHQDLTLLKALVRQQLPEKYKEIFFDQSKNGYAGYIDGGASQEEFYKFIKPILEKMDGTEELLVKLNREDLLRKQRTFDNGSIPHQIHLGELHAILRRQEDFYPFLKDNREKIEKILTFRIPYYVGPLARGNSRFAWMTRKSEETITPWNFEEVVDKGASAQSFIERMTNFDKNLPNEKVLPKHSLLYEYFTVYNELTKVKYVTEGMRKPAFLSGEQKKAIVDLLFKTNRKVTVKQLKEDYFKKIECFDSVEISGVEDRFNASLGTYHDLLKIIKDKDFLDNEENEDILEDIVLTLTLFEDREMIEERLKTYAHLFDDKVMKQLKRRRYTGWGRLSRKLINGIRDKQSGKTILDFLKSDGFANRNFMQLIHDDSLTFKEDIQKAQVSGQGDSLHEHIANLAGSPAIKKGILQTVKVVDELVKVMGRHKPENIVIEMARENQTTQKGQKNSRERMKRIEEGIKELGSQILKEHPVENTQLQNEKLYLYYLQNGRDMYVDQELDINRLSDYDVDHIVPQSFLKDDSIDNKVLTRSDKARGKSDNVPSEEVVKKMKNYWRQLLNAKLITQRKFDNLTKAERGGLSELDKAGFIKRQLVETRQITKHVAQILDSRMNTKYDENDKLIREVKVITLKSKLVSDFRKDFQFYKVREINNYHHAHDAYLNAVVGTALIKKYPKLESEFVYGDYKVYDVRKMIAKSEQEIGKATAKYFFYSNIMNFFKTEITLANGEIRKRPLIETNGETGEIVWDKGRDFATVRKVLSMPQVNIVKKTEVQTGGFSKESILPKRNSDKLIARKKDWDPKKYGGFDSPTVAYSVLVVAKVEKGKSKKLKSVKELLGITIMERSSFEKNPIDFLEAKGYKEVKKDLIIKLPKYSLFELENGRKRMLASAGELQKGNELALPSKYVNFLYLASHYEKLKGSPEDNEQKQLFVEQHKHYLDEIIEQISEFSKRVILADANLDKVLSAYNKHRDKPIREQAENIIHLFTLTNLGAPAAFKYFDTTIDRKRYTSTKEVLDATLIHQSITGLYETRIDLSQLGGDGGGGSEAAAKPAPGGMDPLQLLQPLEAEIKGTKLKAHWNSGATITCVPQAFLEEEVPIKNIWIKTIHGEKEQPVYYLTFKIQGRKVEAEVISSPYDYILVSPSDIPWLMKKPLQLTTLVPLQEYEERLLKQTMLTGSYKEKLQSLFLKYDALWQHWENQVGHRRIKPHHIATGTVNPRPQKQYPINPKAKASIQTVINDLLKQGVLIQQNSIMNTPVYPVPKPDGKWRMVLDYREVNKTIPLIAAQNQHSAGILSSIFRGKYKTTLDLSNGFWAHSITPESYWLTAFTWLGQQYCWTRLPQGFLNSPALFNADVVDLLKEVPNVQVYVDDIYISHDDPREHLEQLEKVFSLLLNAGYVVSLKKSEIAQHEVEFLGFNITKEGRGLTETFKQKLLNITPPRDLKQLQSILGLLNFARNFIPNFSELVKPLYNIIATAPGKYITWTTDNSQQLQNIISMLNSAENLEERNPEVRLIMKVNTSPSAGYIRFYNEFAKRPIMYLNYVYTKAEVKFTNTEKLLTTIHKGLIKALDLGMGQEILVYSPIVSMTKIQKTPLPERKALPIRWITWMSYLEDPRIQFHYDKTLPELQQVPTVTDDIIAKIKHPSEFSMVFYTDGSAIKHPNVNKSHNAGMGIAQVQFKPEFTVINTWSIPLGDHTAQLAEVAAVEFACKKALKIDGPVLIVTDSFYVAESVNKELPYWQSNGFFNNKKKPLKHVSKWKSIADCIQLKPDIIIIHEKGHQPTASTFHTEGNNLADKLATQGSYVVNAGKRTADGSEFEKRTADGSEFESPKKKAKVE

SEQ ID NO: 596 - protein, 2180 aa, synthetic construct
MPAAKRVKLDGGDKKYSIGLDIGTNSVGWAVITDEYKVPSKKFKVLGNTDRHSIKKNLIGALLFDSGETAEATRLKRTARRRYTRRKNRICYLQEIFSNEMAKVDDSFFHRLEESFLVEEDKKHERHPIFGNIVDEVAYHEKYPTIYHLRKKLVDSTDKADLRLIYLALAHMIKFRGHFLIEGDLNPDNSDVDKLFIQLVQTYNQLFEENPINASGVDAKAILSARLSKSRRLENLIAQLPGEKKNGLFGNLIALSLGLTPNFKSNFDLAEDAKLQLSKDTYDDDLDNLLAQIGDQYADLFLAAKNLSDAILLSDILRVNTEITKAPLSASMIKRYDEHHQDLTLLKALVRQQLPEKYKEIFFDQSKNGYAGYIDGGASQEEFYKFIKPILEKMDGTEELLVKLNREDLLRKQRTFDNGSIPHQIHLGELHAILRRQEDFYPFLKDNREKIEKILTFRIPYYVGPLARGNSRFAWMTRKSEETITPWNFEEVVDKGASAQSFIERMTNFDKNLPNEKVLPKHSLLYEYFTVYNELTKVKYVTEGMRKPAFLSGEQKKAIVDLLFKTNRKVTVKQLKEDYFKKIECFDSVEISGVEDRFNASLGTYHDLLKIIKDKDFLDNEENEDILEDIVLTLTLFEDREMIEERLKTYAHLFDDKVMKQLKRRRYTGWGRLSRKLINGIRDKQSGKTILDFLKSDGFANRNFMQLIHDDSLTFKEDIQKAQVSGQGDSLHEHIANLAGSPAIKKGILQTVKVVDELVKVMGRHKPENIVIEMARENQTTQKGQKNSRERMKRIEEGIKELGSQILKEHPVENTQLQNEKLYLYYLQNGRDMYVDQELDINRLSDYDVDHIVPQSFLKDDSIDNKVLTRSDKARGKSDNVPSEEVVKKMKNYWRQLLNAKLITQRKFDNLTKAERGGLSELDKAGFIKRQLVETRQITKHVAQILDSRMNTKYDENDKLIREVKVITLKSKLVSDFRKDFQFYKVREINNYHHAHDAYLNAVVGTALIKKYPKLESEFVYGDYKVYDVRKMIAKSEQEIGKATAKYFFYSNIMNFFKTEITLANGEIRKRPLIETNGETGEIVWDKGRDFATVRKVLSMPQVNIVKKTEVQTGGFSKESILPKRNSDKLIARKKDWDPKKYGGFDSPTVAYSVLVVAKVEKGKSKKLKSVKELLGITIMERSSFEKNPIDFLEAKGYKEVKKDLIIKLPKYSLFELENGRKRMLASAGELQKGNELALPSKYVNFLYLASHYEKLKGSPEDNEQKQLFVEQHKHYLDEIIEQISEFSKRVILADANLDKVLSAYNKHRDKPIREQAENIIHLFTLTNLGAPAAFKYFDTTIDRKRYTSTKEVLDATLIHQSITGLYETRIDLSQLGGDGGEAAAKGGGGSEAAAKGGMDPLQLLQPLEAEIKGTKLKAHWNSGATITCVPQAFLEEEVPIKNIWIKTIHGEKEQPVYYLTFKIQGRKVEAEVISSPYDYILVSPSDIPWLMKKPLQLTTLVPLQEYEERLLKQTMLTGSYKEKLQSLFLKYDALWQHWENQVGHRRIKPHHIATGTVNPRPQKQYPINPKAKASIQTVINDLLKQGVLIQQNSIMNTPVYPVPKPDGKWRMVLDYREVNKTIPLIAAQNQHSAGILSSIFRGKYKTTLDLSNGFWAHSITPESYWLTAFTWLGQQYCWTRLPQGFLNSPALFNADVVDLLKEVPNVQVYVDDIYISHDDPREHLEQLEKVFSLLLNAGYVVSLKKSEIAQHEVEFLGFNITKEGRGLTETFKQKLLNITPPRDLKQLQSILGLLNFARNFIPNFSELVKPLYNIIATAPGKYITWTTDNSQQLQNIISMLNSAENLEERNPEVRLIMKVNTSPSAGYIRFYNEFAKRPIMYLNYVYTKAEVKFTNTEKLLTTIHKGLIKALDLGMGQEILVYSPIVSMTKIQKTPLPERKALPIRWITWMSYLEDPRIQFHYDKTLPELQQVPTVTDDIIAKIKHPSEFSMVFYTDGSAIKHPNVNKSHNAGMGIAQVQFKPEFTVINTWSIPLGDHTAQLAEVAAVEFACKKALKIDGPVLIVTDSFYVAESVNKELPYWQSNGFFNNKKKPLKHVSKWKSIADCIQLKPDIIIIHEKGHQPTASTFHTEGNNLADKLATQGSYVVNAGKRTADGSEFEKRTADGSEFESPKKKAKVE

SEQ ID NO: 597 - protein, 2175 aa, synthetic construct
MPAAKRVKLDGGDKKYSIGLDIGTNSVGWAVITDEYKVPSKKFKVLGNTDRHSIKKNLIGALLFDSGETAEATRLKRTARRRYTRRKNRICYLQEIFSNEMAKVDDSFFHRLEESFLVEEDKKHERHPIFGNIVDEVAYHEKYPTIYHLRKKLVDSTDKADLRLIYLALAHMIKFRGHFLIEGDLNPDNSDVDKLFIQLVQTYNQLFEENPINASGVDAKAILSARLSKSRRLENLIAQLPGEKKNGLFGNLIALSLGLTPNFKSNFDLAEDAKLQLSKDTYDDDLDNLLAQIGDQYADLFLAAKNLSDAILLSDILRVNTEITKAPLSASMIKRYDEHHQDLTLLKALVRQQLPEKYKEIFFDQSKNGYAGYIDGGASQEEFYKFIKPILEKMDGTEELLVKLNREDLLRKQRTFDNGSIPHQIHLGELHAILRRQEDFYPFLKDNREKIEKILTFRIPYYVGPLARGNSRFAWMTRKSEETITPWNFEEVVDKGASAQSFIERMTNFDKNLPNEKVLPKHSLLYEYFTVYNELTKVKYVTEGMRKPAFLSGEQKKAIVDLLFKTNRKVTVKQLKEDYFKKIECFDSVEISGVEDRFNASLGTYHDLLKIIKDKDFLDNEENEDILEDIVLTLTLFEDREMIEERLKTYAHLFDDKVMKQLKRRRYTGWGRLSRKLINGIRDKQSGKTILDFLKSDGFANRNFMQLIHDDSLTFKEDIQKAQVSGQGDSLHEHIANLAGSPAIKKGILQTVKVVDELVKVMGRHKPENIVIEMARENQTTQKGQKNSRERMKRIEEGIKELGSQILKEHPVENTQLQNEKLYLYYLQNGRDMYVDQELDINRLSDYDVDHIVPQSFLKDDSIDNKVLTRSDKARGKSDNVPSEEVVKKMKNYWRQLLNAKLITQRKFDNLTKAERGGLSELDKAGFIKRQLVETRQITKHVAQILDSRMNTKYDENDKLIREVKVITLKSKLVSDFRKDFQFYKVREINNYHHAHDAYLNAVVGTALIKKYPKLESEFVYGDYKVYDVRKMIAKSEQEIGKATAKYFFYSNIMNFFKTEITLANGEIRKRPLIETNGETGEIVWDKGRDFATVRKVLSMPQVNIVKKTEVQTGGFSKESILPKRNSDKLIARKKDWDPKKYGGFDSPTVAYSVLVVAKVEKGKSKKLKSVKELLGITIMERSSFEKNPIDFLEAKGYKEVKKDLIIKLPKYSLFELENGRKRMLASAGELQKGNELALPSKYVNFLYLASHYEKLKGSPEDNEQKQLFVEQHKHYLDEIIEQISEFSKRVILADANLDKVLSAYNKHRDKPIREQAENIIHLFTLTNLGAPAAFKYFDTTIDRKRYTSTKEVLDATLIHQSITGLYETRIDLSQLGGDGGGGGGSGGGGSGGMDPLQLLQPLEAEIKGTKLKAHWNSGATITCVPQAFLEEEVPIKNIWIKTIHGEKEQPVYYLTFKIQGRKVEAEVISSPYDYILVSPSDIPWLMKKPLQLTTLVPLQEYEERLLKQTMLTGSYKEKLQSLFLKYDALWQHWENQVGHRRIKPHHIATGTVNPRPQKQYPINPKAKASIQTVINDLLKQGVLIQQNSIMNTPVYPVPKPDGKWRMVLDYREVNKTIPLIAAQNQHSAGILSSIFRGKYKTTLDLSNGFWAHSITPESYWLTAFTWLGQQYCWTRLPQGFLNSPALFNADVVDLLKEVPNVQVYVDDIYISHDDPREHLEQLEKVFSLLLNAGYVVSLKKSEIAQHEVEFLGFNITKEGRGLTETFKQKLLNITPPRDLKQLQSILGLLNFARNFIPNFSELVKPLYNIIATAPGKYITWTTDNSQQLQNIISMLNSAENLEERNPEVRLIMKVNTSPSAGYIRFYNEFAKRPIMYLNYVYTKAEVKFTNTEKLLTTIHKGLIKALDLGMGQEILVYSPIVSMTKIQKTPLPERKALPIRWITWMSYLEDPRIQFHYDKTLPELQQVPTVTDDIIAKIKHPSEFSMVFYTDGSAIKHPNVNKSHNAGMGIAQVQFKPEFTVINTWSIPLGDHTAQLAEVAAVEFACKKALKIDGPVLIVTDSFYVAESVNKELPYWQSNGFFNNKKKPLKHVSKWKSIADCIQLKPDIIIIHEKGHQPTASTFHTEGNNLADKLATQGSYVVNAGKRTADGSEFEKRTADGSEFESPKKKAKVE

SEQ ID NO: 598 - protein, 2175 aa, synthetic construct
MPAAKRVKLDGGDKKYSIGLDIGTNSVGWAVITDEYKVPSKKFKVLGNTDRHSIKKNLIGALLFDSGETAEATRLKRTARRRYTRRKNRICYLQEIFSNEMAKVDDSFFHRLEESFLVEEDKKHERHPIFGNIVDEVAYHEKYPTIYHLRKKLVDSTDKADLRLIYLALAHMIKFRGHFLIEGDLNPDNSDVDKLFIQLVQTYNQLFEENPINASGVDAKAILSARLSKSRRLENLIAQLPGEKKNGLFGNLIALSLGLTPNFKSNFDLAEDAKLQLSKDTYDDDLDNLLAQIGDQYADLFLAAKNLSDAILLSDILRVNTEITKAPLSASMIKRYDEHHQDLTLLKALVRQQLPEKYKEIFFDQSKNGYAGYIDGGASQEEFYKFIKPILEKMDGTEELLVKLNREDLLRKQRTFDNGSIPHQIHLGELHAILRRQEDFYPFLKDNREKIEKILTFRIPYYVGPLARGNSRFAWMTRKSEETITPWNFEEVVDKGASAQSFIERMTNFDKNLPNEKVLPKHSLLYEYFTVYNELTKVKYVTEGMRKPAFLSGEQKKAIVDLLFKTNRKVTVKQLKEDYFKKIECFDSVEISGVEDRFNASLGTYHDLLKIIKDKDFLDNEENEDILEDIVLTLTLFEDREMIEERLKTYAHLFDDKVMKQLKRRRYTGWGRLSRKLINGIRDKQSGKTILDFLKSDGFANRNFMQLIHDDSLTFKEDIQKAQVSGQGDSLHEHIANLAGSPAIKKGILQTVKVVDELVKVMGRHKPENIVIEMARENQTTQKGQKNSRERMKRIEEGIKELGSQILKEHPVENTQLQNEKLYLYYLQNGRDMYVDQELDINRLSDYDVDHIVPQSFLKDDSIDNKVLTRSDKARGKSDNVPSEEVVKKMKNYWRQLLNAKLITQRKFDNLTKAERGGLSELDKAGFIKRQLVETRQITKHVAQILDSRMNTKYDENDKLIREVKVITLKSKLVSDFRKDFQFYKVREINNYHHAHDAYLNAVVGTALIKKYPKLESEFVYGDYKVYDVRKMIAKSEQEIGKATAKYFFYSNIMNFFKTEITLANGEIRKRPLIETNGETGEIVWDKGRDFATVRKVLSMPQVNIVKKTEVQTGGFSKESILPKRNSDKLIARKKDWDPKKYGGFDSPTVAYSVLVVAKVEKGKSKKLKSVKELLGITIMERSSFEKNPIDFLEAKGYKEVKKDLIIKLPKYSLFELENGRKRMLASAGELQKGNELALPSKYVNFLYLASHYEKLKGSPEDNEQKQLFVEQHKHYLDEIIEQISEFSKRVILADANLDKVLSAYNKHRDKPIREQAENIIHLFTLTNLGAPAAFKYFDTTIDRKRYTSTKEVLDATLIHQSITGLYETRIDLSQLGGDGGEAAAKEAAAKGGMDPLQLLQPLEAEIKGTKLKAHWNSGATITCVPQAFLEEEVPIKNIWIKTIHGEKEQPVYYLTFKIQGRKVEAEVISSPYDYILVSPSDIPWLMKKPLQLTTLVPLQEYEERLLKQTMLTGSYKEKLQSLFLKYDALWQHWENQVGHRRIKPHHIATGTVNPRPQKQYPINPKAKASIQTVINDLLKQGVLIQQNSIMNTPVYPVPKPDGKWRMVLDYREVNKTIPLIAAQNQHSAGILSSIFRGKYKTTLDLSNGFWAHSITPESYWLTAFTWLGQQYCWTRLPQGFLNSPALFNADVVDLLKEVPNVQVYVDDIYISHDDPREHLEQLEKVFSLLLNAGYVVSLKKSEIAQHEVEFLGFNITKEGRGLTETFKQKLLNITPPRDLKQLQSILGLLNFARNFIPNFSELVKPLYNIIATAPGKYITWTTDNSQQLQNIISMLNSAENLEERNPEVRLIMKVNTSPSAGYIRFYNEFAKRPIMYLNYVYTKAEVKFTNTEKLLTTIHKGLIKALDLGMGQEILVYSPIVSMTKIQKTPLPERKALPIRWITWMSYLEDPRIQFHYDKTLPELQQVPTVTDDIIAKIKHPSEFSMVFYTDGSAIKHPNVNKSHNAGMGIAQVQFKPEFTVINTWSIPLGDHTAQLAEVAAVEFACKKALKIDGPVLIVTDSFYVAESVNKELPYWQSNGFFNNKKKPLKHVSKWKSIADCIQLKPDIIIIHEKGHQPTASTFHTEGNNLADKLATQGSYVVNAGKRTADGSEFEKRTADGSEFESPKKKAKVE

SEQ ID NO: 599 - protein, 2176 aa, synthetic construct
MPAAKRVKLDGGDKKYSIGLDIGTNSVGWAVITDEYKVPSKKFKVLGNTDRHSIKKNLIGALLFDSGETAEATRLKRTARRRYTRRKNRICYLQEIFSNEMAKVDDSFFHRLEESFLVEEDKKHERHPIFGNIVDEVAYHEKYPTIYHLRKKLVDSTDKADLRLIYLALAHMIKFRGHFLIEGDLNPDNSDVDKLFIQLVQTYNQLFEENPINASGVDAKAILSARLSKSRRLENLIAQLPGEKKNGLFGNLIALSLGLTPNFKSNFDLAEDAKLQLSKDTYDDDLDNLLAQIGDQYADLFLAAKNLSDAILLSDILRVNTEITKAPLSASMIKRYDEHHQDLTLLKALVRQQLPEKYKEIFFDQSKNGYAGYIDGGASQEEFYKFIKPILEKMDGTEELLVKLNREDLLRKQRTFDNGSIPHQIHLGELHAILRRQEDFYPFLKDNREKIEKILTFRIPYYVGPLARGNSRFAWMTRKSEETITPWNFEEVVDKGASAQSFIERMTNFDKNLPNEKVLPKHSLLYEYFTVYNELTKVKYVTEGMRKPAFLSGEQKKAIVDLLFKTNRKVTVKQLKEDYFKKIECFDSVEISGVEDRFNASLGTYHDLLKIIKDKDFLDNEENEDILEDIVLTLTLFEDREMIEERLKTYAHLFDDKVMKQLKRRRYTGWGRLSRKLINGIRDKQSGKTILDFLKSDGFANRNFMQLIHDDSLTFKEDIQKAQVSGQGDSLHEHIANLAGSPAIKKGILQTVKVVDELVKVMGRHKPENIVIEMARENQTTQKGQKNSRERMKRIEEGIKELGSQILKEHPVENTQLQNEKLYLYYLQNGRDMYVDQELDINRLSDYDVDHIVPQSFLKDDSIDNKVLTRSDKARGKSDNVPSEEVVKKMKNYWRQLLNAKLITQRKFDNLTKAERGGLSELDKAGFIKRQLVETRQITKHVAQILDSRMNTKYDENDKLIREVKVITLKSKLVSDFRKDFQFYKVREINNYHHAHDAYLNAVVGTALIKKYPKLESEFVYGDYKVYDVRKMIAKSEQEIGKATAKYFFYSNIMNFFKTEITLANGEIRKRPLIETNGETGEIVWDKGRDFATVRKVLSMPQVNIVKKTEVQTGGFSKESILPKRNSDKLIARKKDWDPKKYGGFDSPTVAYSVLVVAKVEKGKSKKLKSVKELLGITIMERSSFEKNPIDFLEAKGYKEVKKDLIIKLPKYSLFELENGRKRMLASAGELQKGNELALPSKYVNFLYLASHYEKLKGSPEDNEQKQLFVEQHKHYLDEIIEQISEFSKRVILADANLDKVLSAYNKHRDKPIREQAENIIHLFTLTNLGAPAAFKYFDTTIDRKRYTSTKEVLDATLIHQSITGLYETRIDLSQLGGDGGGSSEAAAKGGGGGMDPLQLLQPLEAEIKGTKLKAHWNSGATITCVPQAFLEEEVPIKNIWIKTIHGEKEQPVYYLTFKIQGRKVEAEVISSPYDYILVSPSDIPWLMKKPLQLTTLVPLQEYEERLLKQTMLTGSYKEKLQSLFLKYDALWQHWENQVGHRRIKPHHIATGTVNPRPQKQYPINPKAKASIQTVINDLLKQGVLIQQNSIMNTPVYPVPKPDGKWRMVLDYREVNKTIPLIAAQNQHSAGILSSIFRGKYKTTLDLSNGFWAHSITPESYWLTAFTWLGQQYCWTRLPQGFLNSPALFNADVVDLLKEVPNVQVYVDDIYISHDDPREHLEQLEKVFSLLLNAGYVVSLKKSEIAQHEVEFLGFNITKEGRGLTETFKQKLLNITPPRDLKQLQSILGLLNFARNFIPNFSELVKPLYNIIATAPGKYITWTTDNSQQLQNIISMLNSAENLEERNPEVRLIMKVNTSPSAGYIRFYNEFAKRPIMYLNYVYTKAEVKFTNTEKLLTTIHKGLIKALDLGMGQEILVYSPIVSMTKIQKTPLPERKALPIRWITWMSYLEDPRIQFHYDKTLPELQQVPTVTDDIIAKIKHPSEFSMVFYTDGSAIKHPNVNKSHNAGMGIAQVQFKPEFTVINTWSIPLGDHTAQLAEVAAVEFACKKALKIDGPVLIVTDSFYVAESVNKELPYWQSNGFFNNKKKPLKHVSKWKSIADCIQLKPDIIIIHEKGHQPTASTFHTEGNNLADKLATQGSYVVNAGKRTADGSEFEKRTADGSEFESPKKKAKVE

SEQ ID NO: 600 - protein, 2174 aa, synthetic construct
MPAAKRVKLDGGDKKYSIGLDIGTNSVGWAVITDEYKVPSKKFKVLGNTDRHSIKKNLIGALLFDSGETAEATRLKRTARRRYTRRKNRICYLQEIFSNEMAKVDDSFFHRLEESFLVEEDKKHERHPIFGNIVDEVAYHEKYPTIYHLRKKLVDSTDKADLRLIYLALAHMIKFRGHFLIEGDLNPDNSDVDKLFIQLVQTYNQLFEENPINASGVDAKAILSARLSKSRRLENLIAQLPGEKKNGLFGNLIALSLGLTPNFKSNFDLAEDAKLQLSKDTYDDDLDNLLAQIGDQYADLFLAAKNLSDAILLSDILRVNTEITKAPLSASMIKRYDEHHQDLTLLKALVRQQLPEKYKEIFFDQSKNGYAGYIDGGASQEEFYKFIKPILEKMDGTEELLVKLNREDLLRKQRTFDNGSIPHQIHLGELHAILRRQEDFYPFLKDNREKIEKILTFRIPYYVGPLARGNSRFAWMTRKSEETITPWNFEEVVDKGASAQSFIERMTNFDKNLPNEKVLPKHSLLYEYFTVYNELTKVKYVTEGMRKPAFLSGEQKKAIVDLLFKTNRKVTVKQLKEDYFKKIECFDSVEISGVEDRFNASLGTYHDLLKIIKDKDFLDNEENEDILEDIVLTLTLFEDREMIEERLKTYAHLFDDKVMKQLKRRRYTGWGRLSRKLINGIRDKQSGKTILDFLKSDGFANRNFMQLIHDDSLTFKEDIQKAQVSGQGDSLHEHIANLAGSPAIKKGILQTVKVVDELVKVMGRHKPENIVIEMARENQTTQKGQKNSRERMKRIEEGIKELGSQILKEHPVENTQLQNEKLYLYYLQNGRDMYVDQELDINRLSDYDVDHIVPQSFLKDDSIDNKVLTRSDKARGKSDNVPSEEVVKKMKNYWRQLLNAKLITQRKFDNLTKAERGGLSELDKAGFIKRQLVETRQITKHVAQILDSRMNTKYDENDKLIREVKVITLKSKLVSDFRKDFQFYKVREINNYHHAHDAYLNAVVGTALIKKYPKLESEFVYGDYKVYDVRKMIAKSEQEIGKATAKYFFYSNIMNFFKTEITLANGEIRKRPLIETNGETGEIVWDKGRDFATVRKVLSMPQVNIVKKTEVQTGGFSKESILPKRNSDKLIARKKDWDPKKYGGFDSPTVAYSVLVVAKVEKGKSKKLKSVKELLGITIMERSSFEKNPIDFLEAKGYKEVKKDLIIKLPKYSLFELENGRKRMLASAGELQKGNELALPSKYVNFLYLASHYEKLKGSPEDNEQKQLFVEQHKHYLDEIIEQISEFSKRVILADANLDKVLSAYNKHRDKPIREQAENIIHLFTLTNLGAPAAFKYFDTTIDRKRYTSTKEVLDATLIHQSITGLYETRIDLSQLGGDGGPAPAPAPAPGGMDPLQLLQPLEAEIKGTKLKAHWNSGATITCVPQAFLEEEVPIKNIWIKTIHGEKEQPVYYLTFKIQGRKVEAEVISSPYDYILVSPSDIPWLMKKPLQLTTLVPLQEYEERLLKQTMLTGSYKEKLQSLFLKYDALWQHWENQVGHRRIKPHHIATGTVNPRPQKQYPINPKAKASIQTVINDLLKQGVLIQQNSIMNTPVYPVPKPDGKWRMVLDYREVNKTIPLIAAQNQHSAGILSSIFRGKYKTTLDLSNGFWAHSITPESYWLTAFTWLGQQYCWTRLPQGFLNSPALFNADVVDLLKEVPNVQVYVDDIYISHDDPREHLEQLEKVFSLLLNAGYVVSLKKSEIAQHEVEFLGFNITKEGRGLTETFKQKLLNITPPRDLKQLQSILGLLNFARNFIPNFSELVKPLYNIIATAPGKYITWTTDNSQQLQNIISMLNSAENLEERNPEVRLIMKVNTSPSAGYIRFYNEFAKRPIMYLNYVYTKAEVKFTNTEKLLTTIHKGLIKALDLGMGQEILVYSPIVSMTKIQKTPLPERKALPIRWITWMSYLEDPRIQFHYDKTLPELQQVPTVTDDIIAKIKHPSEFSMVFYTDGSAIKHPNVNKSHNAGMGIAQVQFKPEFTVINTWSIPLGDHTAQLAEVAAVEFACKKALKIDGPVLIVTDSFYVAESVNKELPYWQSNGFFNNKKKPLKHVSKWKSIADCIQLKPDIIIIHEKGHQPTASTFHTEGNNLADKLATQGSYVVNAGKRTADGSEFEKRTADGSEFESPKKKAKVE

SEQ ID NO: 601 - protein, 2180 aa, synthetic construct
MPAAKRVKLDGGDKKYSIGLDIGTNSVGWAVITDEYKVPSKKFKVLGNTDRHSIKKNLIGALLFDSGETAEATRLKRTARRRYTRRKNRICYLQEIFSNEMAKVDDSFFHRLEESFLVEEDKKHERHPIFGNIVDEVAYHEKYPTIYHLRKKLVDSTDKADLRLIYLALAHMIKFRGHFLIEGDLNPDNSDVDKLFIQLVQTYNQLFEENPINASGVDAKAILSARLSKSRRLENLIAQLPGEKKNGLFGNLIALSLGLTPNFKSNFDLAEDAKLQLSKDTYDDDLDNLLAQIGDQYADLFLAAKNLSDAILLSDILRVNTEITKAPLSASMIKRYDEHHQDLTLLKALVRQQLPEKYKEIFFDQSKNGYAGYIDGGASQEEFYKFIKPILEKMDGTEELLVKLNREDLLRKQRTFDNGSIPHQIHLGELHAILRRQEDFYPFLKDNREKIEKILTFRIPYYVGPLARGNSRFAWMTRKSEETITPWNFEEVVDKGASAQSFIERMTNFDKNLPNEKVLPKHSLLYEYFTVYNELTKVKYVTEGMRKPAFLSGEQKKAIVDLLFKTNRKVTVKQLKEDYFKKIECFDSVEISGVEDRFNASLGTYHDLLKIIKDKDFLDNEENEDILEDIVLTLTLFEDREMIEERLKTYAHLFDDKVMKQLKRRRYTGWGRLSRKLINGIRDKQSGKTILDFLKSDGFANRNFMQLIHDDSLTFKEDIQKAQVSGQGDSLHEHIANLAGSPAIKKGILQTVKVVDELVKVMGRHKPENIVIEMARENQTTQKGQKNSRERMKRIEEGIKELGSQILKEHPVENTQLQNEKLYLYYLQNGRDMYVDQELDINRLSDYDVDHIVPQSFLKDDSIDNKVLTRSDKARGKSDNVPSEEVVKKMKNYWRQLLNAKLITQRKFDNLTKAERGGLSELDKAGFIKRQLVETRQITKHVAQILDSRMNTKYDENDKLIREVKVITLKSKLVSDFRKDFQFYKVREINNYHHAHDAYLNAVVGTALIKKYPKLESEFVYGDYKVYDVRKMIAKSEQEIGKATAKYFFYSNIMNFFKTEITLANGEIRKRPLIETNGETGEIVWDKGRDFATVRKVLSMPQVNIVKKTEVQTGGFSKESILPKRNSDKLIARKKDWDPKKYGGFDSPTVAYSVLVVAKVEKGKSKKLKSVKELLGITIMERSSFEKNPIDFLEAKGYKEVKKDLIIKLPKYSLFELENGRKRMLASAGELQKGNELALPSKYVNFLYLASHYEKLKGSPEDNEQKQLFVEQHKHYLDEIIEQISEFSKRVILADANLDKVLSAYNKHRDKPIREQAENIIHLFTLTNLGAPAAFKYFDTTIDRKRYTSTKEVLDATLIHQSITGLYETRIDLSQLGGDGGGGGGSGGGGSGGGGSGGMDPLQLLQPLEAEIKGTKLKAHWNSGATITCVPQAFLEEEVPIKNIWIKTIHGEKEQPVYYLTFKIQGRKVEAEVISSPYDYILVSPSDIPWLMKKPLQLTTLVPLQEYEERLLKQTMLTGSYKEKLQSLFLKYDALWQHWENQVGHRRIKPHHIATGTVNPRPQKQYPINPKAKASIQTVINDLLKQGVLIQQNSIMNTPVYPVPKPDGKWRMVLDYREVNKTIPLIAAQNQHSAGILSSIFRGKYKTTLDLSNGFWAHSITPESYWLTAFTWLGQQYCWTRLPQGFLNSPALFNADVVDLLKEVPNVQVYVDDIYISHDDPREHLEQLEKVFSLLLNAGYVVSLKKSEIAQHEVEFLGFNITKEGRGLTETFKQKLLNITPPRDLKQLQSILGLLNFARNFIPNFSELVKPLYNIIATAPGKYITWTTDNSQQLQNIISMLNSAENLEERNPEVRLIMKVNTSPSAGYIRFYNEFAKRPIMYLNYVYTKAEVKFTNTEKLLTTIHKGLIKALDLGMGQEILVYSPIVSMTKIQKTPLPERKALPIRWITWMSYLEDPRIQFHYDKTLPELQQVPTVTDDIIAKIKHPSEFSMVFYTDGSAIKHPNVNKSHNAGMGIAQVQFKPEFTVINTWSIPLGDHTAQLAEVAAVEFACKKALKIDGPVLIVTDSFYVAESVNKELPYWQSNGFFNNKKKPLKHVSKWKSIADCIQLKPDIIIIHEKGHQPTASTFHTEGNNLADKLATQGSYVVNAGKRTADGSEFEKRTADGSEFESPKKKAKVE

SEQ ID NO: 602 - protein, 2176 aa, synthetic construct
MPAAKRVKLDGGDKKYSIGLDIGTNSVGWAVITDEYKVPSKKFKVLGNTDRHSIKKNLIGALLFDSGETAEATRLKRTARRRYTRRKNRICYLQEIFSNEMAKVDDSFFHRLEESFLVEEDKKHERHPIFGNIVDEVAYHEKYPTIYHLRKKLVDSTDKADLRLIYLALAHMIKFRGHFLIEGDLNPDNSDVDKLFIQLVQTYNQLFEENPINASGVDAKAILSARLSKSRRLENLIAQLPGEKKNGLFGNLIALSLGLTPNFKSNFDLAEDAKLQLSKDTYDDDLDNLLAQIGDQYADLFLAAKNLSDAILLSDILRVNTEITKAPLSASMIKRYDEHHQDLTLLKALVRQQLPEKYKEIFFDQSKNGYAGYIDGGASQEEFYKFIKPILEKMDGTEELLVKLNREDLLRKQRTFDNGSIPHQIHLGELHAILRRQEDFYPFLKDNREKIEKILTFRIPYYVGPLARGNSRFAWMTRKSEETITPWNFEEVVDKGASAQSFIERMTNFDKNLPNEKVLPKHSLLYEYFTVYNELTKVKYVTEGMRKPAFLSGEQKKAIVDLLFKTNRKVTVKQLKEDYFKKIECFDSVEISGVEDRFNASLGTYHDLLKIIKDKDFLDNEENEDILEDIVLTLTLFEDREMIEERLKTYAHLFDDKVMKQLKRRRYTGWGRLSRKLINGIRDKQSGKTILDFLKSDGFANRNFMQLIHDDSLTFKEDIQKAQVSGQGDSLHEHIANLAGSPAIKKGILQTVKVVDELVKVMGRHKPENIVIEMARENQTTQKGQKNSRERMKRIEEGIKELGSQILKEHPVENTQLQNEKLYLYYLQNGRDMYVDQELDINRLSDYDVDHIVPQSFLKDDSIDNKVLTRSDKARGKSDNVPSEEVVKKMKNYWRQLLNAKLITQRKFDNLTKAERGGLSELDKAGFIKRQLVETRQITKHVAQILDSRMNTKYDENDKLIREVKVITLKSKLVSDFRKDFQFYKVREINNYHHAHDAYLNAVVGTALIKKYPKLESEFVYGDYKVYDVRKMIAKSEQEIGKATAKYFFYSNIMNFFKTEITLANGEIRKRPLIETNGETGEIVWDKGRDFATVRKVLSMPQVNIVKKTEVQTGGFSKESILPKRNSDKLIARKKDWDPKKYGGFDSPTVAYSVLVVAKVEKGKSKKLKSVKELLGITIMERSSFEKNPIDFLEAKGYKEVKKDLIIKLPKYSLFELENGRKRMLASAGELQKGNELALPSKYVNFLYLASHYEKLKGSPEDNEQKQLFVEQHKHYLDEIIEQISEFSKRVILADANLDKVLSAYNKHRDKPIREQAENIIHLFTLTNLGAPAAFKYFDTTIDRKRYTSTKEVLDATLIHQSITGLYETRIDLSQLGGDGGPAPEAAAKGSSGGMDPLQLLQPLEAEIKGTKLKAHWNSGATITCVPQAFLEEEVPIKNIWIKTIHGEKEQPVYYLTFKIQGRKVEAEVISSPYDYILVSPSDIPWLMKKPLQLTTLVPLQEYEERLLKQTMLTGSYKEKLQSLFLKYDALWQHWENQVGHRRIKPHHIATGTVNPRPQKQYPINPKAKASIQTVINDLLKQGVLIQQNSIMNTPVYPVPKPDGKWRMVLDYREVNKTIPLIAAQNQHSAGILSSIFRGKYKTTLDLSNGFWAHSITPESYWLTAFTWLGQQYCWTRLPQGFLNSPALFNADVVDLLKEVPNVQVYVDDIYISHDDPREHLEQLEKVFSLLLNAGYVVSLKKSEIAQHEVEFLGFNITKEGRGLTETFKQKLLNITPPRDLKQLQSILGLLNFARNFIPNFSELVKPLYNIIATAPGKYITWTTDNSQQLQNIISMLNSAENLEERNPEVRLIMKVNTSPSAGYIRFYNEFAKRPIMYLNYVYTKAEVKFTNTEKLLTTIHKGLIKALDLGMGQEILVYSPIVSMTKIQKTPLPERKALPIRWITWMSYLEDPRIQFHYDKTLPELQQVPTVTDDIIAKIKHPSEFSMVFYTDGSAIKHPNVNKSHNAGMGIAQVQFKPEFTVINTWSIPLGDHTAQLAEVAAVEFACKKALKIDGPVLIVTDSFYVAESVNKELPYWQSNGFFNNKKKPLKHVSKWKSIADCIQLKPDIIIIHEKGHQPTASTFHTEGNNLADKLATQGSYVVNAGKRTADGSEFEKRTADGSEFESPKKKAKVE

SEQ ID NO: 603 - protein, 2173 aa, synthetic construct
MPAAKRVKLDGGDKKYSIGLDIGTNSVGWAVITDEYKVPSKKFKVLGNTDRHSIKKNLIGALLFDSGETAEATRLKRTARRRYTRRKNRICYLQEIFSNEMAKVDDSFFHRLEESFLVEEDKKHERHPIFGNIVDEVAYHEKYPTIYHLRKKLVDSTDKADLRLIYLALAHMIKFRGHFLIEGDLNPDNSDVDKLFIQLVQTYNQLFEENPINASGVDAKAILSARLSKSRRLENLIAQLPGEKKNGLFGNLIALSLGLTPNFKSNFDLAEDAKLQLSKDTYDDDLDNLLAQIGDQYADLFLAAKNLSDAILLSDILRVNTEITKAPLSASMIKRYDEHHQDLTLLKALVRQQLPEKYKEIFFDQSKNGYAGYIDGGASQEEFYKFIKPILEKMDGTEELLVKLNREDLLRKQRTFDNGSIPHQIHLGELHAILRRQEDFYPFLKDNREKIEKILTFRIPYYVGPLARGNSRFAWMTRKSEETITPWNFEEVVDKGASAQSFIERMTNFDKNLPNEKVLPKHSLLYEYFTVYNELTKVKYVTEGMRKPAFLSGEQKKAIVDLLFKTNRKVTVKQLKEDYFKKIECFDSVEISGVEDRFNASLGTYHDLLKIIKDKDFLDNEENEDILEDIVLTLTLFEDREMIEERLKTYAHLFDDKVMKQLKRRRYTGWGRLSRKLINGIRDKQSGKTILDFLKSDGFANRNFMQLIHDDSLTFKEDIQKAQVSGQGDSLHEHIANLAGSPAIKKGILQTVKVVDELVKVMGRHKPENIVIEMARENQTTQKGQKNSRERMKRIEEGIKELGSQILKEHPVENTQLQNEKLYLYYLQNGRDMYVDQELDINRLSDYDVDHIVPQSFLKDDSIDNKVLTRSDKARGKSDNVPSEEVVKKMKNYWRQLLNAKLITQRKFDNLTKAERGGLSELDKAGFIKRQLVETRQITKHVAQILDSRMNTKYDENDKLIREVKVITLKSKLVSDFRKDFQFYKVREINNYHHAHDAYLNAVVGTALIKKYPKLESEFVYGDYKVYDVRKMIAKSEQEIGKATAKYFFYSNIMNFFKTEITLANGEIRKRPLIETNGETGEIVWDKGRDFATVRKVLSMPQVNIVKKTEVQTGGFSKESILPKRNSDKLIARKKDWDPKKYGGFDSPTVAYSVLVVAKVEKGKSKKLKSVKELLGITIMERSSFEKNPIDFLEAKGYKEVKKDLIIKLPKYSLFELENGRKRMLASAGELQKGNELALPSKYVNFLYLASHYEKLKGSPEDNEQKQLFVEQHKHYLDEIIEQISEFSKRVILADANLDKVLSAYNKHRDKPIREQAENIIHLFTLTNLGAPAAFKYFDTTIDRKRYTSTKEVLDATLIHQSITGLYETRIDLSQLGGDGGGSSEAAAKGGMDPLQLLQPLEAEIKGTKLKAHWNSGATITCVPQAFLEEEVPIKNIWIKTIHGEKEQPVYYLTFKIQGRKVEAEVISSPYDYILVSPSDIPWLMKKPLQLTTLVPLQEYEERLLKQTMLTGSYKEKLQSLFLKYDALWQHWENQVGHRRIKPHHIATGTVNPRPQKQYPINPKAKASIQTVINDLLKQGVLIQQNSIMNTPVYPVPKPDGKWRMVLDYREVNKTIPLIAAQNQHSAGILSSIFRGKYKTTLDLSNGFWAHSITPESYWLTAFTWLGQQYCWTRLPQGFLNSPALFNADVVDLLKEVPNVQVYVDDIYISHDDPREHLEQLEKVFSLLLNAGYVVSLKKSEIAQHEVEFLGFNITKEGRGLTETFKQKLLNITPPRDLKQLQSILGLLNFARNFIPNFSELVKPLYNIIATAPGKYITWTTDNSQQLQNIISMLNSAENLEERNPEVRLIMKVNTSPSAGYIRFYNEFAKRPIMYLNYVYTKAEVKFTNTEKLLTTIHKGLIKALDLGMGQEILVYSPIVSMTKIQKTPLPERKALPIRWITWMSYLEDPRIQFHYDKTLPELQQVPTVTDDIIAKIKHPSEFSMVFYTDGSAIKHPNVNKSHNAGMGIAQVQFKPEFTVINTWSIPLGDHTAQLAEVAAVEFACKKALKIDGPVLIVTDSFYVAESVNKELPYWQSNGFFNNKKKPLKHVSKWKSIADCIQLKPDIIIIHEKGHQPTASTFHTEGNNLADKLATQGSYVVNAGKRTADGSEFEKRTADGSEFESPKKKAKVE

SEQ ID NO: 604 - protein, 2183 aa, synthetic construct
MPAAKRVKLDGGDKKYSIGLDIGTNSVGWAVITDEYKVPSKKFKVLGNTDRHSIKKNLIGALLFDSGETAEATRLKRTARRRYTRRKNRICYLQEIFSNEMAKVDDSFFHRLEESFLVEEDKKHERHPIFGNIVDEVAYHEKYPTIYHLRKKLVDSTDKADLRLIYLALAHMIKFRGHFLIEGDLNPDNSDVDKLFIQLVQTYNQLFEENPINASGVDAKAILSARLSKSRRLENLIAQLPGEKKNGLFGNLIALSLGLTPNFKSNFDLAEDAKLQLSKDTYDDDLDNLLAQIGDQYADLFLAAKNLSDAILLSDILRVNTEITKAPLSASMIKRYDEHHQDLTLLKALVRQQLPEKYKEIFFDQSKNGYAGYIDGGASQEEFYKFIKPILEKMDGTEELLVKLNREDLLRKQRTFDNGSIPHQIHLGELHAILRRQEDFYPFLKDNREKIEKILTFRIPYYVGPLARGNSRFAWMTRKSEETITPWNFEEVVDKGASAQSFIERMTNFDKNLPNEKVLPKHSLLYEYFTVYNELTKVKYVTEGMRKPAFLSGEQKKAIVDLLFKTNRKVTVKQLKEDYFKKIECFDSVEISGVEDRFNASLGTYHDLLKIIKDKDFLDNEENEDILEDIVLTLTLFEDREMIEERLKTYAHLFDDKVMKQLKRRRYTGWGRLSRKLINGIRDKQSGKTILDFLKSDGFANRNFMQLIHDDSLTFKEDIQKAQVSGQGDSLHEHIANLAGSPAIKKGILQTVKVVDELVKVMGRHKPENIVIEMARENQTTQKGQKNSRERMKRIEEGIKELGSQILKEHPVENTQLQNEKLYLYYLQNGRDMYVDQELDINRLSDYDVDHIVPQSFLKDDSIDNKVLTRSDKARGKSDNVPSEEVVKKMKNYWRQLLNAKLITQRKFDNLTKAERGGLSELDKAGFIKRQLVETRQITKHVAQILDSRMNTKYDENDKLIREVKVITLKSKLVSDFRKDFQFYKVREINNYHHAHDAYLNAVVGTALIKKYPKLESEFVYGDYKVYDVRKMIAKSEQEIGKATAKYFFYSNIMNFFKTEITLANGEIRKRPLIETNGETGEIVWDKGRDFATVRKVLSMPQVNIVKKTEVQTGGFSKESILPKRNSDKLIARKKDWDPKKYGGFDSPTVAYSVLVVAKVEKGKSKKLKSVKELLGITIMERSSFEKNPIDFLEAKGYKEVKKDLIIKLPKYSLFELENGRKRMLASAGELQKGNELALPSKYVNFLYLASHYEKLKGSPEDNEQKQLFVEQHKHYLDEIIEQISEFSKRVILADANLDKVLSAYNKHRDKPIREQAENIIHLFTLTNLGAPAAFKYFDTTIDRKRYTSTKEVLDATLIHQSITGLYETRIDLSQLGGDGGGGSGGSGGSGGSGGSGGSGGMDPLQLLQPLEAEIKGTKLKAHWNSGATITCVPQAFLEEEVPIKNIWIKTIHGEKEQPVYYLTFKIQGRKVEAEVISSPYDYILVSPSDIPWLMKKPLQLTTLVPLQEYEERLLKQTMLTGSYKEKLQSLFLKYDALWQHWENQVGHRRIKPHHIATGTVNPRPQKQYPINPKAKASIQTVINDLLKQGVLIQQNSIMNTPVYPVPKPDGKWRMVLDYREVNKTIPLIAAQNQHSAGILSSIFRGKYKTTLDLSNGFWAHSITPESYWLTAFTWLGQQYCWTRLPQGFLNSPALFNADVVDLLKEVPNVQVYVDDIYISHDDPREHLEQLEKVFSLLLNAGYVVSLKKSEIAQHEVEFLGFNITKEGRGLTETFKQKLLNITPPRDLKQLQSILGLLNFARNFIPNFSELVKPLYNIIATAPGKYITWTTDNSQQLQNIISMLNSAENLEERNPEVRLIMKVNTSPSAGYIRFYNEFAKRPIMYLNYVYTKAEVKFTNTEKLLTTIHKGLIKALDLGMGQEILVYSPIVSMTKIQKTPLPERKALPIRWITWMSYLEDPRIQFHYDKTLPELQQVPTVTDDIIAKIKHPSEFSMVFYTDGSAIKHPNVNKSHNAGMGIAQVQFKPEFTVINTWSIPLGDHTAQLAEVAAVEFACKKALKIDGPVLIVTDSFYVAESVNKELPYWQSNGFFNNKKKPLKHVSKWKSIADCIQLKPDIIIIHEKGHQPTASTFHTEGNNLADKLATQGSYVVNAGKRTADGSEFEKRTADGSEFESPKKKAKVE

SEQ ID NO: 605 - protein, 2171 aa, synthetic construct
MPAAKRVKLDGGDKKYSIGLDIGTNSVGWAVITDEYKVPSKKFKVLGNTDRHSIKKNLIGALLFDSGETAEATRLKRTARRRYTRRKNRICYLQEIFSNEMAKVDDSFFHRLEESFLVEEDKKHERHPIFGNIVDEVAYHEKYPTIYHLRKKLVDSTDKADLRLIYLALAHMIKFRGHFLIEGDLNPDNSDVDKLFIQLVQTYNQLFEENPINASGVDAKAILSARLSKSRRLENLIAQLPGEKKNGLFGNLIALSLGLTPNFKSNFDLAEDAKLQLSKDTYDDDLDNLLAQIGDQYADLFLAAKNLSDAILLSDILRVNTEITKAPLSASMIKRYDEHHQDLTLLKALVRQQLPEKYKEIFFDQSKNGYAGYIDGGASQEEFYKFIKPILEKMDGTEELLVKLNREDLLRKQRTFDNGSIPHQIHLGELHAILRRQEDFYPFLKDNREKIEKILTFRIPYYVGPLARGNSRFAWMTRKSEETITPWNFEEVVDKGASAQSFIERMTNFDKNLPNEKVLPKHSLLYEYFTVYNELTKVKYVTEGMRKPAFLSGEQKKAIVDLLFKTNRKVTVKQLKEDYFKKIECFDSVEISGVEDRFNASLGTYHDLLKIIKDKDFLDNEENEDILEDIVLTLTLFEDREMIEERLKTYAHLFDDKVMKQLKRRRYTGWGRLSRKLINGIRDKQSGKTILDFLKSDGFANRNFMQLIHDDSLTFKEDIQKAQVSGQGDSLHEHIANLAGSPAIKKGILQTVKVVDELVKVMGRHKPENIVIEMARENQTTQKGQKNSRERMKRIEEGIKELGSQILKEHPVENTQLQNEKLYLYYLQNGRDMYVDQELDINRLSDYDVDHIVPQSFLKDDSIDNKVLTRSDKARGKSDNVPSEEVVKKMKNYWRQLLNAKLITQRKFDNLTKAERGGLSELDKAGFIKRQLVETRQITKHVAQILDSRMNTKYDENDKLIREVKVITLKSKLVSDFRKDFQFYKVREINNYHHAHDAYLNAVVGTALIKKYPKLESEFVYGDYKVYDVRKMIAKSEQEIGKATAKYFFYSNIMNFFKTEITLANGEIRKRPLIETNGETGEIVWDKGRDFATVRKVLSMPQVNIVKKTEVQTGGFSKESILPKRNSDKLIARKKDWDPKKYGGFDSPTVAYSVLVVAKVEKGKSKKLKSVKELLGITIMERSSFEKNPIDFLEAKGYKEVKKDLIIKLPKYSLFELENGRKRMLASAGELQKGNELALPSKYVNFLYLASHYEKLKGSPEDNEQKQLFVEQHKHYLDEIIEQISEFSKRVILADANLDKVLSAYNKHRDKPIREQAENIIHLFTLTNLGAPAAFKYFDTTIDRKRYTSTKEVLDATLIHQSITGLYETRIDLSQLGGDGGGGGGSSGGMDPLQLLQPLEAEIKGTKLKAHWNSGATITCVPQAFLEEEVPIKNIWIKTIHGEKEQPVYYLTFKIQGRKVEAEVISSPYDYILVSPSDIPWLMKKPLQLTTLVPLQEYEERLLKQTMLTGSYKEKLQSLFLKYDALWQHWENQVGHRRIKPHHIATGTVNPRPQKQYPINPKAKASIQTVINDLLKQGVLIQQNSIMNTPVYPVPKPDGKWRMVLDYREVNKTIPLIAAQNQHSAGILSSIFRGKYKTTLDLSNGFWAHSITPESYWLTAFTWLGQQYCWTRLPQGFLNSPALFNADVVDLLKEVPNVQVYVDDIYISHDDPREHLEQLEKVFSLLLNAGYVVSLKKSEIAQHEVEFLGFNITKEGRGLTETFKQKLLNITPPRDLKQLQSILGLLNFARNFIPNFSELVKPLYNIIATAPGKYITWTTDNSQQLQNIISMLNSAENLEERNPEVRLIMKVNTSPSAGYIRFYNEFAKRPIMYLNYVYTKAEVKFTNTEKLLTTIHKGLIKALDLGMGQEILVYSPIVSMTKIQKTPLPERKALPIRWITWMSYLEDPRIQFHYDKTLPELQQVPTVTDDIIAKIKHPSEFSMVFYTDGSAIKHPNVNKSHNAGMGIAQVQFKPEFTVINTWSIPLGDHTAQLAEVAAVEFACKKALKIDGPVLIVTDSFYVAESVNKELPYWQSNGFFNNKKKPLKHVSKWKSIADCIQLKPDIIIIHEKGHQPTASTFHTEGNNLADKLATQGSYVVNAGKRTADGSEFEKRTADGSEFESPKKKAKVE

SEQ ID NO: 606 - protein, 2174 aa, synthetic construct
MPAAKRVKLDGGDKKYSIGLDIGTNSVGWAVITDEYKVPSKKFKVLGNTDRHSIKKNLIGALLFDSGETAEATRLKRTARRRYTRRKNRICYLQEIFSNEMAKVDDSFFHRLEESFLVEEDKKHERHPIFGNIVDEVAYHEKYPTIYHLRKKLVDSTDKADLRLIYLALAHMIKFRGHFLIEGDLNPDNSDVDKLFIQLVQTYNQLFEENPINASGVDAKAILSARLSKSRRLENLIAQLPGEKKNGLFGNLIALSLGLTPNFKSNFDLAEDAKLQLSKDTYDDDLDNLLAQIGDQYADLFLAAKNLSDAILLSDILRVNTEITKAPLSASMIKRYDEHHQDLTLLKALVRQQLPEKYKEIFFDQSKNGYAGYIDGGASQEEFYKFIKPILEKMDGTEELLVKLNREDLLRKQRTFDNGSIPHQIHLGELHAILRRQEDFYPFLKDNREKIEKILTFRIPYYVGPLARGNSRFAWMTRKSEETITPWNFEEVVDKGASAQSFIERMTNFDKNLPNEKVLPKHSLLYEYFTVYNELTKVKYVTEGMRKPAFLSGEQKKAIVDLLFKTNRKVTVKQLKEDYFKKIECFDSVEISGVEDRFNASLGTYHDLLKIIKDKDFLDNEENEDILEDIVLTLTLFEDREMIEERLKTYAHLFDDKVMKQLKRRRYTGWGRLSRKLINGIRDKQSGKTILDFLKSDGFANRNFMQLIHDDSLTFKEDIQKAQVSGQGDSLHEHIANLAGSPAIKKGILQTVKVVDELVKVMGRHKPENIVIEMARENQTTQKGQKNSRERMKRIEEGIKELGSQILKEHPVENTQLQNEKLYLYYLQNGRDMYVDQELDINRLSDYDVDHIVPQSFLKDDSIDNKVLTRSDKARGKSDNVPSEEVVKKMKNYWRQLLNAKLITQRKFDNLTKAERGGLSELDKAGFIKRQLVETRQITKHVAQILDSRMNTKYDENDKLIREVKVITLKSKLVSDFRKDFQFYKVREINNYHHAHDAYLNAVVGTALIKKYPKLESEFVYGDYKVYDVRKMIAKSEQEIGKATAKYFFYSNIMNFFKTEITLANGEIRKRPLIETNGETGEIVWDKGRDFATVRKVLSMPQVNIVKKTEVQTGGFSKESILPKRNSDKLIARKKDWDPKKYGGFDSPTVAYSVLVVAKVEKGKSKKLKSVKELLGITIMERSSFEKNPIDFLEAKGYKEVKKDLIIKLPKYSLFELENGRKRMLASAGELQKGNELALPSKYVNFLYLASHYEKLKGSPEDNEQKQLFVEQHKHYLDEIIEQISEFSKRVILADANLDKVLSAYNKHRDKPIREQAENIIHLFTLTNLGAPAAFKYFDTTIDRKRYTSTKEVLDATLIHQSITGLYETRIDLSQLGGDGGGGSGGSGGSGGMDPLQLLQPLEAEIKGTKLKAHWNSGATITCVPQAFLEEEVPIKNIWIKTIHGEKEQPVYYLTFKIQGRKVEAEVISSPYDYILVSPSDIPWLMKKPLQLTTLVPLQEYEERLLKQTMLTGSYKEKLQSLFLKYDALWQHWENQVGHRRIKPHHIATGTVNPRPQKQYPINPKAKASIQTVINDLLKQGVLIQQNSIMNTPVYPVPKPDGKWRMVLDYREVNKTIPLIAAQNQHSAGILSSIFRGKYKTTLDLSNGFWAHSITPESYWLTAFTWLGQQYCWTRLPQGFLNSPALFNADVVDLLKEVPNVQVYVDDIYISHDDPREHLEQLEKVFSLLLNAGYVVSLKKSEIAQHEVEFLGFNITKEGRGLTETFKQKLLNITPPRDLKQLQSILGLLNFARNFIPNFSELVKPLYNIIATAPGKYITWTTDNSQQLQNIISMLNSAENLEERNPEVRLIMKVNTSPSAGYIRFYNEFAKRPIMYLNYVYTKAEVKFTNTEKLLTTIHKGLIKALDLGMGQEILVYSPIVSMTKIQKTPLPERKALPIRWITWMSYLEDPRIQFHYDKTLPELQQVPTVTDDIIAKIKHPSEFSMVFYTDGSAIKHPNVNKSHNAGMGIAQVQFKPEFTVINTWSIPLGDHTAQLAEVAAVEFACKKALKIDGPVLIVTDSFYVAESVNKELPYWQSNGFFNNKKKPLKHVSKWKSIADCIQLKPDIIIIHEKGHQPTASTFHTEGNNLADKLATQGSYVVNAGKRTADGSEFEKRTADGSEFESPKKKAKVE

SEQ ID NO: 607 - protein, 2173 aa, synthetic construct
MPAAKRVKLDGGDKKYSIGLDIGTNSVGWAVITDEYKVPSKKFKVLGNTDRHSIKKNLIGALLFDSGETAEATRLKRTARRRYTRRKNRICYLQEIFSNEMAKVDDSFFHRLEESFLVEEDKKHERHPIFGNIVDEVAYHEKYPTIYHLRKKLVDSTDKADLRLIYLALAHMIKFRGHFLIEGDLNPDNSDVDKLFIQLVQTYNQLFEENPINASGVDAKAILSARLSKSRRLENLIAQLPGEKKNGLFGNLIALSLGLTPNFKSNFDLAEDAKLQLSKDTYDDDLDNLLAQIGDQYADLFLAAKNLSDAILLSDILRVNTEITKAPLSASMIKRYDEHHQDLTLLKALVRQQLPEKYKEIFFDQSKNGYAGYIDGGASQEEFYKFIKPILEKMDGTEELLVKLNREDLLRKQRTFDNGSIPHQIHLGELHAILRRQEDFYPFLKDNREKIEKILTFRIPYYVGPLARGNSRFAWMTRKSEETITPWNFEEVVDKGASAQSFIERMTNFDKNLPNEKVLPKHSLLYEYFTVYNELTKVKYVTEGMRKPAFLSGEQKKAIVDLLFKTNRKVTVKQLKEDYFKKIECFDSVEISGVEDRFNASLGTYHDLLKIIKDKDFLDNEENEDILEDIVLTLTLFEDREMIEERLKTYAHLFDDKVMKQLKRRRYTGWGRLSRKLINGIRDKQSGKTILDFLKSDGFANRNFMQLIHDDSLTFKEDIQKAQVSGQGDSLHEHIANLAGSPAIKKGILQTVKVVDELVKVMGRHKPENIVIEMARENQTTQKGQKNSRERMKRIEEGIKELGSQILKEHPVENTQLQNEKLYLYYLQNGRDMYVDQELDINRLSDYDVDHIVPQSFLKDDSIDNKVLTRSDKARGKSDNVPSEEVVKKMKNYWRQLLNAKLITQRKFDNLTKAERGGLSELDKAGFIKRQLVETRQITKHVAQILDSRMNTKYDENDKLIREVKVITLKSKLVSDFRKDFQFYKVREINNYHHAHDAYLNAVVGTALIKKYPKLESEFVYGDYKVYDVRKMIAKSEQEIGKATAKYFFYSNIMNFFKTEITLANGEIRKRPLIETNGETGEIVWDKGRDFATVRKVLSMPQVNIVKKTEVQTGGFSKESILPKRNSDKLIARKKDWDPKKYGGFDSPTVAYSVLVVAKVEKGKSKKLKSVKELLGITIMERSSFEKNPIDFLEAKGYKEVKKDLIIKLPKYSLFELENGRKRMLASAGELQKGNELALPSKYVNFLYLASHYEKLKGSPEDNEQKQLFVEQHKHYLDEIIEQISEFSKRVILADANLDKVLSAYNKHRDKPIREQAENIIHLFTLTNLGAPAAFKYFDTTIDRKRYTSTKEVLDATLIHQSITGLYETRIDLSQLGGDGGGGSEAAAKGGMDPLQLLQPLEAEIKGTKLKAHWNSGATITCVPQAFLEEEVPIKNIWIKTIHGEKEQPVYYLTFKIQGRKVEAEVISSPYDYILVSPSDIPWLMKKPLQLTTLVPLQEYEERLLKQTMLTGSYKEKLQSLFLKYDALWQHWENQVGHRRIKPHHIATGTVNPRPQKQYPINPKAKASIQTVINDLLKQGVLIQQNSIMNTPVYPVPKPDGKWRMVLDYREVNKTIPLIAAQNQHSAGILSSIFRGKYKTTLDLSNGFWAHSITPESYWLTAFTWLGQQYCWTRLPQGFLNSPALFNADVVDLLKEVPNVQVYVDDIYISHDDPREHLEQLEKVFSLLLNAGYVVSLKKSEIAQHEVEFLGFNITKEGRGLTETFKQKLLNITPPRDLKQLQSILGLLNFARNFIPNFSELVKPLYNIIATAPGKYITWTTDNSQQLQNIISMLNSAENLEERNPEVRLIMKVNTSPSAGYIRFYNEFAKRPIMYLNYVYTKAEVKFTNTEKLLTTIHKGLIKALDLGMGQEILVYSPIVSMTKIQKTPLPERKALPIRWITWMSYLEDPRIQFHYDKTLPELQQVPTVTDDIIAKIKHPSEFSMVFYTDGSAIKHPNVNKSHNAGMGIAQVQFKPEFTVINTWSIPLGDHTAQLAEVAAVEFACKKALKIDGPVLIVTDSFYVAESVNKELPYWQSNGFFNNKKKPLKHVSKWKSIADCIQLKPDIIIIHEKGHQPTASTFHTEGNNLADKLATQGSYVVNAGKRTADGSEFEKRTADGSEFESPKKKAKVE

SEQ ID NO: 608 - protein, 2170 aa, synthetic construct
MPAAKRVKLDGGDKKYSIGLDIGTNSVGWAVITDEYKVPSKKFKVLGNTDRHSIKKNLIGALLFDSGETAEATRLKRTARRRYTRRKNRICYLQEIFSNEMAKVDDSFFHRLEESFLVEEDKKHERHPIFGNIVDEVAYHEKYPTIYHLRKKLVDSTDKADLRLIYLALAHMIKFRGHFLIEGDLNPDNSDVDKLFIQLVQTYNQLFEENPINASGVDAKAILSARLSKSRRLENLIAQLPGEKKNGLFGNLIALSLGLTPNFKSNFDLAEDAKLQLSKDTYDDDLDNLLAQIGDQYADLFLAAKNLSDAILLSDILRVNTEITKAPLSASMIKRYDEHHQDLTLLKALVRQQLPEKYKEIFFDQSKNGYAGYIDGGASQEEFYKFIKPILEKMDGTEELLVKLNREDLLRKQRTFDNGSIPHQIHLGELHAILRRQEDFYPFLKDNREKIEKILTFRIPYYVGPLARGNSRFAWMTRKSEETITPWNFEEVVDKGASAQSFIERMTNFDKNLPNEKVLPKHSLLYEYFTVYNELTKVKYVTEGMRKPAFLSGEQKKAIVDLLFKTNRKVTVKQLKEDYFKKIECFDSVEISGVEDRFNASLGTYHDLLKIIKDKDFLDNEENEDILEDIVLTLTLFEDREMIEERLKTYAHLFDDKVMKQLKRRRYTGWGRLSRKLINGIRDKQSGKTILDFLKSDGFANRNFMQLIHDDSLTFKEDIQKAQVSGQGDSLHEHIANLAGSPAIKKGILQTVKVVDELVKVMGRHKPENIVIEMARENQTTQKGQKNSRERMKRIEEGIKELGSQILKEHPVENTQLQNEKLYLYYLQNGRDMYVDQELDINRLSDYDVDHIVPQSFLKDDSIDNKVLTRSDKARGKSDNVPSEEVVKKMKNYWRQLLNAKLITQRKFDNLTKAERGGLSELDKAGFIKRQLVETRQITKHVAQILDSRMNTKYDENDKLIREVKVITLKSKLVSDFRKDFQFYKVREINNYHHAHDAYLNAVVGTALIKKYPKLESEFVYGDYKVYDVRKMIAKSEQEIGKATAKYFFYSNIMNFFKTEITLANGEIRKRPLIETNGETGEIVWDKGRDFATVRKVLSMPQVNIVKKTEVQTGGFSKESILPKRNSDKLIARKKDWDPKKYGGFDSPTVAYSVLVVAKVEKGKSKKLKSVKELLGITIMERSSFEKNPIDFLEAKGYKEVKKDLIIKLPKYSLFELENGRKRMLASAGELQKGNELALPSKYVNFLYLASHYEKLKGSPEDNEQKQLFVEQHKHYLDEIIEQISEFSKRVILADANLDKVLSAYNKHRDKPIREQAENIIHLFTLTNLGAPAAFKYFDTTIDRKRYTSTKEVLDATLIHQSITGLYETRIDLSQLGGDGGEAAAKGGMDPLQLLQPLEAEIKGTKLKAHWNSGATITCVPQAFLEEEVPIKNIWIKTIHGEKEQPVYYLTFKIQGRKVEAEVISSPYDYILVSPSDIPWLMKKPLQLTTLVPLQEYEERLLKQTMLTGSYKEKLQSLFLKYDALWQHWENQVGHRRIKPHHIATGTVNPRPQKQYPINPKAKASIQTVINDLLKQGVLIQQNSIMNTPVYPVPKPDGKWRMVLDYREVNKTIPLIAAQNQHSAGILSSIFRGKYKTTLDLSNGFWAHSITPESYWLTAFTWLGQQYCWTRLPQGFLNSPALFNADVVDLLKEVPNVQVYVDDIYISHDDPREHLEQLEKVFSLLLNAGYVVSLKKSEIAQHEVEFLGFNITKEGRGLTETFKQKLLNITPPRDLKQLQSILGLLNFARNFIPNFSELVKPLYNIIATAPGKYITWTTDNSQQLQNIISMLNSAENLEERNPEVRLIMKVNTSPSAGYIRFYNEFAKRPIMYLNYVYTKAEVKFTNTEKLLTTIHKGLIKALDLGMGQEILVYSPIVSMTKIQKTPLPERKALPIRWITWMSYLEDPRIQFHYDKTLPELQQVPTVTDDIIAKIKHPSEFSMVFYTDGSAIKHPNVNKSHNAGMGIAQVQFKPEFTVINTWSIPLGDHTAQLAEVAAVEFACKKALKIDGPVLIVTDSFYVAESVNKELPYWQSNGFFNNKKKPLKHVSKWKSIADCIQLKPDIIIIHEKGHQPTASTFHTEGNNLADKLATQGSYVVNAGKRTADGSEFEKRTADGSEFESPKKKAKVE

SEQ ID NO: 609 - protein, 2174 aa, synthetic construct
MPAAKRVKLDGGDKKYSIGLDIGTNSVGWAVITDEYKVPSKKFKVLGNTDRHSIKKNLIGALLFDSGETAEATRLKRTARRRYTRRKNRICYLQEIFSNEMAKVDDSFFHRLEESFLVEEDKKHERHPIFGNIVDEVAYHEKYPTIYHLRKKLVDSTDKADLRLIYLALAHMIKFRGHFLIEGDLNPDNSDVDKLFIQLVQTYNQLFEENPINASGVDAKAILSARLSKSRRLENLIAQLPGEKKNGLFGNLIALSLGLTPNFKSNFDLAEDAKLQLSKDTYDDDLDNLLAQIGDQYADLFLAAKNLSDAILLSDILRVNTEITKAPLSASMIKRYDEHHQDLTLLKALVRQQLPEKYKEIFFDQSKNGYAGYIDGGASQEEFYKFIKPILEKMDGTEELLVKLNREDLLRKQRTFDNGSIPHQIHLGELHAILRRQEDFYPFLKDNREKIEKILTFRIPYYVGPLARGNSRFAWMTRKSEETITPWNFEEVVDKGASAQSFIERMTNFDKNLPNEKVLPKHSLLYEYFTVYNELTKVKYVTEGMRKPAFLSGEQKKAIVDLLFKTNRKVTVKQLKEDYFKKIECFDSVEISGVEDRFNASLGTYHDLLKIIKDKDFLDNEENEDILEDIVLTLTLFEDREMIEERLKTYAHLFDDKVMKQLKRRRYTGWGRLSRKLINGIRDKQSGKTILDFLKSDGFANRNFMQLIHDDSLTFKEDIQKAQVSGQGDSLHEHIANLAGSPAIKKGILQTVKVVDELVKVMGRHKPENIVIEMARENQTTQKGQKNSRERMKRIEEGIKELGSQILKEHPVENTQLQNEKLYLYYLQNGRDMYVDQELDINRLSDYDVDHIVPQSFLKDDSIDNKVLTRSDKARGKSDNVPSEEVVKKMKNYWRQLLNAKLITQRKFDNLTKAERGGLSELDKAGFIKRQLVETRQITKHVAQILDSRMNTKYDENDKLIREVKVITLKSKLVSDFRKDFQFYKVREINNYHHAHDAYLNAVVGTALIKKYPKLESEFVYGDYKVYDVRKMIAKSEQEIGKATAKYFFYSNIMNFFKTEITLANGEIRKRPLIETNGETGEIVWDKGRDFATVRKVLSMPQVNIVKKTEVQTGGFSKESILPKRNSDKLIARKKDWDPKKYGGFDSPTVAYSVLVVAKVEKGKSKKLKSVKELLGITIMERSSFEKNPIDFLEAKGYKEVKKDLIIKLPKYSLFELENGRKRMLASAGELQKGNELALPSKYVNFLYLASHYEKLKGSPEDNEQKQLFVEQHKHYLDEIIEQISEFSKRVILADANLDKVLSAYNKHRDKPIREQAENIIHLFTLTNLGAPAAFKYFDTTIDRKRYTSTKEVLDATLIHQSITGLYETRIDLSQLGGDGGGGSPAPGSSGGMDPLQLLQPLEAEIKGTKLKAHWNSGATITCVPQAFLEEEVPIKNIWIKTIHGEKEQPVYYLTFKIQGRKVEAEVISSPYDYILVSPSDIPWLMKKPLQLTTLVPLQEYEERLLKQTMLTGSYKEKLQSLFLKYDALWQHWENQVGHRRIKPHHIATGTVNPRPQKQYPINPKAKASIQTVINDLLKQGVLIQQNSIMNTPVYPVPKPDGKWRMVLDYREVNKTIPLIAAQNQHSAGILSSIFRGKYKTTLDLSNGFWAHSITPESYWLTAFTWLGQQYCWTRLPQGFLNSPALFNADVVDLLKEVPNVQVYVDDIYISHDDPREHLEQLEKVFSLLLNAGYVVSLKKSEIAQHEVEFLGFNITKEGRGLTETFKQKLLNITPPRDLKQLQSILGLLNFARNFIPNFSELVKPLYNIIATAPGKYITWTTDNSQQLQNIISMLNSAENLEERNPEVRLIMKVNTSPSAGYIRFYNEFAKRPIMYLNYVYTKAEVKFTNTEKLLTTIHKGLIKALDLGMGQEILVYSPIVSMTKIQKTPLPERKALPIRWITWMSYLEDPRIQFHYDKTLPELQQVPTVTDDIIAKIKHPSEFSMVFYTDGSAIKHPNVNKSHNAGMGIAQVQFKPEFTVINTWSIPLGDHTAQLAEVAAVEFACKKALKIDGPVLIVTDSFYVAESVNKELPYWQSNGFFNNKKKPLKHVSKWKSIADCIQLKPDIIIIHEKGHQPTASTFHTEGNNLADKLATQGSYVVNAGKRTADGSEFEKRTADGSEFESPKKKAKVE

SEQ ID NO: 610 - protein, 2174 aa, synthetic construct
MPAAKRVKLDGGDKKYSIGLDIGTNSVGWAVITDEYKVPSKKFKVLGNTDRHSIKKNLIGALLFDSGETAEATRLKRTARRRYTRRKNRICYLQEIFSNEMAKVDDSFFHRLEESFLVEEDKKHERHPIFGNIVDEVAYHEKYPTIYHLRKKLVDSTDKADLRLIYLALAHMIKFRGHFLIEGDLNPDNSDVDKLFIQLVQTYNQLFEENPINASGVDAKAILSARLSKSRRLENLIAQLPGEKKNGLFGNLIALSLGLTPNFKSNFDLAEDAKLQLSKDTYDDDLDNLLAQIGDQYADLFLAAKNLSDAILLSDILRVNTEITKAPLSASMIKRYDEHHQDLTLLKALVRQQLPEKYKEIFFDQSKNGYAGYIDGGASQEEFYKFIKPILEKMDGTEELLVKLNREDLLRKQRTFDNGSIPHQIHLGELHAILRRQEDFYPFLKDNREKIEKILTFRIPYYVGPLARGNSRFAWMTRKSEETITPWNFEEVVDKGASAQSFIERMTNFDKNLPNEKVLPKHSLLYEYFTVYNELTKVKYVTEGMRKPAFLSGEQKKAIVDLLFKTNRKVTVKQLKEDYFKKIECFDSVEISGVEDRFNASLGTYHDLLKIIKDKDFLDNEENEDILEDIVLTLTLFEDREMIEERLKTYAHLFDDKVMKQLKRRRYTGWGRLSRKLINGIRDKQSGKTILDFLKSDGFANRNFMQLIHDDSLTFKEDIQKAQVSGQGDSLHEHIANLAGSPAIKKGILQTVKVVDELVKVMGRHKPENIVIEMARENQTTQKGQKNSRERMKRIEEGIKELGSQILKEHPVENTQLQNEKLYLYYLQNGRDMYVDQELDINRLSDYDVDHIVPQSFLKDDSIDNKVLTRSDKARGKSDNVPSEEVVKKMKNYWRQLLNAKLITQRKFDNLTKAERGGLSELDKAGFIKRQLVETRQITKHVAQILDSRMNTKYDENDKLIREVKVITLKSKLVSDFRKDFQFYKVREINNYHHAHDAYLNAVVGTALIKKYPKLESEFVYGDYKVYDVRKMIAKSEQEIGKATAKYFFYSNIMNFFKTEITLANGEIRKRPLIETNGETGEIVWDKGRDFATVRKVLSMPQVNIVKKTEVQTGGFSKESILPKRNSDKLIARKKDWDPKKYGGFDSPTVAYSVLVVAKVEKGKSKKLKSVKELLGITIMERSSFEKNPIDFLEAKGYKEVKKDLIIKLPKYSLFELENGRKRMLASAGELQKGNELALPSKYVNFLYLASHYEKLKGSPEDNEQKQLFVEQHKHYLDEIIEQISEFSKRVILADANLDKVLSAYNKHRDKPIREQAENIIHLFTLTNLGAPAAFKYFDTTIDRKRYTSTKEVLDATLIHQSITGLYETRIDLSQLGGDGGGSSGGGGGSGGMDPLQLLQPLEAEIKGTKLKAHWNSGATITCVPQAFLEEEVPIKNIWIKTIHGEKEQPVYYLTFKIQGRKVEAEVISSPYDYILVSPSDIPWLMKKPLQLTTLVPLQEYEERLLKQTMLTGSYKEKLQSLFLKYDALWQHWENQVGHRRIKPHHIATGTVNPRPQKQYPINPKAKASIQTVINDLLKQGVLIQQNSIMNTPVYPVPKPDGKWRMVLDYREVNKTIPLIAAQNQHSAGILSSIFRGKYKTTLDLSNGFWAHSITPESYWLTAFTWLGQQYCWTRLPQGFLNSPALFNADVVDLLKEVPNVQVYVDDIYISHDDPREHLEQLEKVFSLLLNAGYVVSLKKSEIAQHEVEFLGFNITKEGRGLTETFKQKLLNITPPRDLKQLQSILGLLNFARNFIPNFSELVKPLYNIIATAPGKYITWTTDNSQQLQNIISMLNSAENLEERNPEVRLIMKVNTSPSAGYIRFYNEFAKRPIMYLNYVYTKAEVKFTNTEKLLTTIHKGLIKALDLGMGQEILVYSPIVSMTKIQKTPLPERKALPIRWITWMSYLEDPRIQFHYDKTLPELQQVPTVTDDIIAKIKHPSEFSMVFYTDGSAIKHPNVNKSHNAGMGIAQVQFKPEFTVINTWSIPLGDHTAQLAEVAAVEFACKKALKIDGPVLIVTDSFYVAESVNKELPYWQSNGFFNNKKKPLKHVSKWKSIADCIQLKPDIIIIHEKGHQPTASTFHTEGNNLADKLATQGSYVVNAGKRTADGSEFEKRTADGSEFESPKKKAKVE

SEQ ID NO: 611 - protein, 2180 aa, synthetic construct
MPAAKRVKLDGGDKKYSIGLDIGTNSVGWAVITDEYKVPSKKFKVLGNTDRHSIKKNLIGALLFDSGETAEATRLKRTARRRYTRRKNRICYLQEIFSNEMAKVDDSFFHRLEESFLVEEDKKHERHPIFGNIVDEVAYHEKYPTIYHLRKKLVDSTDKADLRLIYLALAHMIKFRGHFLIEGDLNPDNSDVDKLFIQLVQTYNQLFEENPINASGVDAKAILSARLSKSRRLENLIAQLPGEKKNGLFGNLIALSLGLTPNFKSNFDLAEDAKLQLSKDTYDDDLDNLLAQIGDQYADLFLAAKNLSDAILLSDILRVNTEITKAPLSASMIKRYDEHHQDLTLLKALVRQQLPEKYKEIFFDQSKNGYAGYIDGGASQEEFYKFIKPILEKMDGTEELLVKLNREDLLRKQRTFDNGSIPHQIHLGELHAILRRQEDFYPFLKDNREKIEKILTFRIPYYVGPLARGNSRFAWMTRKSEETITPWNFEEVVDKGASAQSFIERMTNFDKNLPNEKVLPKHSLLYEYFTVYNELTKVKYVTEGMRKPAFLSGEQKKAIVDLLFKTNRKVTVKQLKEDYFKKIECFDSVEISGVEDRFNASLGTYHDLLKIIKDKDFLDNEENEDILEDIVLTLTLFEDREMIEERLKTYAHLFDDKVMKQLKRRRYTGWGRLSRKLINGIRDKQSGKTILDFLKSDGFANRNFMQLIHDDSLTFKEDIQKAQVSGQGDSLHEHIANLAGSPAIKKGILQTVKVVDELVKVMGRHKPENIVIEMARENQTTQKGQKNSRERMKRIEEGIKELGSQILKEHPVENTQLQNEKLYLYYLQNGRDMYVDQELDINRLSDYDVDHIVPQSFLKDDSIDNKVLTRSDKARGKSDNVPSEEVVKKMKNYWRQLLNAKLITQRKFDNLTKAERGGLSELDKAGFIKRQLVETRQITKHVAQILDSRMNTKYDENDKLIREVKVITLKSKLVSDFRKDFQFYKVREINNYHHAHDAYLNAVVGTALIKKYPKLESEFVYGDYKVYDVRKMIAKSEQEIGKATAKYFFYSNIMNFFKTEITLANGEIRKRPLIETNGETGEIVWDKGRDFATVRKVLSMPQVNIVKKTEVQTGGFSKESILPKRNSDKLIARKKDWDPKKYGGFDSPTVAYSVLVVAKVEKGKSKKLKSVKELLGITIMERSSFEKNPIDFLEAKGYKEVKKDLIIKLPKYSLFELENGRKRMLASAGELQKGNELALPSKYVNFLYLASHYEKLKGSPEDNEQKQLFVEQHKHYLDEIIEQISEFSKRVILADANLDKVLSAYNKHRDKPIREQAENIIHLFTLTNLGAPAAFKYFDTTIDRKRYTSTKEVLDATLIHQSITGLYETRIDLSQLGGDGGGGGGSEAAAKGGGGSGGMDPLQLLQPLEAEIKGTKLKAHWNSGATITCVPQAFLEEEVPIKNIWIKTIHGEKEQPVYYLTFKIQGRKVEAEVISSPYDYILVSPSDIPWLMKKPLQLTTLVPLQEYEERLLKQTMLTGSYKEKLQSLFLKYDALWQHWENQVGHRRIKPHHIATGTVNPRPQKQYPINPKAKASIQTVINDLLKQGVLIQQNSIMNTPVYPVPKPDGKWRMVLDYREVNKTIPLIAAQNQHSAGILSSIFRGKYKTTLDLSNGFWAHSITPESYWLTAFTWLGQQYCWTRLPQGFLNSPALFNADVVDLLKEVPNVQVYVDDIYISHDDPREHLEQLEKVFSLLLNAGYVVSLKKSEIAQHEVEFLGFNITKEGRGLTETFKQKLLNITPPRDLKQLQSILGLLNFARNFIPNFSELVKPLYNIIATAPGKYITWTTDNSQQLQNIISMLNSAENLEERNPEVRLIMKVNTSPSAGYIRFYNEFAKRPIMYLNYVYTKAEVKFTNTEKLLTTIHKGLIKALDLGMGQEILVYSPIVSMTKIQKTPLPERKALPIRWITWMSYLEDPRIQFHYDKTLPELQQVPTVTDDIIAKIKHPSEFSMVFYTDGSAIKHPNVNKSHNAGMGIAQVQFKPEFTVINTWSIPLGDHTAQLAEVAAVEFACKKALKIDGPVLIVTDSFYVAESVNKELPYWQSNGFFNNKKKPLKHVSKWKSIADCIQLKPDIIIIHEKGHQPTASTFHTEGNNLADKLATQGSYVVNAGKRTADGSEFEKRTADGSEFESPKKKAKVE

SEQ ID NO: 612 - protein, 2174 aa, synthetic construct
MPAAKRVKLDGGDKKYSIGLDIGTNSVGWAVITDEYKVPSKKFKVLGNTDRHSIKKNLIGALLFDSGETAEATRLKRTARRRYTRRKNRICYLQEIFSNEMAKVDDSFFHRLEESFLVEEDKKHERHPIFGNIVDEVAYHEKYPTIYHLRKKLVDSTDKADLRLIYLALAHMIKFRGHFLIEGDLNPDNSDVDKLFIQLVQTYNQLFEENPINASGVDAKAILSARLSKSRRLENLIAQLPGEKKNGLFGNLIALSLGLTPNFKSNFDLAEDAKLQLSKDTYDDDLDNLLAQIGDQYADLFLAAKNLSDAILLSDILRVNTEITKAPLSASMIKRYDEHHQDLTLLKALVRQQLPEKYKEIFFDQSKNGYAGYIDGGASQEEFYKFIKPILEKMDGTEELLVKLNREDLLRKQRTFDNGSIPHQIHLGELHAILRRQEDFYPFLKDNREKIEKILTFRIPYYVGPLARGNSRFAWMTRKSEETITPWNFEEVVDKGASAQSFIERMTNFDKNLPNEKVLPKHSLLYEYFTVYNELTKVKYVTEGMRKPAFLSGEQKKAIVDLLFKTNRKVTVKQLKEDYFKKIECFDSVEISGVEDRFNASLGTYHDLLKIIKDKDFLDNEENEDILEDIVLTLTLFEDREMIEERLKTYAHLFDDKVMKQLKRRRYTGWGRLSRKLINGIRDKQSGKTILDFLKSDGFANRNFMQLIHDDSLTFKEDIQKAQVSGQGDSLHEHIANLAGSPAIKKGILQTVKVVDELVKVMGRHKPENIVIEMARENQTTQKGQKNSRERMKRIEEGIKELGSQILKEHPVENTQLQNEKLYLYYLQNGRDMYVDQELDINRLSDYDVDHIVPQSFLKDDSIDNKVLTRSDKARGKSDNVPSEEVVKKMKNYWRQLLNAKLITQRKFDNLTKAERGGLSELDKAGFIKRQLVETRQITKHVAQILDSRMNTKYDENDKLIREVKVITLKSKLVSDFRKDFQFYKVREINNYHHAHDAYLNAVVGTALIKKYPKLESEFVYGDYKVYDVRKMIAKSEQEIGKATAKYFFYSNIMNFFKTEITLANGEIRKRPLIETNGETGEIVWDKGRDFATVRKVLSMPQVNIVKKTEVQTGGFSKESILPKRNSDKLIARKKDWDPKKYGGFDSPTVAYSVLVVAKVEKGKSKKLKSVKELLGITIMERSSFEKNPIDFLEAKGYKEVKKDLIIKLPKYSLFELENGRKRMLASAGELQKGNELALPSKYVNFLYLASHYEKLKGSPEDNEQKQLFVEQHKHYLDEIIEQISEFSKRVILADANLDKVLSAYNKHRDKPIREQAENIIHLFTLTNLGAPAAFKYFDTTIDRKRYTSTKEVLDATLIHQSITGLYETRIDLSQLGGDGGGSSPAPGGGGGMDPLQLLQPLEAEIKGTKLKAHWNSGATITCVPQAFLEEEVPIKNIWIKTIHGEKEQPVYYLTFKIQGRKVEAEVISSPYDYILVSPSDIPWLMKKPLQLTTLVPLQEYEERLLKQTMLTGSYKEKLQSLFLKYDALWQHWENQVGHRRIKPHHIATGTVNPRPQKQYPINPKAKASIQTVINDLLKQGVLIQQNSIMNTPVYPVPKPDGKWRMVLDYREVNKTIPLIAAQNQHSAGILSSIFRGKYKTTLDLSNGFWAHSITPESYWLTAFTWLGQQYCWTRLPQGFLNSPALFNADVVDLLKEVPNVQVYVDDIYISHDDPREHLEQLEKVFSLLLNAGYVVSLKKSEIAQHEVEFLGFNITKEGRGLTETFKQKLLNITPPRDLKQLQSILGLLNFARNFIPNFSELVKPLYNIIATAPGKYITWTTDNSQQLQNIISMLNSAENLEERNPEVRLIMKVNTSPSAGYIRFYNEFAKRPIMYLNYVYTKAEVKFTNTEKLLTTIHKGLIKALDLGMGQEILVYSPIVSMTKIQKTPLPERKALPIRWITWMSYLEDPRIQFHYDKTLPELQQVPTVTDDIIAKIKHPSEFSMVFYTDGSAIKHPNVNKSHNAGMGIAQVQFKPEFTVINTWSIPLGDHTAQLAEVAAVEFACKKALKIDGPVLIVTDSFYVAESVNKELPYWQSNGFFNNKKKPLKHVSKWKSIADCIQLKPDIIIIHEKGHQPTASTFHTEGNNLADKLATQGSYVVNAGKRTADGSEFEKRTADGSEFESPKKKAKVE

SEQ ID NO: 613 - protein, 2176 aa, synthetic construct
MPAAKRVKLDGGDKKYSIGLDIGTNSVGWAVITDEYKVPSKKFKVLGNTDRHSIKKNLIGALLFDSGETAEATRLKRTARRRYTRRKNRICYLQEIFSNEMAKVDDSFFHRLEESFLVEEDKKHERHPIFGNIVDEVAYHEKYPTIYHLRKKLVDSTDKADLRLIYLALAHMIKFRGHFLIEGDLNPDNSDVDKLFIQLVQTYNQLFEENPINASGVDAKAILSARLSKSRRLENLIAQLPGEKKNGLFGNLIALSLGLTPNFKSNFDLAEDAKLQLSKDTYDDDLDNLLAQIGDQYADLFLAAKNLSDAILLSDILRVNTEITKAPLSASMIKRYDEHHQDLTLLKALVRQQLPEKYKEIFFDQSKNGYAGYIDGGASQEEFYKFIKPILEKMDGTEELLVKLNREDLLRKQRTFDNGSIPHQIHLGELHAILRRQEDFYPFLKDNREKIEKILTFRIPYYVGPLARGNSRFAWMTRKSEETITPWNFEEVVDKGASAQSFIERMTNFDKNLPNEKVLPKHSLLYEYFTVYNELTKVKYVTEGMRKPAFLSGEQKKAIVDLLFKTNRKVTVKQLKEDYFKKIECFDSVEISGVEDRFNASLGTYHDLLKIIKDKDFLDNEENEDILEDIVLTLTLFEDREMIEERLKTYAHLFDDKVMKQLKRRRYTGWGRLSRKLINGIRDKQSGKTILDFLKSDGFANRNFMQLIHDDSLTFKEDIQKAQVSGQGDSLHEHIANLAGSPAIKKGILQTVKVVDELVKVMGRHKPENIVIEMARENQTTQKGQKNSRERMKRIEEGIKELGSQILKEHPVENTQLQNEKLYLYYLQNGRDMYVDQELDINRLSDYDVDHIVPQSFLKDDSIDNKVLTRSDKARGKSDNVPSEEVVKKMKNYWRQLLNAKLITQRKFDNLTKAERGGLSELDKAGFIKRQLVETRQITKHVAQILDSRMNTKYDENDKLIREVKVITLKSKLVSDFRKDFQFYKVREINNYHHAHDAYLNAVVGTALIKKYPKLESEFVYGDYKVYDVRKMIAKSEQEIGKATAKYFFYSNIMNFFKTEITLANGEIRKRPLIETNGETGEIVWDKGRDFATVRKVLSMPQVNIVKKTEVQTGGFSKESILPKRNSDKLIARKKDWDPKKYGGFDSPTVAYSVLVVAKVEKGKSKKLKSVKELLGITIMERSSFEKNPIDFLEAKGYKEVKKDLIIKLPKYSLFELENGRKRMLASAGELQKGNELALPSKYVNFLYLASHYEKLKGSPEDNEQKQLFVEQHKHYLDEIIEQISEFSKRVILADANLDKVLSAYNKHRDKPIREQAENIIHLFTLTNLGAPAAFKYFDTTIDRKRYTSTKEVLDATLIHQSITGLYETRIDLSQLGGDGGGGGGSSEAAAKGGMDPLQLLQPLEAEIKGTKLKAHWNSGATITCVPQAFLEEEVPIKNIWIKTIHGEKEQPVYYLTFKIQGRKVEAEVISSPYDYILVSPSDIPWLMKKPLQLTTLVPLQEYEERLLKQTMLTGSYKEKLQSLFLKYDALWQHWENQVGHRRIKPHHIATGTVNPRPQKQYPINPKAKASIQTVINDLLKQGVLIQQNSIMNTPVYPVPKPDGKWRMVLDYREVNKTIPLIAAQNQHSAGILSSIFRGKYKTTLDLSNGFWAHSITPESYWLTAFTWLGQQYCWTRLPQGFLNSPALFNADVVDLLKEVPNVQVYVDDIYISHDDPREHLEQLEKVFSLLLNAGYVVSLKKSEIAQHEVEFLGFNITKEGRGLTETFKQKLLNITPPRDLKQLQSILGLLNFARNFIPNFSELVKPLYNIIATAPGKYITWTTDNSQQLQNIISMLNSAENLEERNPEVRLIMKVNTSPSAGYIRFYNEFAKRPIMYLNYVYTKAEVKFTNTEKLLTTIHKGLIKALDLGMGQEILVYSPIVSMTKIQKTPLPERKALPIRWITWMSYLEDPRIQFHYDKTLPELQQVPTVTDDIIAKIKHPSEFSMVFYTDGSAIKHPNVNKSHNAGMGIAQVQFKPEFTVINTWSIPLGDHTAQLAEVAAVEFACKKALKIDGPVLIVTDSFYVAESVNKELPYWQSNGFFNNKKKPLKHVSKWKSIADCIQLKPDIIIIHEKGHQPTASTFHTEGNNLADKLATQGSYVVNAGKRTADGSEFEKRTADGSEFESPKKKAKVE

SEQ ID NO: 614 - protein, 2176 aa, synthetic construct
MPAAKRVKLDGGDKKYSIGLDIGTNSVGWAVITDEYKVPSKKFKVLGNTDRHSIKKNLIGALLFDSGETAEATRLKRTARRRYTRRKNRICYLQEIFSNEMAKVDDSFFHRLEESFLVEEDKKHERHPIFGNIVDEVAYHEKYPTIYHLRKKLVDSTDKADLRLIYLALAHMIKFRGHFLIEGDLNPDNSDVDKLFIQLVQTYNQLFEENPINASGVDAKAILSARLSKSRRLENLIAQLPGEKKNGLFGNLIALSLGLTPNFKSNFDLAEDAKLQLSKDTYDDDLDNLLAQIGDQYADLFLAAKNLSDAILLSDILRVNTEITKAPLSASMIKRYDEHHQDLTLLKALVRQQLPEKYKEIFFDQSKNGYAGYIDGGASQEEFYKFIKPILEKMDGTEELLVKLNREDLLRKQRTFDNGSIPHQIHLGELHAILRRQEDFYPFLKDNREKIEKILTFRIPYYVGPLARGNSRFAWMTRKSEETITPWNFEEVVDKGASAQSFIERMTNFDKNLPNEKVLPKHSLLYEYFTVYNELTKVKYVTEGMRKPAFLSGEQKKAIVDLLFKTNRKVTVKQLKEDYFKKIECFDSVEISGVEDRFNASLGTYHDLLKIIKDKDFLDNEENEDILEDIVLTLTLFEDREMIEERLKTYAHLFDDKVMKQLKRRRYTGWGRLSRKLINGIRDKQSGKTILDFLKSDGFANRNFMQLIHDDSLTFKEDIQKAQVSGQGDSLHEHIANLAGSPAIKKGILQTVKVVDELVKVMGRHKPENIVIEMARENQTTQKGQKNSRERMKRIEEGIKELGSQILKEHPVENTQLQNEKLYLYYLQNGRDMYVDQELDINRLSDYDVDHIVPQSFLKDDSIDNKVLTRSDKARGKSDNVPSEEVVKKMKNYWRQLLNAKLITQRKFDNLTKAERGGLSELDKAGFIKRQLVETRQITKHVAQILDSRMNTKYDENDKLIREVKVITLKSKLVSDFRKDFQFYKVREINNYHHAHDAYLNAVVGTALIKKYPKLESEFVYGDYKVYDVRKMIAKSEQEIGKATAKYFFYSNIMNFFKTEITLANGEIRKRPLIETNGETGEIVWDKGRDFATVRKVLSMPQVNIVKKTEVQTGGFSKESILPKRNSDKLIARKKDWDPKKYGGFDSPTVAYSVLVVAKVEKGKSKKLKSVKELLGITIMERSSFEKNPIDFLEAKGYKEVKKDLIIKLPKYSLFELENGRKRMLASAGELQKGNELALPSKYVNFLYLASHYEKLKGSPEDNEQKQLFVEQHKHYLDEIIEQISEFSKRVILADANLDKVLSAYNKHRDKPIREQAENIIHLFTLTNLGAPAAFKYFDTTIDRKRYTSTKEVLDATLIHQSITGLYETRIDLSQLGGDGGGGSGSSEAAAKGGMDPLQLLQPLEAEIKGTKLKAHWNSGATITCVPQAFLEEEVPIKNIWIKTIHGEKEQPVYYLTFKIQGRKVEAEVISSPYDYILVSPSDIPWLMKKPLQLTTLVPLQEYEERLLKQTMLTGSYKEKLQSLFLKYDALWQHWENQVGHRRIKPHHIATGTVNPRPQKQYPINPKAKASIQTVINDLLKQGVLIQQNSIMNTPVYPVPKPDGKWRMVLDYREVNKTIPLIAAQNQHSAGILSSIFRGKYKTTLDLSNGFWAHSITPESYWLTAFTWLGQQYCWTRLPQGFLNSPALFNADVVDLLKEVPNVQVYVDDIYISHDDPREHLEQLEKVFSLLLNAGYVVSLKKSEIAQHEVEFLGFNITKEGRGLTETFKQKLLNITPPRDLKQLQSILGLLNFARNFIPNFSELVKPLYNIIATAPGKYITWTTDNSQQLQNIISMLNSAENLEERNPEVRLIMKVNTSPSAGYIRFYNEFAKRPIMYLNYVYTKAEVKFTNTEKLLTTIHKGLIKALDLGMGQEILVYSPIVSMTKIQKTPLPERKALPIRWITWMSYLEDPRIQFHYDKTLPELQQVPTVTDDIIAKIKHPSEFSMVFYTDGSAIKHPNVNKSHNAGMGIAQVQFKPEFTVINTWSIPLGDHTAQLAEVAAVEFACKKALKIDGPVLIVTDSFYVAESVNKELPYWQSNGFFNNKKKPLKHVSKWKSIADCIQLKPDIIIIHEKGHQPTASTFHTEGNNLADKLATQGSYVVNAGKRTADGSEFEKRTADGSEFESPKKKAKVE

SEQ ID NO: 615 - protein, 2185 aa, synthetic construct
MPAAKRVKLDGGDKKYSIGLDIGTNSVGWAVITDEYKVPSKKFKVLGNTDRHSIKKNLIGALLFDSGETAEATRLKRTARRRYTRRKNRICYLQEIFSNEMAKVDDSFFHRLEESFLVEEDKKHERHPIFGNIVDEVAYHEKYPTIYHLRKKLVDSTDKADLRLIYLALAHMIKFRGHFLIEGDLNPDNSDVDKLFIQLVQTYNQLFEENPINASGVDAKAILSARLSKSRRLENLIAQLPGEKKNGLFGNLIALSLGLTPNFKSNFDLAEDAKLQLSKDTYDDDLDNLLAQIGDQYADLFLAAKNLSDAILLSDILRVNTEITKAPLSASMIKRYDEHHQDLTLLKALVRQQLPEKYKEIFFDQSKNGYAGYIDGGASQEEFYKFIKPILEKMDGTEELLVKLNREDLLRKQRTFDNGSIPHQIHLGELHAILRRQEDFYPFLKDNREKIEKILTFRIPYYVGPLARGNSRFAWMTRKSEETITPWNFEEVVDKGASAQSFIERMTNFDKNLPNEKVLPKHSLLYEYFTVYNELTKVKYVTEGMRKPAFLSGEQKKAIVDLLFKTNRKVTVKQLKEDYFKKIECFDSVEISGVEDRFNASLGTYHDLLKIIKDKDFLDNEENEDILEDIVLTLTLFEDREMIEERLKTYAHLFDDKVMKQLKRRRYTGWGRLSRKLINGIRDKQSGKTILDFLKSDGFANRNFMQLIHDDSLTFKEDIQKAQVSGQGDSLHEHIANLAGSPAIKKGILQTVKVVDELVKVMGRHKPENIVIEMARENQTTQKGQKNSRERMKRIEEGIKELGSQILKEHPVENTQLQNEKLYLYYLQNGRDMYVDQELDINRLSDYDVDHIVPQSFLKDDSIDNKVLTRSDKARGKSDNVPSEEVVKKMKNYWRQLLNAKLITQRKFDNLTKAERGGLSELDKAGFIKRQLVETRQITKHVAQILDSRMNTKYDENDKLIREVKVITLKSKLVSDFRKDFQFYKVREINNYHHAHDAYLNAVVGTALIKKYPKLESEFVYGDYKVYDVRKMIAKSEQEIGKATAKYFFYSNIMNFFKTEITLANGEIRKRPLIETNGETGEIVWDKGRDFATVRKVLSMPQVNIVKKTEVQTGGFSKESILPKRNSDKLIARKKDWDPKKYGGFDSPTVAYSVLVVAKVEKGKSKKLKSVKELLGITIMERSSFEKNPIDFLEAKGYKEVKKDLIIKLPKYSLFELENGRKRMLASAGELQKGNELALPSKYVNFLYLASHYEKLKGSPEDNEQKQLFVEQHKHYLDEIIEQISEFSKRVILADANLDKVLSAYNKHRDKPIREQAENIIHLFTLTNLGAPAAFKYFDTTIDRKRYTSTKEVLDATLIHQSITGLYETRIDLSQLGGDGGGGGGSGGGGSGGGGSGGGGSGGMDPLQLLQPLEAEIKGTKLKAHWNSGATITCVPQAFLEEEVPIKNIWIKTIHGEKEQPVYYLTFKIQGRKVEAEVISSPYDYILVSPSDIPWLMKKPLQLTTLVPLQEYEERLLKQTMLTGSYKEKLQSLFLKYDALWQHWENQVGHRRIKPHHIATGTVNPRPQKQYPINPKAKASIQTVINDLLKQGVLIQQNSIMNTPVYPVPKPDGKWRMVLDYREVNKTIPLIAAQNQHSAGILSSIFRGKYKTTLDLSNGFWAHSITPESYWLTAFTWLGQQYCWTRLPQGFLNSPALFNADVVDLLKEVPNVQVYVDDIYISHDDPREHLEQLEKVFSLLLNAGYVVSLKKSEIAQHEVEFLGFNITKEGRGLTETFKQKLLNITPPRDLKQLQSILGLLNFARNFIPNFSELVKPLYNIIATAPGKYITWTTDNSQQLQNIISMLNSAENLEERNPEVRLIMKVNTSPSAGYIRFYNEFAKRPIMYLNYVYTKAEVKFTNTEKLLTTIHKGLIKALDLGMGQEILVYSPIVSMTKIQKTPLPERKALPIRWITWMSYLEDPRIQFHYDKTLPELQQVPTVTDDIIAKIKHPSEFSMVFYTDGSAIKHPNVNKSHNAGMGIAQVQFKPEFTVINTWSIPLGDHTAQLAEVAAVEFACKKALKIDGPVLIVTDSFYVAESVNKELPYWQSNGFFNNKKKPLKHVSKWKSIADCIQLKPDIIIIHEKGHQPTASTFHTEGNNLADKLATQGSYVVNAGKRTADGSEFEKRTADGSEFESPKKKAKVE

SEQ ID NO: 616 - protein, 2176 aa, synthetic construct
MPAAKRVKLDGGDKKYSIGLDIGTNSVGWAVITDEYKVPSKKFKVLGNTDRHSIKKNLIGALLFDSGETAEATRLKRTARRRYTRRKNRICYLQEIFSNEMAKVDDSFFHRLEESFLVEEDKKHERHPIFGNIVDEVAYHEKYPTIYHLRKKLVDSTDKADLRLIYLALAHMIKFRGHFLIEGDLNPDNSDVDKLFIQLVQTYNQLFEENPINASGVDAKAILSARLSKSRRLENLIAQLPGEKKNGLFGNLIALSLGLTPNFKSNFDLAEDAKLQLSKDTYDDDLDNLLAQIGDQYADLFLAAKNLSDAILLSDILRVNTEITKAPLSASMIKRYDEHHQDLTLLKALVRQQLPEKYKEIFFDQSKNGYAGYIDGGASQEEFYKFIKPILEKMDGTEELLVKLNREDLLRKQRTFDNGSIPHQIHLGELHAILRRQEDFYPFLKDNREKIEKILTFRIPYYVGPLARGNSRFAWMTRKSEETITPWNFEEVVDKGASAQSFIERMTNFDKNLPNEKVLPKHSLLYEYFTVYNELTKVKYVTEGMRKPAFLSGEQKKAIVDLLFKTNRKVTVKQLKEDYFKKIECFDSVEISGVEDRFNASLGTYHDLLKIIKDKDFLDNEENEDILEDIVLTLTLFEDREMIEERLKTYAHLFDDKVMKQLKRRRYTGWGRLSRKLINGIRDKQSGKTILDFLKSDGFANRNFMQLIHDDSLTFKEDIQKAQVSGQGDSLHEHIANLAGSPAIKKGILQTVKVVDELVKVMGRHKPENIVIEMARENQTTQKGQKNSRERMKRIEEGIKELGSQILKEHPVENTQLQNEKLYLYYLQNGRDMYVDQELDINRLSDYDVDHIVPQSFLKDDSIDNKVLTRSDKARGKSDNVPSEEVVKKMKNYWRQLLNAKLITQRKFDNLTKAERGGLSELDKAGFIKRQLVETRQITKHVAQILDSRMNTKYDENDKLIREVKVITLKSKLVSDFRKDFQFYKVREINNYHHAHDAYLNAVVGTALIKKYPKLESEFVYGDYKVYDVRKMIAKSEQEIGKATAKYFFYSNIMNFFKTEITLANGEIRKRPLIETNGETGEIVWDKGRDFATVRKVLSMPQVNIVKKTEVQTGGFSKESILPKRNSDKLIARKKDWDPKKYGGFDSPTVAYSVLVVAKVEKGKSKKLKSVKELLGITIMERSSFEKNPIDFLEAKGYKEVKKDLIIKLPKYSLFELENGRKRMLASAGELQKGNELALPSKYVNFLYLASHYEKLKGSPEDNEQKQLFVEQHKHYLDEIIEQISEFSKRVILADANLDKVLSAYNKHRDKPIREQAENIIHLFTLTNLGAPAAFKYFDTTIDRKRYTSTKEVLDATLIHQSITGLYETRIDLSQLGGDGGPAPEAAAKGGGGGMDPLQLLQPLEAEIKGTKLKAHWNSGATITCVPQAFLEEEVPIKNIWIKTIHGEKEQPVYYLTFKIQGRKVEAEVISSPYDYILVSPSDIPWLMKKPLQLTTLVPLQEYEERLLKQTMLTGSYKEKLQSLFLKYDALWQHWENQVGHRRIKPHHIATGTVNPRPQKQYPINPKAKASIQTVINDLLKQGVLIQQNSIMNTPVYPVPKPDGKWRMVLDYREVNKTIPLIAAQNQHSAGILSSIFRGKYKTTLDLSNGFWAHSITPESYWLTAFTWLGQQYCWTRLPQGFLNSPALFNADVVDLLKEVPNVQVYVDDIYISHDDPREHLEQLEKVFSLLLNAGYVVSLKKSEIAQHEVEFLGFNITKEGRGLTETFKQKLLNITPPRDLKQLQSILGLLNFARNFIPNFSELVKPLYNIIATAPGKYITWTTDNSQQLQNIISMLNSAENLEERNPEVRLIMKVNTSPSAGYIRFYNEFAKRPIMYLNYVYTKAEVKFTNTEKLLTTIHKGLIKALDLGMGQEILVYSPIVSMTKIQKTPLPERKALPIRWITWMSYLEDPRIQFHYDKTLPELQQVPTVTDDIIAKIKHPSEFSMVFYTDGSAIKHPNVNKSHNAGMGIAQVQFKPEFTVINTWSIPLGDHTAQLAEVAAVEFACKKALKIDGPVLIVTDSFYVAESVNKELPYWQSNGFFNNKKKPLKHVSKWKSIADCIQLKPDIIIIHEKGHQPTASTFHTEGNNLADKLATQGSYVVNAGKRTADGSEFEKRTADGSEFESPKKKAKVE

SEQ ID NO: 617 - protein, 2174 aa, synthetic construct
MPAAKRVKLDGGDKKYSIGLDIGTNSVGWAVITDEYKVPSKKFKVLGNTDRHSIKKNLIGALLFDSGETAEATRLKRTARRRYTRRKNRICYLQEIFSNEMAKVDDSFFHRLEESFLVEEDKKHERHPIFGNIVDEVAYHEKYPTIYHLRKKLVDSTDKADLRLIYLALAHMIKFRGHFLIEGDLNPDNSDVDKLFIQLVQTYNQLFEENPINASGVDAKAILSARLSKSRRLENLIAQLPGEKKNGLFGNLIALSLGLTPNFKSNFDLAEDAKLQLSKDTYDDDLDNLLAQIGDQYADLFLAAKNLSDAILLSDILRVNTEITKAPLSASMIKRYDEHHQDLTLLKALVRQQLPEKYKEIFFDQSKNGYAGYIDGGASQEEFYKFIKPILEKMDGTEELLVKLNREDLLRKQRTFDNGSIPHQIHLGELHAILRRQEDFYPFLKDNREKIEKILTFRIPYYVGPLARGNSRFAWMTRKSEETITPWNFEEVVDKGASAQSFIERMTNFDKNLPNEKVLPKHSLLYEYFTVYNELTKVKYVTEGMRKPAFLSGEQKKAIVDLLFKTNRKVTVKQLKEDYFKKIECFDSVEISGVEDRFNASLGTYHDLLKIIKDKDFLDNEENEDILEDIVLTLTLFEDREMIEERLKTYAHLFDDKVMKQLKRRRYTGWGRLSRKLINGIRDKQSGKTILDFLKSDGFANRNFMQLIHDDSLTFKEDIQKAQVSGQGDSLHEHIANLAGSPAIKKGILQTVKVVDELVKVMGRHKPENIVIEMARENQTTQKGQKNSRERMKRIEEGIKELGSQILKEHPVENTQLQNEKLYLYYLQNGRDMYVDQELDINRLSDYDVDHIVPQSFLKDDSIDNKVLTRSDKARGKSDNVPSEEVVKKMKNYWRQLLNAKLITQRKFDNLTKAERGGLSELDKAGFIKRQLVETRQITKHVAQILDSRMNTKYDENDKLIREVKVITLKSKLVSDFRKDFQFYKVREINNYHHAHDAYLNAVVGTALIKKYPKLESEFVYGDYKVYDVRKMIAKSEQEIGKATAKYFFYSNIMNFFKTEITLANGEIRKRPLIETNGETGEIVWDKGRDFATVRKVLSMPQVNIVKKTEVQTGGFSKESILPKRNSDKLIARKKDWDPKKYGGFDSPTVAYSVLVVAKVEKGKSKKLKSVKELLGITIMERSSFEKNPIDFLEAKGYKEVKKDLIIKLPKYSLFELENGRKRMLASAGELQKGNELALPSKYVNFLYLASHYEKLKGSPEDNEQKQLFVEQHKHYLDEIIEQISEFSKRVILADANLDKVLSAYNKHRDKPIREQAENIIHLFTLTNLGAPAAFKYFDTTIDRKRYTSTKEVLDATLIHQSITGLYETRIDLSQLGGDGGPAPGSSGGGGGMDPLQLLQPLEAEIKGTKLKAHWNSGATITCVPQAFLEEEVPIKNIWIKTIHGEKEQPVYYLTFKIQGRKVEAEVISSPYDYILVSPSDIPWLMKKPLQLTTLVPLQEYEERLLKQTMLTGSYKEKLQSLFLKYDALWQHWENQVGHRRIKPHHIATGTVNPRPQKQYPINPKAKASIQTVINDLLKQGVLIQQNSIMNTPVYPVPKPDGKWRMVLDYREVNKTIPLIAAQNQHSAGILSSIFRGKYKTTLDLSNGFWAHSITPESYWLTAFTWLGQQYCWTRLPQGFLNSPALFNADVVDLLKEVPNVQVYVDDIYISHDDPREHLEQLEKVFSLLLNAGYVVSLKKSEIAQHEVEFLGFNITKEGRGLTETFKQKLLNITPPRDLKQLQSILGLLNFARNFIPNFSELVKPLYNIIATAPGKYITWTTDNSQQLQNIISMLNSAENLEERNPEVRLIMKVNTSPSAGYIRFYNEFAKRPIMYLNYVYTKAEVKFTNTEKLLTTIHKGLIKALDLGMGQEILVYSPIVSMTKIQKTPLPERKALPIRWITWMSYLEDPRIQFHYDKTLPELQQVPTVTDDIIAKIKHPSEFSMVFYTDGSAIKHPNVNKSHNAGMGIAQVQFKPEFTVINTWSIPLGDHTAQLAEVAAVEFACKKALKIDGPVLIVTDSFYVAESVNKELPYWQSNGFFNNKKKPLKHVSKWKSIADCIQLKPDIIIIHEKGHQPTASTFHTEGNNLADKLATQGSYVVNAGKRTADGSEFEKRTADGSEFESPKKKAKVE

SEQ ID NO: 618 - protein, 2174 aa, synthetic construct
MPAAKRVKLDGGDKKYSIGLDIGTNSVGWAVITDEYKVPSKKFKVLGNTDRHSIKKNLIGALLFDSGETAEATRLKRTARRRYTRRKNRICYLQEIFSNEMAKVDDSFFHRLEESFLVEEDKKHERHPIFGNIVDEVAYHEKYPTIYHLRKKLVDSTDKADLRLIYLALAHMIKFRGHFLIEGDLNPDNSDVDKLFIQLVQTYNQLFEENPINASGVDAKAILSARLSKSRRLENLIAQLPGEKKNGLFGNLIALSLGLTPNFKSNFDLAEDAKLQLSKDTYDDDLDNLLAQIGDQYADLFLAAKNLSDAILLSDILRVNTEITKAPLSASMIKRYDEHHQDLTLLKALVRQQLPEKYKEIFFDQSKNGYAGYIDGGASQEEFYKFIKPILEKMDGTEELLVKLNREDLLRKQRTFDNGSIPHQIHLGELHAILRRQEDFYPFLKDNREKIEKILTFRIPYYVGPLARGNSRFAWMTRKSEETITPWNFEEVVDKGASAQSFIERMTNFDKNLPNEKVLPKHSLLYEYFTVYNELTKVKYVTEGMRKPAFLSGEQKKAIVDLLFKTNRKVTVKQLKEDYFKKIECFDSVEISGVEDRFNASLGTYHDLLKIIKDKDFLDNEENEDILEDIVLTLTLFEDREMIEERLKTYAHLFDDKVMKQLKRRRYTGWGRLSRKLINGIRDKQSGKTILDFLKSDGFANRNFMQLIHDDSLTFKEDIQKAQVSGQGDSLHEHIANLAGSPAIKKGILQTVKVVDELVKVMGRHKPENIVIEMARENQTTQKGQKNSRERMKRIEEGIKELGSQILKEHPVENTQLQNEKLYLYYLQNGRDMYVDQELDINRLSDYDVDHIVPQSFLKDDSIDNKVLTRSDKARGKSDNVPSEEVVKKMKNYWRQLLNAKLITQRKFDNLTKAERGGLSELDKAGFIKRQLVETRQITKHVAQILDSRMNTKYDENDKLIREVKVITLKSKLVSDFRKDFQFYKVREINNYHHAHDAYLNAVVGTALIKKYPKLESEFVYGDYKVYDVRKMIAKSEQEIGKATAKYFFYSNIMNFFKTEITLANGEIRKRPLIETNGETGEIVWDKGRDFATVRKVLSMPQVNIVKKTEVQTGGFSKESILPKRNSDKLIARKKDWDPKKYGGFDSPTVAYSVLVVAKVEKGKSKKLKSVKELLGITIMERSSFEKNPIDFLEAKGYKEVKKDLIIKLPKYSLFELENGRKRMLASAGELQKGNELALPSKYVNFLYLASHYEKLKGSPEDNEQKQLFVEQHKHYLDEIIEQISEFSKRVILADANLDKVLSAYNKHRDKPIREQAENIIHLFTLTNLGAPAAFKYFDTTIDRKRYTSTKEVLDATLIHQSITGLYETRIDLSQLGGDGGPAPGGSGGGGGMDPLQLLQPLEAEIKGTKLKAHWNSGATITCVPQAFLEEEVPIKNIWIKTIHGEKEQPVYYLTFKIQGRKVEAEVISSPYDYILVSPSDIPWLMKKPLQLTTLVPLQEYEERLLKQTMLTGSYKEKLQSLFLKYDALWQHWENQVGHRRIKPHHIATGTVNPRPQKQYPINPKAKASIQTVINDLLKQGVLIQQNSIMNTPVYPVPKPDGKWRMVLDYREVNKTIPLIAAQNQHSAGILSSIFRGKYKTTLDLSNGFWAHSITPESYWLTAFTWLGQQYCWTRLPQGFLNSPALFNADVVDLLKEVPNVQVYVDDIYISHDDPREHLEQLEKVFSLLLNAGYVVSLKKSEIAQHEVEFLGFNITKEGRGLTETFKQKLLNITPPRDLKQLQSILGLLNFARNFIPNFSELVKPLYNIIATAPGKYITWTTDNSQQLQNIISMLNSAENLEERNPEVRLIMKVNTSPSAGYIRFYNEFAKRPIMYLNYVYTKAEVKFTNTEKLLTTIHKGLIKALDLGMGQEILVYSPIVSMTKIQKTPLPERKALPIRWITWMSYLEDPRIQFHYDKTLPELQQVPTVTDDIIAKIKHPSEFSMVFYTDGSAIKHPNVNKSHNAGMGIAQVQFKPEFTVINTWSIPLGDHTAQLAEVAAVEFACKKALKIDGPVLIVTDSFYVAESVNKELPYWQSNGFFNNKKKPLKHVSKWKSIADCIQLKPDIIIIHEKGHQPTASTFHTEGNNLADKLATQGSYVVNAGKRTADGSEFEKRTADGSEFESPKKKAKVE

SEQ ID NO: 619 - protein, 2173 aa, synthetic construct
MPAAKRVKLDGGDKKYSIGLDIGTNSVGWAVITDEYKVPSKKFKVLGNTDRHSIKKNLIGALLFDSGETAEATRLKRTARRRYTRRKNRICYLQEIFSNEMAKVDDSFFHRLEESFLVEEDKKHERHPIFGNIVDEVAYHEKYPTIYHLRKKLVDSTDKADLRLIYLALAHMIKFRGHFLIEGDLNPDNSDVDKLFIQLVQTYNQLFEENPINASGVDAKAILSARLSKSRRLENLIAQLPGEKKNGLFGNLIALSLGLTPNFKSNFDLAEDAKLQLSKDTYDDDLDNLLAQIGDQYADLFLAAKNLSDAILLSDILRVNTEITKAPLSASMIKRYDEHHQDLTLLKALVRQQLPEKYKEIFFDQSKNGYAGYIDGGASQEEFYKFIKPILEKMDGTEELLVKLNREDLLRKQRTFDNGSIPHQIHLGELHAILRRQEDFYPFLKDNREKIEKILTFRIPYYVGPLARGNSRFAWMTRKSEETITPWNFEEVVDKGASAQSFIERMTNFDKNLPNEKVLPKHSLLYEYFTVYNELTKVKYVTEGMRKPAFLSGEQKKAIVDLLFKTNRKVTVKQLKEDYFKKIECFDSVEISGVEDRFNASLGTYHDLLKIIKDKDFLDNEENEDILEDIVLTLTLFEDREMIEERLKTYAHLFDDKVMKQLKRRRYTGWGRLSRKLINGIRDKQSGKTILDFLKSDGFANRNFMQLIHDDSLTFKEDIQKAQVSGQGDSLHEHIANLAGSPAIKKGILQTVKVVDELVKVMGRHKPENIVIEMARENQTTQKGQKNSRERMKRIEEGIKELGSQILKEHPVENTQLQNEKLYLYYLQNGRDMYVDQELDINRLSDYDVDHIVPQSFLKDDSIDNKVLTRSDKARGKSDNVPSEEVVKKMKNYWRQLLNAKLITQRKFDNLTKAERGGLSELDKAGFIKRQLVETRQITKHVAQILDSRMNTKYDENDKLIREVKVITLKSKLVSDFRKDFQFYKVREINNYHHAHDAYLNAVVGTALIKKYPKLESEFVYGDYKVYDVRKMIAKSEQEIGKATAKYFFYSNIMNFFKTEITLANGEIRKRPLIETNGETGEIVWDKGRDFATVRKVLSMPQVNIVKKTEVQTGGFSKESILPKRNSDKLIARKKDWDPKKYGGFDSPTVAYSVLVVAKVEKGKSKKLKSVKELLGITIMERSSFEKNPIDFLEAKGYKEVKKDLIIKLPKYSLFELENGRKRMLASAGELQKGNELALPSKYVNFLYLASHYEKLKGSPEDNEQKQLFVEQHKHYLDEIIEQISEFSKRVILADANLDKVLSAYNKHRDKPIREQAENIIHLFTLTNLGAPAAFKYFDTTIDRKRYTSTKEVLDATLIHQSITGLYETRIDLSQLGGDGGEAAAKPAPGGMDPLQLLQPLEAEIKGTKLKAHWNSGATITCVPQAFLEEEVPIKNIWIKTIHGEKEQPVYYLTFKIQGRKVEAEVISSPYDYILVSPSDIPWLMKKPLQLTTLVPLQEYEERLLKQTMLTGSYKEKLQSLFLKYDALWQHWENQVGHRRIKPHHIATGTVNPRPQKQYPINPKAKASIQTVINDLLKQGVLIQQNSIMNTPVYPVPKPDGKWRMVLDYREVNKTIPLIAAQNQHSAGILSSIFRGKYKTTLDLSNGFWAHSITPESYWLTAFTWLGQQYCWTRLPQGFLNSPALFNADVVDLLKEVPNVQVYVDDIYISHDDPREHLEQLEKVFSLLLNAGYVVSLKKSEIAQHEVEFLGFNITKEGRGLTETFKQKLLNITPPRDLKQLQSILGLLNFARNFIPNFSELVKPLYNIIATAPGKYITWTTDNSQQLQNIISMLNSAENLEERNPEVRLIMKVNTSPSAGYIRFYNEFAKRPIMYLNYVYTKAEVKFTNTEKLLTTIHKGLIKALDLGMGQEILVYSPIVSMTKIQKTPLPERKALPIRWITWMSYLEDPRIQFHYDKTLPELQQVPTVTDDIIAKIKHPSEFSMVFYTDGSAIKHPNVNKSHNAGMGIAQVQFKPEFTVINTWSIPLGDHTAQLAEVAAVEFACKKALKIDGPVLIVTDSFYVAESVNKELPYWQSNGFFNNKKKPLKHVSKWKSIADCIQLKPDIIIIHEKGHQPTASTFHTEGNNLADKLATQGSYVVNAGKRTADGSEFEKRTADGSEFESPKKKAKVE

SEQ ID NO: 620 - protein, 2176 aa, synthetic construct
MPAAKRVKLDGGDKKYSIGLDIGTNSVGWAVITDEYKVPSKKFKVLGNTDRHSIKKNLIGALLFDSGETAEATRLKRTARRRYTRRKNRICYLQEIFSNEMAKVDDSFFHRLEESFLVEEDKKHERHPIFGNIVDEVAYHEKYPTIYHLRKKLVDSTDKADLRLIYLALAHMIKFRGHFLIEGDLNPDNSDVDKLFIQLVQTYNQLFEENPINASGVDAKAILSARLSKSRRLENLIAQLPGEKKNGLFGNLIALSLGLTPNFKSNFDLAEDAKLQLSKDTYDDDLDNLLAQIGDQYADLFLAAKNLSDAILLSDILRVNTEITKAPLSASMIKRYDEHHQDLTLLKALVRQQLPEKYKEIFFDQSKNGYAGYIDGGASQEEFYKFIKPILEKMDGTEELLVKLNREDLLRKQRTFDNGSIPHQIHLGELHAILRRQEDFYPFLKDNREKIEKILTFRIPYYVGPLARGNSRFAWMTRKSEETITPWNFEEVVDKGASAQSFIERMTNFDKNLPNEKVLPKHSLLYEYFTVYNELTKVKYVTEGMRKPAFLSGEQKKAIVDLLFKTNRKVTVKQLKEDYFKKIECFDSVEISGVEDRFNASLGTYHDLLKIIKDKDFLDNEENEDILEDIVLTLTLFEDREMIEERLKTYAHLFDDKVMKQLKRRRYTGWGRLSRKLINGIRDKQSGKTILDFLKSDGFANRNFMQLIHDDSLTFKEDIQKAQVSGQGDSLHEHIANLAGSPAIKKGILQTVKVVDELVKVMGRHKPENIVIEMARENQTTQKGQKNSRERMKRIEEGIKELGSQILKEHPVENTQLQNEKLYLYYLQNGRDMYVDQELDINRLSDYDVDHIVPQSFLKDDSIDNKVLTRSDKARGKSDNVPSEEVVKKMKNYWRQLLNAKLITQRKFDNLTKAERGGLSELDKAGFIKRQLVETRQITKHVAQILDSRMNTKYDENDKLIREVKVITLKSKLVSDFRKDFQFYKVREINNYHHAHDAYLNAVVGTALIKKYPKLESEFVYGDYKVYDVRKMIAKSEQEIGKATAKYFFYSNIMNFFKTEITLANGEIRKRPLIETNGETGEIVWDKGRDFATVRKVLSMPQVNIVKKTEVQTGGFSKESILPKRNSDKLIARKKDWDPKKYGGFDSPTVAYSVLVVAKVEKGKSKKLKSVKELLGITIMERSSFEKNPIDFLEAKGYKEVKKDLIIKLPKYSLFELENGRKRMLASAGELQKGNELALPSKYVNFLYLASHYEKLKGSPEDNEQKQLFVEQHKHYLDEIIEQISEFSKRVILADANLDKVLSAYNKHRDKPIREQAENIIHLFTLTNLGAPAAFKYFDTTIDRKRYTSTKEVLDATLIHQSITGLYETRIDLSQLGGDGGGGGEAAAKGSSGGMDPLQLLQPLEAEIKGTKLKAHWNSGATITCVPQAFLEEEVPIKNIWIKTIHGEKEQPVYYLTFKIQGRKVEAEVISSPYDYILVSPSDIPWLMKKPLQLTTLVPLQEYEERLLKQTMLTGSYKEKLQSLFLKYDALWQHWENQVGHRRIKPHHIATGTVNPRPQKQYPINPKAKASIQTVINDLLKQGVLIQQNSIMNTPVYPVPKPDGKWRMVLDYREVNKTIPLIAAQNQHSAGILSSIFRGKYKTTLDLSNGFWAHSITPESYWLTAFTWLGQQYCWTRLPQGFLNSPALFNADVVDLLKEVPNVQVYVDDIYISHDDPREHLEQLEKVFSLLLNAGYVVSLKKSEIAQHEVEFLGFNITKEGRGLTETFKQKLLNITPPRDLKQLQSILGLLNFARNFIPNFSELVKPLYNIIATAPGKYITWTTDNSQQLQNIISMLNSAENLEERNPEVRLIMKVNTSPSAGYIRFYNEFAKRPIMYLNYVYTKAEVKFTNTEKLLTTIHKGLIKALDLGMGQEILVYSPIVSMTKIQKTPLPERKALPIRWITWMSYLEDPRIQFHYDKTLPELQQVPTVTDDIIAKIKHPSEFSMVFYTDGSAIKHPNVNKSHNAGMGIAQVQFKPEFTVINTWSIPLGDHTAQLAEVAAVEFACKKALKIDGPVLIVTDSFYVAESVNKELPYWQSNGFFNNKKKPLKHVSKWKSIADCIQLKPDIIIIHEKGHQPTASTFHTEGNNLADKLATQGSYVVNAGKRTADGSEFEKRTADGSEFESPKKKAKVE

SEQ ID NO: 621 - protein, 2176 aa, synthetic construct
MPAAKRVKLDGGDKKYSIGLDIGTNSVGWAVITDEYKVPSKKFKVLGNTDRHSIKKNLIGALLFDSGETAEATRLKRTARRRYTRRKNRICYLQEIFSNEMAKVDDSFFHRLEESFLVEEDKKHERHPIFGNIVDEVAYHEKYPTIYHLRKKLVDSTDKADLRLIYLALAHMIKFRGHFLIEGDLNPDNSDVDKLFIQLVQTYNQLFEENPINASGVDAKAILSARLSKSRRLENLIAQLPGEKKNGLFGNLIALSLGLTPNFKSNFDLAEDAKLQLSKDTYDDDLDNLLAQIGDQYADLFLAAKNLSDAILLSDILRVNTEITKAPLSASMIKRYDEHHQDLTLLKALVRQQLPEKYKEIFFDQSKNGYAGYIDGGASQEEFYKFIKPILEKMDGTEELLVKLNREDLLRKQRTFDNGSIPHQIHLGELHAILRRQEDFYPFLKDNREKIEKILTFRIPYYVGPLARGNSRFAWMTRKSEETITPWNFEEVVDKGASAQSFIERMTNFDKNLPNEKVLPKHSLLYEYFTVYNELTKVKYVTEGMRKPAFLSGEQKKAIVDLLFKTNRKVTVKQLKEDYFKKIECFDSVEISGVEDRFNASLGTYHDLLKIIKDKDFLDNEENEDILEDIVLTLTLFEDREMIEERLKTYAHLFDDKVMKQLKRRRYTGWGRLSRKLINGIRDKQSGKTILDFLKSDGFANRNFMQLIHDDSLTFKEDIQKAQVSGQGDSLHEHIANLAGSPAIKKGILQTVKVVDELVKVMGRHKPENIVIEMARENQTTQKGQKNSRERMKRIEEGIKELGSQILKEHPVENTQLQNEKLYLYYLQNGRDMYVDQELDINRLSDYDVDHIVPQSFLKDDSIDNKVLTRSDKARGKSDNVPSEEVVKKMKNYWRQLLNAKLITQRKFDNLTKAERGGLSELDKAGFIKRQLVETRQITKHVAQILDSRMNTKYDENDKLIREVKVITLKSKLVSDFRKDFQFYKVREINNYHHAHDAYLNAVVGTALIKKYPKLESEFVYGDYKVYDVRKMIAKSEQEIGKATAKYFFYSNIMNFFKTEITLANGEIRKRPLIETNGETGEIVWDKGRDFATVRKVLSMPQVNIVKKTEVQTGGFSKESILPKRNSDKLIARKKDWDPKKYGGFDSPTVAYSVLVVAKVEKGKSKKLKSVKELLGITIMERSSFEKNPIDFLEAKGYKEVKKDLIIKLPKYSLFELENGRKRMLASAGELQKGNELALPSKYVNFLYLASHYEKLKGSPEDNEQKQLFVEQHKHYLDEIIEQISEFSKRVILADANLDKVLSAYNKHRDKPIREQAENIIHLFTLTNLGAPAAFKYFDTTIDRKRYTSTKEVLDATLIHQSITGLYETRIDLSQLGGDGGGGGEAAAKPAPGGMDPLQLLQPLEAEIKGTKLKAHWNSGATITCVPQAFLEEEVPIKNIWIKTIHGEKEQPVYYLTFKIQGRKVEAEVISSPYDYILVSPSDIPWLMKKPLQLTTLVPLQEYEERLLKQTMLTGSYKEKLQSLFLKYDALWQHWENQVGHRRIKPHHIATGTVNPRPQKQYPINPKAKASIQTVINDLLKQGVLIQQNSIMNTPVYPVPKPDGKWRMVLDYREVNKTIPLIAAQNQHSAGILSSIFRGKYKTTLDLSNGFWAHSITPESYWLTAFTWLGQQYCWTRLPQGFLNSPALFNADVVDLLKEVPNVQVYVDDIYISHDDPREHLEQLEKVFSLLLNAGYVVSLKKSEIAQHEVEFLGFNITKEGRGLTETFKQKLLNITPPRDLKQLQSILGLLNFARNFIPNFSELVKPLYNIIATAPGKYITWTTDNSQQLQNIISMLNSAENLEERNPEVRLIMKVNTSPSAGYIRFYNEFAKRPIMYLNYVYTKAEVKFTNTEKLLTTIHKGLIKALDLGMGQEILVYSPIVSMTKIQKTPLPERKALPIRWITWMSYLEDPRIQFHYDKTLPELQQVPTVTDDIIAKIKHPSEFSMVFYTDGSAIKHPNVNKSHNAGMGIAQVQFKPEFTVINTWSIPLGDHTAQLAEVAAVEFACKKALKIDGPVLIVTDSFYVAESVNKELPYWQSNGFFNNKKKPLKHVSKWKSIADCIQLKPDIIIIHEKGHQPTASTFHTEGNNLADKLATQGSYVVNAGKRTADGSEFEKRTADGSEFESPKKKAKVE

SEQ ID NO: 622 - protein, 2176 aa, synthetic construct
MPAAKRVKLDGGDKKYSIGLDIGTNSVGWAVITDEYKVPSKKFKVLGNTDRHSIKKNLIGALLFDSGETAEATRLKRTARRRYTRRKNRICYLQEIFSNEMAKVDDSFFHRLEESFLVEEDKKHERHPIFGNIVDEVAYHEKYPTIYHLRKKLVDSTDKADLRLIYLALAHMIKFRGHFLIEGDLNPDNSDVDKLFIQLVQTYNQLFEENPINASGVDAKAILSARLSKSRRLENLIAQLPGEKKNGLFGNLIALSLGLTPNFKSNFDLAEDAKLQLSKDTYDDDLDNLLAQIGDQYADLFLAAKNLSDAILLSDILRVNTEITKAPLSASMIKRYDEHHQDLTLLKALVRQQLPEKYKEIFFDQSKNGYAGYIDGGASQEEFYKFIKPILEKMDGTEELLVKLNREDLLRKQRTFDNGSIPHQIHLGELHAILRRQEDFYPFLKDNREKIEKILTFRIPYYVGPLARGNSRFAWMTRKSEETITPWNFEEVVDKGASAQSFIERMTNFDKNLPNEKVLPKHSLLYEYFTVYNELTKVKYVTEGMRKPAFLSGEQKKAIVDLLFKTNRKVTVKQLKEDYFKKIECFDSVEISGVEDRFNASLGTYHDLLKIIKDKDFLDNEENEDILEDIVLTLTLFEDREMIEERLKTYAHLFDDKVMKQLKRRRYTGWGRLSRKLINGIRDKQSGKTILDFLKSDGFANRNFMQLIHDDSLTFKEDIQKAQVSGQGDSLHEHIANLAGSPAIKKGILQTVKVVDELVKVMGRHKPENIVIEMARENQTTQKGQKNSRERMKRIEEGIKELGSQILKEHPVENTQLQNEKLYLYYLQNGRDMYVDQELDINRLSDYDVDHIVPQSFLKDDSIDNKVLTRSDKARGKSDNVPSEEVVKKMKNYWRQLLNAKLITQRKFDNLTKAERGGLSELDKAGFIKRQLVETRQITKHVAQILDSRMNTKYDENDKLIREVKVITLKSKLVSDFRKDFQFYKVREINNYHHAHDAYLNAVVGTALIKKYPKLESEFVYGDYKVYDVRKMIAKSEQEIGKATAKYFFYSNIMNFFKTEITLANGEIRKRPLIETNGETGEIVWDKGRDFATVRKVLSMPQVNIVKKTEVQTGGFSKESILPKRNSDKLIARKKDWDPKKYGGFDSPTVAYSVLVVAKVEKGKSKKLKSVKELLGITIMERSSFEKNPIDFLEAKGYKEVKKDLIIKLPKYSLFELENGRKRMLASAGELQKGNELALPSKYVNFLYLASHYEKLKGSPEDNEQKQLFVEQHKHYLDEIIEQISEFSKRVILADANLDKVLSAYNKHRDKPIREQAENIIHLFTLTNLGAPAAFKYFDTTIDRKRYTSTKEVLDATLIHQSITGLYETRIDLSQLGGDGGPAPGGGEAAAKGGMDPLQLLQPLEAEIKGTKLKAHWNSGATITCVPQAFLEEEVPIKNIWIKTIHGEKEQPVYYLTFKIQGRKVEAEVISSPYDYILVSPSDIPWLMKKPLQLTTLVPLQEYEERLLKQTMLTGSYKEKLQSLFLKYDALWQHWENQVGHRRIKPHHIATGTVNPRPQKQYPINPKAKASIQTVINDLLKQGVLIQQNSIMNTPVYPVPKPDGKWRMVLDYREVNKTIPLIAAQNQHSAGILSSIFRGKYKTTLDLSNGFWAHSITPESYWLTAFTWLGQQYCWTRLPQGFLNSPALFNADVVDLLKEVPNVQVYVDDIYISHDDPREHLEQLEKVFSLLLNAGYVVSLKKSEIAQHEVEFLGFNITKEGRGLTETFKQKLLNITPPRDLKQLQSILGLLNFARNFIPNFSELVKPLYNIIATAPGKYITWTTDNSQQLQNIISMLNSAENLEERNPEVRLIMKVNTSPSAGYIRFYNEFAKRPIMYLNYVYTKAEVKFTNTEKLLTTIHKGLIKALDLGMGQEILVYSPIVSMTKIQKTPLPERKALPIRWITWMSYLEDPRIQFHYDKTLPELQQVPTVTDDIIAKIKHPSEFSMVFYTDGSAIKHPNVNKSHNAGMGIAQVQFKPEFTVINTWSIPLGDHTAQLAEVAAVEFACKKALKIDGPVLIVTDSFYVAESVNKELPYWQSNGFFNNKKKPLKHVSKWKSIADCIQLKPDIIIIHEKGHQPTASTFHTEGNNLADKLATQGSYVVNAGKRTADGSEFEKRTADGSEFESPKKKAKVE

SEQ ID NO: 623 - protein, 2168 aa, synthetic construct
MPAAKRVKLDGGDKKYSIGLDIGTNSVGWAVITDEYKVPSKKFKVLGNTDRHSIKKNLIGALLFDSGETAEATRLKRTARRRYTRRKNRICYLQEIFSNEMAKVDDSFFHRLEESFLVEEDKKHERHPIFGNIVDEVAYHEKYPTIYHLRKKLVDSTDKADLRLIYLALAHMIKFRGHFLIEGDLNPDNSDVDKLFIQLVQTYNQLFEENPINASGVDAKAILSARLSKSRRLENLIAQLPGEKKNGLFGNLIALSLGLTPNFKSNFDLAEDAKLQLSKDTYDDDLDNLLAQIGDQYADLFLAAKNLSDAILLSDILRVNTEITKAPLSASMIKRYDEHHQDLTLLKALVRQQLPEKYKEIFFDQSKNGYAGYIDGGASQEEFYKFIKPILEKMDGTEELLVKLNREDLLRKQRTFDNGSIPHQIHLGELHAILRRQEDFYPFLKDNREKIEKILTFRIPYYVGPLARGNSRFAWMTRKSEETITPWNFEEVVDKGASAQSFIERMTNFDKNLPNEKVLPKHSLLYEYFTVYNELTKVKYVTEGMRKPAFLSGEQKKAIVDLLFKTNRKVTVKQLKEDYFKKIECFDSVEISGVEDRFNASLGTYHDLLKIIKDKDFLDNEENEDILEDIVLTLTLFEDREMIEERLKTYAHLFDDKVMKQLKRRRYTGWGRLSRKLINGIRDKQSGKTILDFLKSDGFANRNFMQLIHDDSLTFKEDIQKAQVSGQGDSLHEHIANLAGSPAIKKGILQTVKVVDELVKVMGRHKPENIVIEMARENQTTQKGQKNSRERMKRIEEGIKELGSQILKEHPVENTQLQNEKLYLYYLQNGRDMYVDQELDINRLSDYDVDHIVPQSFLKDDSIDNKVLTRSDKARGKSDNVPSEEVVKKMKNYWRQLLNAKLITQRKFDNLTKAERGGLSELDKAGFIKRQLVETRQITKHVAQILDSRMNTKYDENDKLIREVKVITLKSKLVSDFRKDFQFYKVREINNYHHAHDAYLNAVVGTALIKKYPKLESEFVYGDYKVYDVRKMIAKSEQEIGKATAKYFFYSNIMNFFKTEITLANGEIRKRPLIETNGETGEIVWDKGRDFATVRKVLSMPQVNIVKKTEVQTGGFSKESILPKRNSDKLIARKKDWDPKKYGGFDSPTVAYSVLVVAKVEKGKSKKLKSVKELLGITIMERSSFEKNPIDFLEAKGYKEVKKDLIIKLPKYSLFELENGRKRMLASAGELQKGNELALPSKYVNFLYLASHYEKLKGSPEDNEQKQLFVEQHKHYLDEIIEQISEFSKRVILADANLDKVLSAYNKHRDKPIREQAENIIHLFTLTNLGAPAAFKYFDTTIDRKRYTSTKEVLDATLIHQSITGLYETRIDLSQLGGDGGGGGGGMDPLQLLQPLEAEIKGTKLKAHWNSGATITCVPQAFLEEEVPIKNIWIKTIHGEKEQPVYYLTFKIQGRKVEAEVISSPYDYILVSPSDIPWLMKKPLQLTTLVPLQEYEERLLKQTMLTGSYKEKLQSLFLKYDALWQHWENQVGHRRIKPHHIATGTVNPRPQKQYPINPKAKASIQTVINDLLKQGVLIQQNSIMNTPVYPVPKPDGKWRMVLDYREVNKTIPLIAAQNQHSAGILSSIFRGKYKTTLDLSNGFWAHSITPESYWLTAFTWLGQQYCWTRLPQGFLNSPALFNADVVDLLKEVPNVQVYVDDIYISHDDPREHLEQLEKVFSLLLNAGYVVSLKKSEIAQHEVEFLGFNITKEGRGLTETFKQKLLNITPPRDLKQLQSILGLLNFARNFIPNFSELVKPLYNIIATAPGKYITWTTDNSQQLQNIISMLNSAENLEERNPEVRLIMKVNTSPSAGYIRFYNEFAKRPIMYLNYVYTKAEVKFTNTEKLLTTIHKGLIKALDLGMGQEILVYSPIVSMTKIQKTPLPERKALPIRWITWMSYLEDPRIQFHYDKTLPELQQVPTVTDDIIAKIKHPSEFSMVFYTDGSAIKHPNVNKSHNAGMGIAQVQFKPEFTVINTWSIPLGDHTAQLAEVAAVEFACKKALKIDGPVLIVTDSFYVAESVNKELPYWQSNGFFNNKKKPLKHVSKWKSIADCIQLKPDIIIIHEKGHQPTASTFHTEGNNLADKLATQGSYVVNAGKRTADGSEFEKRTADGSEFESPKKKAKVE

SEQ ID NO: 624 - protein, 2180 aa, synthetic construct
MPAAKRVKLDGGDKKYSIGLDIGTNSVGWAVITDEYKVPSKKFKVLGNTDRHSIKKNLIGALLFDSGETAEATRLKRTARRRYTRRKNRICYLQEIFSNEMAKVDDSFFHRLEESFLVEEDKKHERHPIFGNIVDEVAYHEKYPTIYHLRKKLVDSTDKADLRLIYLALAHMIKFRGHFLIEGDLNPDNSDVDKLFIQLVQTYNQLFEENPINASGVDAKAILSARLSKSRRLENLIAQLPGEKKNGLFGNLIALSLGLTPNFKSNFDLAEDAKLQLSKDTYDDDLDNLLAQIGDQYADLFLAAKNLSDAILLSDILRVNTEITKAPLSASMIKRYDEHHQDLTLLKALVRQQLPEKYKEIFFDQSKNGYAGYIDGGASQEEFYKFIKPILEKMDGTEELLVKLNREDLLRKQRTFDNGSIPHQIHLGELHAILRRQEDFYPFLKDNREKIEKILTFRIPYYVGPLARGNSRFAWMTRKSEETITPWNFEEVVDKGASAQSFIERMTNFDKNLPNEKVLPKHSLLYEYFTVYNELTKVKYVTEGMRKPAFLSGEQKKAIVDLLFKTNRKVTVKQLKEDYFKKIECFDSVEISGVEDRFNASLGTYHDLLKIIKDKDFLDNEENEDILEDIVLTLTLFEDREMIEERLKTYAHLFDDKVMKQLKRRRYTGWGRLSRKLINGIRDKQSGKTILDFLKSDGFANRNFMQLIHDDSLTFKEDIQKAQVSGQGDSLHEHIANLAGSPAIKKGILQTVKVVDELVKVMGRHKPENIVIEMARENQTTQKGQKNSRERMKRIEEGIKELGSQILKEHPVENTQLQNEKLYLYYLQNGRDMYVDQELDINRLSDYDVDHIVPQSFLKDDSIDNKVLTRSDKARGKSDNVPSEEVVKKMKNYWRQLLNAKLITQRKFDNLTKAERGGLSELDKAGFIKRQLVETRQITKHVAQILDSRMNTKYDENDKLIREVKVITLKSKLVSDFRKDFQFYKVREINNYHHAHDAYLNAVVGTALIKKYPKLESEFVYGDYKVYDVRKMIAKSEQEIGKATAKYFFYSNIMNFFKTEITLANGEIRKRPLIETNGETGEIVWDKGRDFATVRKVLSMPQVNIVKKTEVQTGGFSKESILPKRNSDKLIARKKDWDPKKYGGFDSPTVAYSVLVVAKVEKGKSKKLKSVKELLGITIMERSSFEKNPIDFLEAKGYKEVKKDLIIKLPKYSLFELENGRKRMLASAGELQKGNELALPSKYVNFLYLASHYEKLKGSPEDNEQKQLFVEQHKHYLDEIIEQISEFSKRVILADANLDKVLSAYNKHRDKPIREQAENIIHLFTLTNLGAPAAFKYFDTTIDRKRYTSTKEVLDATLIHQSITGLYETRIDLSQLGGDGGEAAAKEAAAKEAAAKGGMDPLQLLQPLEAEIKGTKLKAHWNSGATITCVPQAFLEEEVPIKNIWIKTIHGEKEQPVYYLTFKIQGRKVEAEVISSPYDYILVSPSDIPWLMKKPLQLTTLVPLQEYEERLLKQTMLTGSYKEKLQSLFLKYDALWQHWENQVGHRRIKPHHIATGTVNPRPQKQYPINPKAKASIQTVINDLLKQGVLIQQNSIMNTPVYPVPKPDGKWRMVLDYREVNKTIPLIAAQNQHSAGILSSIFRGKYKTTLDLSNGFWAHSITPESYWLTAFTWLGQQYCWTRLPQGFLNSPALFNADVVDLLKEVPNVQVYVDDIYISHDDPREHLEQLEKVFSLLLNAGYVVSLKKSEIAQHEVEFLGFNITKEGRGLTETFKQKLLNITPPRDLKQLQSILGLLNFARNFIPNFSELVKPLYNIIATAPGKYITWTTDNSQQLQNIISMLNSAENLEERNPEVRLIMKVNTSPSAGYIRFYNEFAKRPIMYLNYVYTKAEVKFTNTEKLLTTIHKGLIKALDLGMGQEILVYSPIVSMTKIQKTPLPERKALPIRWITWMSYLEDPRIQFHYDKTLPELQQVPTVTDDIIAKIKHPSEFSMVFYTDGSAIKHPNVNKSHNAGMGIAQVQFKPEFTVINTWSIPLGDHTAQLAEVAAVEFACKKALKIDGPVLIVTDSFYVAESVNKELPYWQSNGFFNNKKKPLKHVSKWKSIADCIQLKPDIIIIHEKGHQPTASTFHTEGNNLADKLATQGSYVVNAGKRTADGSEFEKRTADGSEFESPKKKAKVE

SEQ ID NO: 625 - protein, 2173 aa, synthetic construct
MPAAKRVKLDGGDKKYSIGLDIGTNSVGWAVITDEYKVPSKKFKVLGNTDRHSIKKNLIGALLFDSGETAEATRLKRTARRRYTRRKNRICYLQEIFSNEMAKVDDSFFHRLEESFLVEEDKKHERHPIFGNIVDEVAYHEKYPTIYHLRKKLVDSTDKADLRLIYLALAHMIKFRGHFLIEGDLNPDNSDVDKLFIQLVQTYNQLFEENPINASGVDAKAILSARLSKSRRLENLIAQLPGEKKNGLFGNLIALSLGLTPNFKSNFDLAEDAKLQLSKDTYDDDLDNLLAQIGDQYADLFLAAKNLSDAILLSDILRVNTEITKAPLSASMIKRYDEHHQDLTLLKALVRQQLPEKYKEIFFDQSKNGYAGYIDGGASQEEFYKFIKPILEKMDGTEELLVKLNREDLLRKQRTFDNGSIPHQIHLGELHAILRRQEDFYPFLKDNREKIEKILTFRIPYYVGPLARGNSRFAWMTRKSEETITPWNFEEVVDKGASAQSFIERMTNFDKNLPNEKVLPKHSLLYEYFTVYNELTKVKYVTEGMRKPAFLSGEQKKAIVDLLFKTNRKVTVKQLKEDYFKKIECFDSVEISGVEDRFNASLGTYHDLLKIIKDKDFLDNEENEDILEDIVLTLTLFEDREMIEERLKTYAHLFDDKVMKQLKRRRYTGWGRLSRKLINGIRDKQSGKTILDFLKSDGFANRNFMQLIHDDSLTFKEDIQKAQVSGQGDSLHEHIANLAGSPAIKKGILQTVKVVDELVKVMGRHKPENIVIEMARENQTTQKGQKNSRERMKRIEEGIKELGSQILKEHPVENTQLQNEKLYLYYLQNGRDMYVDQELDINRLSDYDVDHIVPQSFLKDDSIDNKVLTRSDKARGKSDNVPSEEVVKKMKNYWRQLLNAKLITQRKFDNLTKAERGGLSELDKAGFIKRQLVETRQITKHVAQILDSRMNTKYDENDKLIREVKVITLKSKLVSDFRKDFQFYKVREINNYHHAHDAYLNAVVGTALIKKYPKLESEFVYGDYKVYDVRKMIAKSEQEIGKATAKYFFYSNIMNFFKTEITLANGEIRKRPLIETNGETGEIVWDKGRDFATVRKVLSMPQVNIVKKTEVQTGGFSKESILPKRNSDKLIARKKDWDPKKYGGFDSPTVAYSVLVVAKVEKGKSKKLKSVKELLGITIMERSSFEKNPIDFLEAKGYKEVKKDLIIKLPKYSLFELENGRKRMLASAGELQKGNELALPSKYVNFLYLASHYEKLKGSPEDNEQKQLFVEQHKHYLDEIIEQISEFSKRVILADANLDKVLSAYNKHRDKPIREQAENIIHLFTLTNLGAPAAFKYFDTTIDRKRYTSTKEVLDATLIHQSITGLYETRIDLSQLGGDGGEAAAKGGGGGMDPLQLLQPLEAEIKGTKLKAHWNSGATITCVPQAFLEEEVPIKNIWIKTIHGEKEQPVYYLTFKIQGRKVEAEVISSPYDYILVSPSDIPWLMKKPLQLTTLVPLQEYEERLLKQTMLTGSYKEKLQSLFLKYDALWQHWENQVGHRRIKPHHIATGTVNPRPQKQYPINPKAKASIQTVINDLLKQGVLIQQNSIMNTPVYPVPKPDGKWRMVLDYREVNKTIPLIAAQNQHSAGILSSIFRGKYKTTLDLSNGFWAHSITPESYWLTAFTWLGQQYCWTRLPQGFLNSPALFNADVVDLLKEVPNVQVYVDDIYISHDDPREHLEQLEKVFSLLLNAGYVVSLKKSEIAQHEVEFLGFNITKEGRGLTETFKQKLLNITPPRDLKQLQSILGLLNFARNFIPNFSELVKPLYNIIATAPGKYITWTTDNSQQLQNIISMLNSAENLEERNPEVRLIMKVNTSPSAGYIRFYNEFAKRPIMYLNYVYTKAEVKFTNTEKLLTTIHKGLIKALDLGMGQEILVYSPIVSMTKIQKTPLPERKALPIRWITWMSYLEDPRIQFHYDKTLPELQQVPTVTDDIIAKIKHPSEFSMVFYTDGSAIKHPNVNKSHNAGMGIAQVQFKPEFTVINTWSIPLGDHTAQLAEVAAVEFACKKALKIDGPVLIVTDSFYVAESVNKELPYWQSNGFFNNKKKPLKHVSKWKSIADCIQLKPDIIIIHEKGHQPTASTFHTEGNNLADKLATQGSYVVNAGKRTADGSEFEKRTADGSEFESPKKKAKVE

SEQ ID NO: 626 - protein, 2176 aa, synthetic construct
MPAAKRVKLDGGDKKYSIGLDIGTNSVGWAVITDEYKVPSKKFKVLGNTDRHSIKKNLIGALLFDSGETAEATRLKRTARRRYTRRKNRICYLQEIFSNEMAKVDDSFFHRLEESFLVEEDKKHERHPIFGNIVDEVAYHEKYPTIYHLRKKLVDSTDKADLRLIYLALAHMIKFRGHFLIEGDLNPDNSDVDKLFIQLVQTYNQLFEENPINASGVDAKAILSARLSKSRRLENLIAQLPGEKKNGLFGNLIALSLGLTPNFKSNFDLAEDAKLQLSKDTYDDDLDNLLAQIGDQYADLFLAAKNLSDAILLSDILRVNTEITKAPLSASMIKRYDEHHQDLTLLKALVRQQLPEKYKEIFFDQSKNGYAGYIDGGASQEEFYKFIKPILEKMDGTEELLVKLNREDLLRKQRTFDNGSIPHQIHLGELHAILRRQEDFYPFLKDNREKIEKILTFRIPYYVGPLARGNSRFAWMTRKSEETITPWNFEEVVDKGASAQSFIERMTNFDKNLPNEKVLPKHSLLYEYFTVYNELTKVKYVTEGMRKPAFLSGEQKKAIVDLLFKTNRKVTVKQLKEDYFKKIECFDSVEISGVEDRFNASLGTYHDLLKIIKDKDFLDNEENEDILEDIVLTLTLFEDREMIEERLKTYAHLFDDKVMKQLKRRRYTGWGRLSRKLINGIRDKQSGKTILDFLKSDGFANRNFMQLIHDDSLTFKEDIQKAQVSGQGDSLHEHIANLAGSPAIKKGILQTVKVVDELVKVMGRHKPENIVIEMARENQTTQKGQKNSRERMKRIEEGIKELGSQILKEHPVENTQLQNEKLYLYYLQNGRDMYVDQELDINRLSDYDVDHIVPQSFLKDDSIDNKVLTRSDKARGKSDNVPSEEVVKKMKNYWRQLLNAKLITQRKFDNLTKAERGGLSELDKAGFIKRQLVETRQITKHVAQILDSRMNTKYDENDKLIREVKVITLKSKLVSDFRKDFQFYKVREINNYHHAHDAYLNAVVGTALIKKYPKLESEFVYGDYKVYDVRKMIAKSEQEIGKATAKYFFYSNIMNFFKTEITLANGEIRKRPLIETNGETGEIVWDKGRDFATVRKVLSMPQVNIVKKTEVQTGGFSKESILPKRNSDKLIARKKDWDPKKYGGFDSPTVAYSVLVVAKVEKGKSKKLKSVKELLGITIMERSSFEKNPIDFLEAKGYKEVKKDLIIKLPKYSLFELENGRKRMLASAGELQKGNELALPSKYVNFLYLASHYEKLKGSPEDNEQKQLFVEQHKHYLDEIIEQISEFSKRVILADANLDKVLSAYNKHRDKPIREQAENIIHLFTLTNLGAPAAFKYFDTTIDRKRYTSTKEVLDATLIHQSITGLYETRIDLSQLGGDGGEAAAKGGGGGSGGMDPLQLLQPLEAEIKGTKLKAHWNSGATITCVPQAFLEEEVPIKNIWIKTIHGEKEQPVYYLTFKIQGRKVEAEVISSPYDYILVSPSDIPWLMKKPLQLTTLVPLQEYEERLLKQTMLTGSYKEKLQSLFLKYDALWQHWENQVGHRRIKPHHIATGTVNPRPQKQYPINPKAKASIQTVINDLLKQGVLIQQNSIMNTPVYPVPKPDGKWRMVLDYREVNKTIPLIAAQNQHSAGILSSIFRGKYKTTLDLSNGFWAHSITPESYWLTAFTWLGQQYCWTRLPQGFLNSPALFNADVVDLLKEVPNVQVYVDDIYISHDDPREHLEQLEKVFSLLLNAGYVVSLKKSEIAQHEVEFLGFNITKEGRGLTETFKQKLLNITPPRDLKQLQSILGLLNFARNFIPNFSELVKPLYNIIATAPGKYITWTTDNSQQLQNIISMLNSAENLEERNPEVRLIMKVNTSPSAGYIRFYNEFAKRPIMYLNYVYTKAEVKFTNTEKLLTTIHKGLIKALDLGMGQEILVYSPIVSMTKIQKTPLPERKALPIRWITWMSYLEDPRIQFHYDKTLPELQQVPTVTDDIIAKIKHPSEFSMVFYTDGSAIKHPNVNKSHNAGMGIAQVQFKPEFTVINTWSIPLGDHTAQLAEVAAVEFACKKALKIDGPVLIVTDSFYVAESVNKELPYWQSNGFFNNKKKPLKHVSKWKSIADCIQLKPDIIIIHEKGHQPTASTFHTEGNNLADKLATQGSYVVNAGKRTADGSEFEKRTADGSEFESPKKKAKVE

SEQ ID NO: 627 - protein, 2177 aa, synthetic construct
MPAAKRVKLDGGDKKYSIGLDIGTNSVGWAVITDEYKVPSKKFKVLGNTDRHSIKKNLIGALLFDSGETAEATRLKRTARRRYTRRKNRICYLQEIFSNEMAKVDDSFFHRLEESFLVEEDKKHERHPIFGNIVDEVAYHEKYPTIYHLRKKLVDSTDKADLRLIYLALAHMIKFRGHFLIEGDLNPDNSDVDKLFIQLVQTYNQLFEENPINASGVDAKAILSARLSKSRRLENLIAQLPGEKKNGLFGNLIALSLGLTPNFKSNFDLAEDAKLQLSKDTYDDDLDNLLAQIGDQYADLFLAAKNLSDAILLSDILRVNTEITKAPLSASMIKRYDEHHQDLTLLKALVRQQLPEKYKEIFFDQSKNGYAGYIDGGASQEEFYKFIKPILEKMDGTEELLVKLNREDLLRKQRTFDNGSIPHQIHLGELHAILRRQEDFYPFLKDNREKIEKILTFRIPYYVGPLARGNSRFAWMTRKSEETITPWNFEEVVDKGASAQSFIERMTNFDKNLPNEKVLPKHSLLYEYFTVYNELTKVKYVTEGMRKPAFLSGEQKKAIVDLLFKTNRKVTVKQLKEDYFKKIECFDSVEISGVEDRFNASLGTYHDLLKIIKDKDFLDNEENEDILEDIVLTLTLFEDREMIEERLKTYAHLFDDKVMKQLKRRRYTGWGRLSRKLINGIRDKQSGKTILDFLKSDGFANRNFMQLIHDDSLTFKEDIQKAQVSGQGDSLHEHIANLAGSPAIKKGILQTVKVVDELVKVMGRHKPENIVIEMARENQTTQKGQKNSRERMKRIEEGIKELGSQILKEHPVENTQLQNEKLYLYYLQNGRDMYVDQELDINRLSDYDVDHIVPQSFLKDDSIDNKVLTRSDKARGKSDNVPSEEVVKKMKNYWRQLLNAKLITQRKFDNLTKAERGGLSELDKAGFIKRQLVETRQITKHVAQILDSRMNTKYDENDKLIREVKVITLKSKLVSDFRKDFQFYKVREINNYHHAHDAYLNAVVGTALIKKYPKLESEFVYGDYKVYDVRKMIAKSEQEIGKATAKYFFYSNIMNFFKTEITLANGEIRKRPLIETNGETGEIVWDKGRDFATVRKVLSMPQVNIVKKTEVQTGGFSKESILPKRNSDKLIARKKDWDPKKYGGFDSPTVAYSVLVVAKVEKGKSKKLKSVKELLGITIMERSSFEKNPIDFLEAKGYKEVKKDLIIKLPKYSLFELENGRKRMLASAGELQKGNELALPSKYVNFLYLASHYEKLKGSPEDNEQKQLFVEQHKHYLDEIIEQISEFSKRVILADANLDKVLSAYNKHRDKPIREQAENIIHLFTLTNLGAPAAFKYFDTTIDRKRYTSTKEVLDATLIHQSITGLYETRIDLSQLGGDGGGSSGSSGSSGSSGGMDPLQLLQPLEAEIKGTKLKAHWNSGATITCVPQAFLEEEVPIKNIWIKTIHGEKEQPVYYLTFKIQGRKVEAEVISSPYDYILVSPSDIPWLMKKPLQLTTLVPLQEYEERLLKQTMLTGSYKEKLQSLFLKYDALWQHWENQVGHRRIKPHHIATGTVNPRPQKQYPINPKAKASIQTVINDLLKQGVLIQQNSIMNTPVYPVPKPDGKWRMVLDYREVNKTIPLIAAQNQHSAGILSSIFRGKYKTTLDLSNGFWAHSITPESYWLTAFTWLGQQYCWTRLPQGFLNSPALFNADVVDLLKEVPNVQVYVDDIYISHDDPREHLEQLEKVFSLLLNAGYVVSLKKSEIAQHEVEFLGFNITKEGRGLTETFKQKLLNITPPRDLKQLQSILGLLNFARNFIPNFSELVKPLYNIIATAPGKYITWTTDNSQQLQNIISMLNSAENLEERNPEVRLIMKVNTSPSAGYIRFYNEFAKRPIMYLNYVYTKAEVKFTNTEKLLTTIHKGLIKALDLGMGQEILVYSPIVSMTKIQKTPLPERKALPIRWITWMSYLEDPRIQFHYDKTLPELQQVPTVTDDIIAKIKHPSEFSMVFYTDGSAIKHPNVNKSHNAGMGIAQVQFKPEFTVINTWSIPLGDHTAQLAEVAAVEFACKKALKIDGPVLIVTDSFYVAESVNKELPYWQSNGFFNNKKKPLKHVSKWKSIADCIQLKPDIIIIHEKGHQPTASTFHTEGNNLADKLATQGSYVVNAGKRTADGSEFEKRTADGSEFESPKKKAKVE

SEQ ID NO: 628 - protein, 2176 aa, synthetic construct
MPAAKRVKLDGGDKKYSIGLDIGTNSVGWAVITDEYKVPSKKFKVLGNTDRHSIKKNLIGALLFDSGETAEATRLKRTARRRYTRRKNRICYLQEIFSNEMAKVDDSFFHRLEESFLVEEDKKHERHPIFGNIVDEVAYHEKYPTIYHLRKKLVDSTDKADLRLIYLALAHMIKFRGHFLIEGDLNPDNSDVDKLFIQLVQTYNQLFEENPINASGVDAKAILSARLSKSRRLENLIAQLPGEKKNGLFGNLIALSLGLTPNFKSNFDLAEDAKLQLSKDTYDDDLDNLLAQIGDQYADLFLAAKNLSDAILLSDILRVNTEITKAPLSASMIKRYDEHHQDLTLLKALVRQQLPEKYKEIFFDQSKNGYAGYIDGGASQEEFYKFIKPILEKMDGTEELLVKLNREDLLRKQRTFDNGSIPHQIHLGELHAILRRQEDFYPFLKDNREKIEKILTFRIPYYVGPLARGNSRFAWMTRKSEETITPWNFEEVVDKGASAQSFIERMTNFDKNLPNEKVLPKHSLLYEYFTVYNELTKVKYVTEGMRKPAFLSGEQKKAIVDLLFKTNRKVTVKQLKEDYFKKIECFDSVEISGVEDRFNASLGTYHDLLKIIKDKDFLDNEENEDILEDIVLTLTLFEDREMIEERLKTYAHLFDDKVMKQLKRRRYTGWGRLSRKLINGIRDKQSGKTILDFLKSDGFANRNFMQLIHDDSLTFKEDIQKAQVSGQGDSLHEHIANLAGSPAIKKGILQTVKVVDELVKVMGRHKPENIVIEMARENQTTQKGQKNSRERMKRIEEGIKELGSQILKEHPVENTQLQNEKLYLYYLQNGRDMYVDQELDINRLSDYDVDHIVPQSFLKDDSIDNKVLTRSDKARGKSDNVPSEEVVKKMKNYWRQLLNAKLITQRKFDNLTKAERGGLSELDKAGFIKRQLVETRQITKHVAQILDSRMNTKYDENDKLIREVKVITLKSKLVSDFRKDFQFYKVREINNYHHAHDAYLNAVVGTALIKKYPKLESEFVYGDYKVYDVRKMIAKSEQEIGKATAKYFFYSNIMNFFKTEITLANGEIRKRPLIETNGETGEIVWDKGRDFATVRKVLSMPQVNIVKKTEVQTGGFSKESILPKRNSDKLIARKKDWDPKKYGGFDSPTVAYSVLVVAKVEKGKSKKLKSVKELLGITIMERSSFEKNPIDFLEAKGYKEVKKDLIIKLPKYSLFELENGRKRMLASAGELQKGNELALPSKYVNFLYLASHYEKLKGSPEDNEQKQLFVEQHKHYLDEIIEQISEFSKRVILADANLDKVLSAYNKHRDKPIREQAENIIHLFTLTNLGAPAAFKYFDTTIDRKRYTSTKEVLDATLIHQSITGLYETRIDLSQLGGDGGGSSEAAAKGGSGGMDPLQLLQPLEAEIKGTKLKAHWNSGATITCVPQAFLEEEVPIKNIWIKTIHGEKEQPVYYLTFKIQGRKVEAEVISSPYDYILVSPSDIPWLMKKPLQLTTLVPLQEYEERLLKQTMLTGSYKEKLQSLFLKYDALWQHWENQVGHRRIKPHHIATGTVNPRPQKQYPINPKAKASIQTVINDLLKQGVLIQQNSIMNTPVYPVPKPDGKWRMVLDYREVNKTIPLIAAQNQHSAGILSSIFRGKYKTTLDLSNGFWAHSITPESYWLTAFTWLGQQYCWTRLPQGFLNSPALFNADVVDLLKEVPNVQVYVDDIYISHDDPREHLEQLEKVFSLLLNAGYVVSLKKSEIAQHEVEFLGFNITKEGRGLTETFKQKLLNITPPRDLKQLQSILGLLNFARNFIPNFSELVKPLYNIIATAPGKYITWTTDNSQQLQNIISMLNSAENLEERNPEVRLIMKVNTSPSAGYIRFYNEFAKRPIMYLNYVYTKAEVKFTNTEKLLTTIHKGLIKALDLGMGQEILVYSPIVSMTKIQKTPLPERKALPIRWITWMSYLEDPRIQFHYDKTLPELQQVPTVTDDIIAKIKHPSEFSMVFYTDGSAIKHPNVNKSHNAGMGIAQVQFKPEFTVINTWSIPLGDHTAQLAEVAAVEFACKKALKIDGPVLIVTDSFYVAESVNKELPYWQSNGFFNNKKKPLKHVSKWKSIADCIQLKPDIIIIHEKGHQPTASTFHTEGNNLADKLATQGSYVVNAGKRTADGSEFEKRTADGSEFESPKKKAKVE

SEQ ID NO: 629 - protein, 2176 aa, synthetic construct
MPAAKRVKLDGGDKKYSIGLDIGTNSVGWAVITDEYKVPSKKFKVLGNTDRHSIKKNLIGALLFDSGETAEATRLKRTARRRYTRRKNRICYLQEIFSNEMAKVDDSFFHRLEESFLVEEDKKHERHPIFGNIVDEVAYHEKYPTIYHLRKKLVDSTDKADLRLIYLALAHMIKFRGHFLIEGDLNPDNSDVDKLFIQLVQTYNQLFEENPINASGVDAKAILSARLSKSRRLENLIAQLPGEKKNGLFGNLIALSLGLTPNFKSNFDLAEDAKLQLSKDTYDDDLDNLLAQIGDQYADLFLAAKNLSDAILLSDILRVNTEITKAPLSASMIKRYDEHHQDLTLLKALVRQQLPEKYKEIFFDQSKNGYAGYIDGGASQEEFYKFIKPILEKMDGTEELLVKLNREDLLRKQRTFDNGSIPHQIHLGELHAILRRQEDFYPFLKDNREKIEKILTFRIPYYVGPLARGNSRFAWMTRKSEETITPWNFEEVVDKGASAQSFIERMTNFDKNLPNEKVLPKHSLLYEYFTVYNELTKVKYVTEGMRKPAFLSGEQKKAIVDLLFKTNRKVTVKQLKEDYFKKIECFDSVEISGVEDRFNASLGTYHDLLKIIKDKDFLDNEENEDILEDIVLTLTLFEDREMIEERLKTYAHLFDDKVMKQLKRRRYTGWGRLSRKLINGIRDKQSGKTILDFLKSDGFANRNFMQLIHDDSLTFKEDIQKAQVSGQGDSLHEHIANLAGSPAIKKGILQTVKVVDELVKVMGRHKPENIVIEMARENQTTQKGQKNSRERMKRIEEGIKELGSQILKEHPVENTQLQNEKLYLYYLQNGRDMYVDQELDINRLSDYDVDHIVPQSFLKDDSIDNKVLTRSDKARGKSDNVPSEEVVKKMKNYWRQLLNAKLITQRKFDNLTKAERGGLSELDKAGFIKRQLVETRQITKHVAQILDSRMNTKYDENDKLIREVKVITLKSKLVSDFRKDFQFYKVREINNYHHAHDAYLNAVVGTALIKKYPKLESEFVYGDYKVYDVRKMIAKSEQEIGKATAKYFFYSNIMNFFKTEITLANGEIRKRPLIETNGETGEIVWDKGRDFATVRKVLSMPQVNIVKKTEVQTGGFSKESILPKRNSDKLIARKKDWDPKKYGGFDSPTVAYSVLVVAKVEKGKSKKLKSVKELLGITIMERSSFEKNPIDFLEAKGYKEVKKDLIIKLPKYSLFELENGRKRMLASAGELQKGNELALPSKYVNFLYLASHYEKLKGSPEDNEQKQLFVEQHKHYLDEIIEQISEFSKRVILADANLDKVLSAYNKHRDKPIREQAENIIHLFTLTNLGAPAAFKYFDTTIDRKRYTSTKEVLDATLIHQSITGLYETRIDLSQLGGDGGEAAAKGGSPAPGGMDPLQLLQPLEAEIKGTKLKAHWNSGATITCVPQAFLEEEVPIKNIWIKTIHGEKEQPVYYLTFKIQGRKVEAEVISSPYDYILVSPSDIPWLMKKPLQLTTLVPLQEYEERLLKQTMLTGSYKEKLQSLFLKYDALWQHWENQVGHRRIKPHHIATGTVNPRPQKQYPINPKAKASIQTVINDLLKQGVLIQQNSIMNTPVYPVPKPDGKWRMVLDYREVNKTIPLIAAQNQHSAGILSSIFRGKYKTTLDLSNGFWAHSITPESYWLTAFTWLGQQYCWTRLPQGFLNSPALFNADVVDLLKEVPNVQVYVDDIYISHDDPREHLEQLEKVFSLLLNAGYVVSLKKSEIAQHEVEFLGFNITKEGRGLTETFKQKLLNITPPRDLKQLQSILGLLNFARNFIPNFSELVKPLYNIIATAPGKYITWTTDNSQQLQNIISMLNSAENLEERNPEVRLIMKVNTSPSAGYIRFYNEFAKRPIMYLNYVYTKAEVKFTNTEKLLTTIHKGLIKALDLGMGQEILVYSPIVSMTKIQKTPLPERKALPIRWITWMSYLEDPRIQFHYDKTLPELQQVPTVTDDIIAKIKHPSEFSMVFYTDGSAIKHPNVNKSHNAGMGIAQVQFKPEFTVINTWSIPLGDHTAQLAEVAAVEFACKKALKIDGPVLIVTDSFYVAESVNKELPYWQSNGFFNNKKKPLKHVSKWKSIADCIQLKPDIIIIHEKGHQPTASTFHTEGNNLADKLATQGSYVVNAGKRTADGSEFEKRTADGSEFESPKKKAKVE

SEQ ID NO: 630 - protein, 2176 aa, synthetic construct
MPAAKRVKLDGGDKKYSIGLDIGTNSVGWAVITDEYKVPSKKFKVLGNTDRHSIKKNLIGALLFDSGETAEATRLKRTARRRYTRRKNRICYLQEIFSNEMAKVDDSFFHRLEESFLVEEDKKHERHPIFGNIVDEVAYHEKYPTIYHLRKKLVDSTDKADLRLIYLALAHMIKFRGHFLIEGDLNPDNSDVDKLFIQLVQTYNQLFEENPINASGVDAKAILSARLSKSRRLENLIAQLPGEKKNGLFGNLIALSLGLTPNFKSNFDLAEDAKLQLSKDTYDDDLDNLLAQIGDQYADLFLAAKNLSDAILLSDILRVNTEITKAPLSASMIKRYDEHHQDLTLLKALVRQQLPEKYKEIFFDQSKNGYAGYIDGGASQEEFYKFIKPILEKMDGTEELLVKLNREDLLRKQRTFDNGSIPHQIHLGELHAILRRQEDFYPFLKDNREKIEKILTFRIPYYVGPLARGNSRFAWMTRKSEETITPWNFEEVVDKGASAQSFIERMTNFDKNLPNEKVLPKHSLLYEYFTVYNELTKVKYVTEGMRKPAFLSGEQKKAIVDLLFKTNRKVTVKQLKEDYFKKIECFDSVEISGVEDRFNASLGTYHDLLKIIKDKDFLDNEENEDILEDIVLTLTLFEDREMIEERLKTYAHLFDDKVMKQLKRRRYTGWGRLSRKLINGIRDKQSGKTILDFLKSDGFANRNFMQLIHDDSLTFKEDIQKAQVSGQGDSLHEHIANLAGSPAIKKGILQTVKVVDELVKVMGRHKPENIVIEMARENQTTQKGQKNSRERMKRIEEGIKELGSQILKEHPVENTQLQNEKLYLYYLQNGRDMYVDQELDINRLSDYDVDHIVPQSFLKDDSIDNKVLTRSDKARGKSDNVPSEEVVKKMKNYWRQLLNAKLITQRKFDNLTKAERGGLSELDKAGFIKRQLVETRQITKHVAQILDSRMNTKYDENDKLIREVKVITLKSKLVSDFRKDFQFYKVREINNYHHAHDAYLNAVVGTALIKKYPKLESEFVYGDYKVYDVRKMIAKSEQEIGKATAKYFFYSNIMNFFKTEITLANGEIRKRPLIETNGETGEIVWDKGRDFATVRKVLSMPQVNIVKKTEVQTGGFSKESILPKRNSDKLIARKKDWDPKKYGGFDSPTVAYSVLVVAKVEKGKSKKLKSVKELLGITIMERSSFEKNPIDFLEAKGYKEVKKDLIIKLPKYSLFELENGRKRMLASAGELQKGNELALPSKYVNFLYLASHYEKLKGSPEDNEQKQLFVEQHKHYLDEIIEQISEFSKRVILADANLDKVLSAYNKHRDKPIREQAENIIHLFTLTNLGAPAAFKYFDTTIDRKRYTSTKEVLDATLIHQSITGLYETRIDLSQLGGDGGGGGGGSEAAAKGGMDPLQLLQPLEAEIKGTKLKAHWNSGATITCVPQAFLEEEVPIKNIWIKTIHGEKEQPVYYLTFKIQGRKVEAEVISSPYDYILVSPSDIPWLMKKPLQLTTLVPLQEYEERLLKQTMLTGSYKEKLQSLFLKYDALWQHWENQVGHRRIKPHHIATGTVNPRPQKQYPINPKAKASIQTVINDLLKQGVLIQQNSIMNTPVYPVPKPDGKWRMVLDYREVNKTIPLIAAQNQHSAGILSSIFRGKYKTTLDLSNGFWAHSITPESYWLTAFTWLGQQYCWTRLPQGFLNSPALFNADVVDLLKEVPNVQVYVDDIYISHDDPREHLEQLEKVFSLLLNAGYVVSLKKSEIAQHEVEFLGFNITKEGRGLTETFKQKLLNITPPRDLKQLQSILGLLNFARNFIPNFSELVKPLYNIIATAPGKYITWTTDNSQQLQNIISMLNSAENLEERNPEVRLIMKVNTSPSAGYIRFYNEFAKRPIMYLNYVYTKAEVKFTNTEKLLTTIHKGLIKALDLGMGQEILVYSPIVSMTKIQKTPLPERKALPIRWITWMSYLEDPRIQFHYDKTLPELQQVPTVTDDIIAKIKHPSEFSMVFYTDGSAIKHPNVNKSHNAGMGIAQVQFKPEFTVINTWSIPLGDHTAQLAEVAAVEFACKKALKIDGPVLIVTDSFYVAESVNKELPYWQSNGFFNNKKKPLKHVSKWKSIADCIQLKPDIIIIHEKGHQPTASTFHTEGNNLADKLATQGSYVVNAGKRTADGSEFEKRTADGSEFESPKKKAKVE

SEQ ID NO: 631 - protein, 2174 aa, synthetic construct
MPAAKRVKLDGGDKKYSIGLDIGTNSVGWAVITDEYKVPSKKFKVLGNTDRHSIKKNLIGALLFDSGETAEATRLKRTARRRYTRRKNRICYLQEIFSNEMAKVDDSFFHRLEESFLVEEDKKHERHPIFGNIVDEVAYHEKYPTIYHLRKKLVDSTDKADLRLIYLALAHMIKFRGHFLIEGDLNPDNSDVDKLFIQLVQTYNQLFEENPINASGVDAKAILSARLSKSRRLENLIAQLPGEKKNGLFGNLIALSLGLTPNFKSNFDLAEDAKLQLSKDTYDDDLDNLLAQIGDQYADLFLAAKNLSDAILLSDILRVNTEITKAPLSASMIKRYDEHHQDLTLLKALVRQQLPEKYKEIFFDQSKNGYAGYIDGGASQEEFYKFIKPILEKMDGTEELLVKLNREDLLRKQRTFDNGSIPHQIHLGELHAILRRQEDFYPFLKDNREKIEKILTFRIPYYVGPLARGNSRFAWMTRKSEETITPWNFEEVVDKGASAQSFIERMTNFDKNLPNEKVLPKHSLLYEYFTVYNELTKVKYVTEGMRKPAFLSGEQKKAIVDLLFKTNRKVTVKQLKEDYFKKIECFDSVEISGVEDRFNASLGTYHDLLKIIKDKDFLDNEENEDILEDIVLTLTLFEDREMIEERLKTYAHLFDDKVMKQLKRRRYTGWGRLSRKLINGIRDKQSGKTILDFLKSDGFANRNFMQLIHDDSLTFKEDIQKAQVSGQGDSLHEHIANLAGSPAIKKGILQTVKVVDELVKVMGRHKPENIVIEMARENQTTQKGQKNSRERMKRIEEGIKELGSQILKEHPVENTQLQNEKLYLYYLQNGRDMYVDQELDINRLSDYDVDHIVPQSFLKDDSIDNKVLTRSDKARGKSDNVPSEEVVKKMKNYWRQLLNAKLITQRKFDNLTKAERGGLSELDKAGFIKRQLVETRQITKHVAQILDSRMNTKYDENDKLIREVKVITLKSKLVSDFRKDFQFYKVREINNYHHAHDAYLNAVVGTALIKKYPKLESEFVYGDYKVYDVRKMIAKSEQEIGKATAKYFFYSNIMNFFKTEITLANGEIRKRPLIETNGETGEIVWDKGRDFATVRKVLSMPQVNIVKKTEVQTGGFSKESILPKRNSDKLIARKKDWDPKKYGGFDSPTVAYSVLVVAKVEKGKSKKLKSVKELLGITIMERSSFEKNPIDFLEAKGYKEVKKDLIIKLPKYSLFELENGRKRMLASAGELQKGNELALPSKYVNFLYLASHYEKLKGSPEDNEQKQLFVEQHKHYLDEIIEQISEFSKRVILADANLDKVLSAYNKHRDKPIREQAENIIHLFTLTNLGAPAAFKYFDTTIDRKRYTSTKEVLDATLIHQSITGLYETRIDLSQLGGDGGGGGGSSPAPGGMDPLQLLQPLEAEIKGTKLKAHWNSGATITCVPQAFLEEEVPIKNIWIKTIHGEKEQPVYYLTFKIQGRKVEAEVISSPYDYILVSPSDIPWLMKKPLQLTTLVPLQEYEERLLKQTMLTGSYKEKLQSLFLKYDALWQHWENQVGHRRIKPHHIATGTVNPRPQKQYPINPKAKASIQTVINDLLKQGVLIQQNSIMNTPVYPVPKPDGKWRMVLDYREVNKTIPLIAAQNQHSAGILSSIFRGKYKTTLDLSNGFWAHSITPESYWLTAFTWLGQQYCWTRLPQGFLNSPALFNADVVDLLKEVPNVQVYVDDIYISHDDPREHLEQLEKVFSLLLNAGYVVSLKKSEIAQHEVEFLGFNITKEGRGLTETFKQKLLNITPPRDLKQLQSILGLLNFARNFIPNFSELVKPLYNIIATAPGKYITWTTDNSQQLQNIISMLNSAENLEERNPEVRLIMKVNTSPSAGYIRFYNEFAKRPIMYLNYVYTKAEVKFTNTEKLLTTIHKGLIKALDLGMGQEILVYSPIVSMTKIQKTPLPERKALPIRWITWMSYLEDPRIQFHYDKTLPELQQVPTVTDDIIAKIKHPSEFSMVFYTDGSAIKHPNVNKSHNAGMGIAQVQFKPEFTVINTWSIPLGDHTAQLAEVAAVEFACKKALKIDGPVLIVTDSFYVAESVNKELPYWQSNGFFNNKKKPLKHVSKWKSIADCIQLKPDIIIIHEKGHQPTASTFHTEGNNLADKLATQGSYVVNAGKRTADGSEFEKRTADGSEFESPKKKAKVE

SEQ ID NO: 632 - protein, 2176 aa, synthetic construct
MPAAKRVKLDGGDKKYSIGLDIGTNSVGWAVITDEYKVPSKKFKVLGNTDRHSIKKNLIGALLFDSGETAEATRLKRTARRRYTRRKNRICYLQEIFSNEMAKVDDSFFHRLEESFLVEEDKKHERHPIFGNIVDEVAYHEKYPTIYHLRKKLVDSTDKADLRLIYLALAHMIKFRGHFLIEGDLNPDNSDVDKLFIQLVQTYNQLFEENPINASGVDAKAILSARLSKSRRLENLIAQLPGEKKNGLFGNLIALSLGLTPNFKSNFDLAEDAKLQLSKDTYDDDLDNLLAQIGDQYADLFLAAKNLSDAILLSDILRVNTEITKAPLSASMIKRYDEHHQDLTLLKALVRQQLPEKYKEIFFDQSKNGYAGYIDGGASQEEFYKFIKPILEKMDGTEELLVKLNREDLLRKQRTFDNGSIPHQIHLGELHAILRRQEDFYPFLKDNREKIEKILTFRIPYYVGPLARGNSRFAWMTRKSEETITPWNFEEVVDKGASAQSFIERMTNFDKNLPNEKVLPKHSLLYEYFTVYNELTKVKYVTEGMRKPAFLSGEQKKAIVDLLFKTNRKVTVKQLKEDYFKKIECFDSVEISGVEDRFNASLGTYHDLLKIIKDKDFLDNEENEDILEDIVLTLTLFEDREMIEERLKTYAHLFDDKVMKQLKRRRYTGWGRLSRKLINGIRDKQSGKTILDFLKSDGFANRNFMQLIHDDSLTFKEDIQKAQVSGQGDSLHEHIANLAGSPAIKKGILQTVKVVDELVKVMGRHKPENIVIEMARENQTTQKGQKNSRERMKRIEEGIKELGSQILKEHPVENTQLQNEKLYLYYLQNGRDMYVDQELDINRLSDYDVDHIVPQSFLKDDSIDNKVLTRSDKARGKSDNVPSEEVVKKMKNYWRQLLNAKLITQRKFDNLTKAERGGLSELDKAGFIKRQLVETRQITKHVAQILDSRMNTKYDENDKLIREVKVITLKSKLVSDFRKDFQFYKVREINNYHHAHDAYLNAVVGTALIKKYPKLESEFVYGDYKVYDVRKMIAKSEQEIGKATAKYFFYSNIMNFFKTEITLANGEIRKRPLIETNGETGEIVWDKGRDFATVRKVLSMPQVNIVKKTEVQTGGFSKESILPKRNSDKLIARKKDWDPKKYGGFDSPTVAYSVLVVAKVEKGKSKKLKSVKELLGITIMERSSFEKNPIDFLEAKGYKEVKKDLIIKLPKYSLFELENGRKRMLASAGELQKGNELALPSKYVNFLYLASHYEKLKGSPEDNEQKQLFVEQHKHYLDEIIEQISEFSKRVILADANLDKVLSAYNKHRDKPIREQAENIIHLFTLTNLGAPAAFKYFDTTIDRKRYTSTKEVLDATLIHQSITGLYETRIDLSQLGGDGGEAAAKPAPGSSGGMDPLQLLQPLEAEIKGTKLKAHWNSGATITCVPQAFLEEEVPIKNIWIKTIHGEKEQPVYYLTFKIQGRKVEAEVISSPYDYILVSPSDIPWLMKKPLQLTTLVPLQEYEERLLKQTMLTGSYKEKLQSLFLKYDALWQHWENQVGHRRIKPHHIATGTVNPRPQKQYPINPKAKASIQTVINDLLKQGVLIQQNSIMNTPVYPVPKPDGKWRMVLDYREVNKTIPLIAAQNQHSAGILSSIFRGKYKTTLDLSNGFWAHSITPESYWLTAFTWLGQQYCWTRLPQGFLNSPALFNADVVDLLKEVPNVQVYVDDIYISHDDPREHLEQLEKVFSLLLNAGYVVSLKKSEIAQHEVEFLGFNITKEGRGLTETFKQKLLNITPPRDLKQLQSILGLLNFARNFIPNFSELVKPLYNIIATAPGKYITWTTDNSQQLQNIISMLNSAENLEERNPEVRLIMKVNTSPSAGYIRFYNEFAKRPIMYLNYVYTKAEVKFTNTEKLLTTIHKGLIKALDLGMGQEILVYSPIVSMTKIQKTPLPERKALPIRWITWMSYLEDPRIQFHYDKTLPELQQVPTVTDDIIAKIKHPSEFSMVFYTDGSAIKHPNVNKSHNAGMGIAQVQFKPEFTVINTWSIPLGDHTAQLAEVAAVEFACKKALKIDGPVLIVTDSFYVAESVNKELPYWQSNGFFNNKKKPLKHVSKWKSIADCIQLKPDIIIIHEKGHQPTASTFHTEGNNLADKLATQGSYVVNAGKRTADGSEFEKRTADGSEFESPKKKAKVE

SEQ ID NO: 633 - protein, 2176 aa, synthetic construct
MPAAKRVKLDGGDKKYSIGLDIGTNSVGWAVITDEYKVPSKKFKVLGNTDRHSIKKNLIGALLFDSGETAEATRLKRTARRRYTRRKNRICYLQEIFSNEMAKVDDSFFHRLEESFLVEEDKKHERHPIFGNIVDEVAYHEKYPTIYHLRKKLVDSTDKADLRLIYLALAHMIKFRGHFLIEGDLNPDNSDVDKLFIQLVQTYNQLFEENPINASGVDAKAILSARLSKSRRLENLIAQLPGEKKNGLFGNLIALSLGLTPNFKSNFDLAEDAKLQLSKDTYDDDLDNLLAQIGDQYADLFLAAKNLSDAILLSDILRVNTEITKAPLSASMIKRYDEHHQDLTLLKALVRQQLPEKYKEIFFDQSKNGYAGYIDGGASQEEFYKFIKPILEKMDGTEELLVKLNREDLLRKQRTFDNGSIPHQIHLGELHAILRRQEDFYPFLKDNREKIEKILTFRIPYYVGPLARGNSRFAWMTRKSEETITPWNFEEVVDKGASAQSFIERMTNFDKNLPNEKVLPKHSLLYEYFTVYNELTKVKYVTEGMRKPAFLSGEQKKAIVDLLFKTNRKVTVKQLKEDYFKKIECFDSVEISGVEDRFNASLGTYHDLLKIIKDKDFLDNEENEDILEDIVLTLTLFEDREMIEERLKTYAHLFDDKVMKQLKRRRYTGWGRLSRKLINGIRDKQSGKTILDFLKSDGFANRNFMQLIHDDSLTFKEDIQKAQVSGQGDSLHEHIANLAGSPAIKKGILQTVKVVDELVKVMGRHKPENIVIEMARENQTTQKGQKNSRERMKRIEEGIKELGSQILKEHPVENTQLQNEKLYLYYLQNGRDMYVDQELDINRLSDYDVDHIVPQSFLKDDSIDNKVLTRSDKARGKSDNVPSEEVVKKMKNYWRQLLNAKLITQRKFDNLTKAERGGLSELDKAGFIKRQLVETRQITKHVAQILDSRMNTKYDENDKLIREVKVITLKSKLVSDFRKDFQFYKVREINNYHHAHDAYLNAVVGTALIKKYPKLESEFVYGDYKVYDVRKMIAKSEQEIGKATAKYFFYSNIMNFFKTEITLANGEIRKRPLIETNGETGEIVWDKGRDFATVRKVLSMPQVNIVKKTEVQTGGFSKESILPKRNSDKLIARKKDWDPKKYGGFDSPTVAYSVLVVAKVEKGKSKKLKSVKELLGITIMERSSFEKNPIDFLEAKGYKEVKKDLIIKLPKYSLFELENGRKRMLASAGELQKGNELALPSKYVNFLYLASHYEKLKGSPEDNEQKQLFVEQHKHYLDEIIEQISEFSKRVILADANLDKVLSAYNKHRDKPIREQAENIIHLFTLTNLGAPAAFKYFDTTIDRKRYTSTKEVLDATLIHQSITGLYETRIDLSQLGGDGGGGSPAPEAAAKGGMDPLQLLQPLEAEIKGTKLKAHWNSGATITCVPQAFLEEEVPIKNIWIKTIHGEKEQPVYYLTFKIQGRKVEAEVISSPYDYILVSPSDIPWLMKKPLQLTTLVPLQEYEERLLKQTMLTGSYKEKLQSLFLKYDALWQHWENQVGHRRIKPHHIATGTVNPRPQKQYPINPKAKASIQTVINDLLKQGVLIQQNSIMNTPVYPVPKPDGKWRMVLDYREVNKTIPLIAAQNQHSAGILSSIFRGKYKTTLDLSNGFWAHSITPESYWLTAFTWLGQQYCWTRLPQGFLNSPALFNADVVDLLKEVPNVQVYVDDIYISHDDPREHLEQLEKVFSLLLNAGYVVSLKKSEIAQHEVEFLGFNITKEGRGLTETFKQKLLNITPPRDLKQLQSILGLLNFARNFIPNFSELVKPLYNIIATAPGKYITWTTDNSQQLQNIISMLNSAENLEERNPEVRLIMKVNTSPSAGYIRFYNEFAKRPIMYLNYVYTKAEVKFTNTEKLLTTIHKGLIKALDLGMGQEILVYSPIVSMTKIQKTPLPERKALPIRWITWMSYLEDPRIQFHYDKTLPELQQVPTVTDDIIAKIKHPSEFSMVFYTDGSAIKHPNVNKSHNAGMGIAQVQFKPEFTVINTWSIPLGDHTAQLAEVAAVEFACKKALKIDGPVLIVTDSFYVAESVNKELPYWQSNGFFNNKKKPLKHVSKWKSIADCIQLKPDIIIIHEKGHQPTASTFHTEGNNLADKLATQGSYVVNAGKRTADGSEFEKRTADGSEFESPKKKAKVE

SEQ ID NO: 634 - protein, 2174 aa, synthetic construct
MPAAKRVKLDGGDKKYSIGLDIGTNSVGWAVITDEYKVPSKKFKVLGNTDRHSIKKNLIGALLFDSGETAEATRLKRTARRRYTRRKNRICYLQEIFSNEMAKVDDSFFHRLEESFLVEEDKKHERHPIFGNIVDEVAYHEKYPTIYHLRKKLVDSTDKADLRLIYLALAHMIKFRGHFLIEGDLNPDNSDVDKLFIQLVQTYNQLFEENPINASGVDAKAILSARLSKSRRLENLIAQLPGEKKNGLFGNLIALSLGLTPNFKSNFDLAEDAKLQLSKDTYDDDLDNLLAQIGDQYADLFLAAKNLSDAILLSDILRVNTEITKAPLSASMIKRYDEHHQDLTLLKALVRQQLPEKYKEIFFDQSKNGYAGYIDGGASQEEFYKFIKPILEKMDGTEELLVKLNREDLLRKQRTFDNGSIPHQIHLGELHAILRRQEDFYPFLKDNREKIEKILTFRIPYYVGPLARGNSRFAWMTRKSEETITPWNFEEVVDKGASAQSFIERMTNFDKNLPNEKVLPKHSLLYEYFTVYNELTKVKYVTEGMRKPAFLSGEQKKAIVDLLFKTNRKVTVKQLKEDYFKKIECFDSVEISGVEDRFNASLGTYHDLLKIIKDKDFLDNEENEDILEDIVLTLTLFEDREMIEERLKTYAHLFDDKVMKQLKRRRYTGWGRLSRKLINGIRDKQSGKTILDFLKSDGFANRNFMQLIHDDSLTFKEDIQKAQVSGQGDSLHEHIANLAGSPAIKKGILQTVKVVDELVKVMGRHKPENIVIEMARENQTTQKGQKNSRERMKRIEEGIKELGSQILKEHPVENTQLQNEKLYLYYLQNGRDMYVDQELDINRLSDYDVDHIVPQSFLKDDSIDNKVLTRSDKARGKSDNVPSEEVVKKMKNYWRQLLNAKLITQRKFDNLTKAERGGLSELDKAGFIKRQLVETRQITKHVAQILDSRMNTKYDENDKLIREVKVITLKSKLVSDFRKDFQFYKVREINNYHHAHDAYLNAVVGTALIKKYPKLESEFVYGDYKVYDVRKMIAKSEQEIGKATAKYFFYSNIMNFFKTEITLANGEIRKRPLIETNGETGEIVWDKGRDFATVRKVLSMPQVNIVKKTEVQTGGFSKESILPKRNSDKLIARKKDWDPKKYGGFDSPTVAYSVLVVAKVEKGKSKKLKSVKELLGITIMERSSFEKNPIDFLEAKGYKEVKKDLIIKLPKYSLFELENGRKRMLASAGELQKGNELALPSKYVNFLYLASHYEKLKGSPEDNEQKQLFVEQHKHYLDEIIEQISEFSKRVILADANLDKVLSAYNKHRDKPIREQAENIIHLFTLTNLGAPAAFKYFDTTIDRKRYTSTKEVLDATLIHQSITGLYETRIDLSQLGGDGGGGGPAPGSSGGMDPLQLLQPLEAEIKGTKLKAHWNSGATITCVPQAFLEEEVPIKNIWIKTIHGEKEQPVYYLTFKIQGRKVEAEVISSPYDYILVSPSDIPWLMKKPLQLTTLVPLQEYEERLLKQTMLTGSYKEKLQSLFLKYDALWQHWENQVGHRRIKPHHIATGTVNPRPQKQYPINPKAKASIQTVINDLLKQGVLIQQNSIMNTPVYPVPKPDGKWRMVLDYREVNKTIPLIAAQNQHSAGILSSIFRGKYKTTLDLSNGFWAHSITPESYWLTAFTWLGQQYCWTRLPQGFLNSPALFNADVVDLLKEVPNVQVYVDDIYISHDDPREHLEQLEKVFSLLLNAGYVVSLKKSEIAQHEVEFLGFNITKEGRGLTETFKQKLLNITPPRDLKQLQSILGLLNFARNFIPNFSELVKPLYNIIATAPGKYITWTTDNSQQLQNIISMLNSAENLEERNPEVRLIMKVNTSPSAGYIRFYNEFAKRPIMYLNYVYTKAEVKFTNTEKLLTTIHKGLIKALDLGMGQEILVYSPIVSMTKIQKTPLPERKALPIRWITWMSYLEDPRIQFHYDKTLPELQQVPTVTDDIIAKIKHPSEFSMVFYTDGSAIKHPNVNKSHNAGMGIAQVQFKPEFTVINTWSIPLGDHTAQLAEVAAVEFACKKALKIDGPVLIVTDSFYVAESVNKELPYWQSNGFFNNKKKPLKHVSKWKSIADCIQLKPDIIIIHEKGHQPTASTFHTEGNNLADKLATQGSYVVNAGKRTADGSEFEKRTADGSEFESPKKKAKVE

SEQ ID NO: 635 - protein, 2174 aa, synthetic construct
MPAAKRVKLDGGDKKYSIGLDIGTNSVGWAVITDEYKVPSKKFKVLGNTDRHSIKKNLIGALLFDSGETAEATRLKRTARRRYTRRKNRICYLQEIFSNEMAKVDDSFFHRLEESFLVEEDKKHERHPIFGNIVDEVAYHEKYPTIYHLRKKLVDSTDKADLRLIYLALAHMIKFRGHFLIEGDLNPDNSDVDKLFIQLVQTYNQLFEENPINASGVDAKAILSARLSKSRRLENLIAQLPGEKKNGLFGNLIALSLGLTPNFKSNFDLAEDAKLQLSKDTYDDDLDNLLAQIGDQYADLFLAAKNLSDAILLSDILRVNTEITKAPLSASMIKRYDEHHQDLTLLKALVRQQLPEKYKEIFFDQSKNGYAGYIDGGASQEEFYKFIKPILEKMDGTEELLVKLNREDLLRKQRTFDNGSIPHQIHLGELHAILRRQEDFYPFLKDNREKIEKILTFRIPYYVGPLARGNSRFAWMTRKSEETITPWNFEEVVDKGASAQSFIERMTNFDKNLPNEKVLPKHSLLYEYFTVYNELTKVKYVTEGMRKPAFLSGEQKKAIVDLLFKTNRKVTVKQLKEDYFKKIECFDSVEISGVEDRFNASLGTYHDLLKIIKDKDFLDNEENEDILEDIVLTLTLFEDREMIEERLKTYAHLFDDKVMKQLKRRRYTGWGRLSRKLINGIRDKQSGKTILDFLKSDGFANRNFMQLIHDDSLTFKEDIQKAQVSGQGDSLHEHIANLAGSPAIKKGILQTVKVVDELVKVMGRHKPENIVIEMARENQTTQKGQKNSRERMKRIEEGIKELGSQILKEHPVENTQLQNEKLYLYYLQNGRDMYVDQELDINRLSDYDVDHIVPQSFLKDDSIDNKVLTRSDKARGKSDNVPSEEVVKKMKNYWRQLLNAKLITQRKFDNLTKAERGGLSELDKAGFIKRQLVETRQITKHVAQILDSRMNTKYDENDKLIREVKVITLKSKLVSDFRKDFQFYKVREINNYHHAHDAYLNAVVGTALIKKYPKLESEFVYGDYKVYDVRKMIAKSEQEIGKATAKYFFYSNIMNFFKTEITLANGEIRKRPLIETNGETGEIVWDKGRDFATVRKVLSMPQVNIVKKTEVQTGGFSKESILPKRNSDKLIARKKDWDPKKYGGFDSPTVAYSVLVVAKVEKGKSKKLKSVKELLGITIMERSSFEKNPIDFLEAKGYKEVKKDLIIKLPKYSLFELENGRKRMLASAGELQKGNELALPSKYVNFLYLASHYEKLKGSPEDNEQKQLFVEQHKHYLDEIIEQISEFSKRVILADANLDKVLSAYNKHRDKPIREQAENIIHLFTLTNLGAPAAFKYFDTTIDRKRYTSTKEVLDATLIHQSITGLYETRIDLSQLGGDGGGGSGSSPAPGGMDPLQLLQPLEAEIKGTKLKAHWNSGATITCVPQAFLEEEVPIKNIWIKTIHGEKEQPVYYLTFKIQGRKVEAEVISSPYDYILVSPSDIPWLMKKPLQLTTLVPLQEYEERLLKQTMLTGSYKEKLQSLFLKYDALWQHWENQVGHRRIKPHHIATGTVNPRPQKQYPINPKAKASIQTVINDLLKQGVLIQQNSIMNTPVYPVPKPDGKWRMVLDYREVNKTIPLIAAQNQHSAGILSSIFRGKYKTTLDLSNGFWAHSITPESYWLTAFTWLGQQYCWTRLPQGFLNSPALFNADVVDLLKEVPNVQVYVDDIYISHDDPREHLEQLEKVFSLLLNAGYVVSLKKSEIAQHEVEFLGFNITKEGRGLTETFKQKLLNITPPRDLKQLQSILGLLNFARNFIPNFSELVKPLYNIIATAPGKYITWTTDNSQQLQNIISMLNSAENLEERNPEVRLIMKVNTSPSAGYIRFYNEFAKRPIMYLNYVYTKAEVKFTNTEKLLTTIHKGLIKALDLGMGQEILVYSPIVSMTKIQKTPLPERKALPIRWITWMSYLEDPRIQFHYDKTLPELQQVPTVTDDIIAKIKHPSEFSMVFYTDGSAIKHPNVNKSHNAGMGIAQVQFKPEFTVINTWSIPLGDHTAQLAEVAAVEFACKKALKIDGPVLIVTDSFYVAESVNKELPYWQSNGFFNNKKKPLKHVSKWKSIADCIQLKPDIIIIHEKGHQPTASTFHTEGNNLADKLATQGSYVVNAGKRTADGSEFEKRTADGSEFESPKKKAKVE

SEQ ID NO: 636 - protein, 2176 aa, synthetic construct
MPAAKRVKLDGGDKKYSIGLDIGTNSVGWAVITDEYKVPSKKFKVLGNTDRHSIKKNLIGALLFDSGETAEATRLKRTARRRYTRRKNRICYLQEIFSNEMAKVDDSFFHRLEESFLVEEDKKHERHPIFGNIVDEVAYHEKYPTIYHLRKKLVDSTDKADLRLIYLALAHMIKFRGHFLIEGDLNPDNSDVDKLFIQLVQTYNQLFEENPINASGVDAKAILSARLSKSRRLENLIAQLPGEKKNGLFGNLIALSLGLTPNFKSNFDLAEDAKLQLSKDTYDDDLDNLLAQIGDQYADLFLAAKNLSDAILLSDILRVNTEITKAPLSASMIKRYDEHHQDLTLLKALVRQQLPEKYKEIFFDQSKNGYAGYIDGGASQEEFYKFIKPILEKMDGTEELLVKLNREDLLRKQRTFDNGSIPHQIHLGELHAILRRQEDFYPFLKDNREKIEKILTFRIPYYVGPLARGNSRFAWMTRKSEETITPWNFEEVVDKGASAQSFIERMTNFDKNLPNEKVLPKHSLLYEYFTVYNELTKVKYVTEGMRKPAFLSGEQKKAIVDLLFKTNRKVTVKQLKEDYFKKIECFDSVEISGVEDRFNASLGTYHDLLKIIKDKDFLDNEENEDILEDIVLTLTLFEDREMIEERLKTYAHLFDDKVMKQLKRRRYTGWGRLSRKLINGIRDKQSGKTILDFLKSDGFANRNFMQLIHDDSLTFKEDIQKAQVSGQGDSLHEHIANLAGSPAIKKGILQTVKVVDELVKVMGRHKPENIVIEMARENQTTQKGQKNSRERMKRIEEGIKELGSQILKEHPVENTQLQNEKLYLYYLQNGRDMYVDQELDINRLSDYDVDHIVPQSFLKDDSIDNKVLTRSDKARGKSDNVPSEEVVKKMKNYWRQLLNAKLITQRKFDNLTKAERGGLSELDKAGFIKRQLVETRQITKHVAQILDSRMNTKYDENDKLIREVKVITLKSKLVSDFRKDFQFYKVREINNYHHAHDAYLNAVVGTALIKKYPKLESEFVYGDYKVYDVRKMIAKSEQEIGKATAKYFFYSNIMNFFKTEITLANGEIRKRPLIETNGETGEIVWDKGRDFATVRKVLSMPQVNIVKKTEVQTGGFSKESILPKRNSDKLIARKKDWDPKKYGGFDSPTVAYSVLVVAKVEKGKSKKLKSVKELLGITIMERSSFEKNPIDFLEAKGYKEVKKDLIIKLPKYSLFELENGRKRMLASAGELQKGNELALPSKYVNFLYLASHYEKLKGSPEDNEQKQLFVEQHKHYLDEIIEQISEFSKRVILADANLDKVLSAYNKHRDKPIREQAENIIHLFTLTNLGAPAAFKYFDTTIDRKRYTSTKEVLDATLIHQSITGLYETRIDLSQLGGDGGEAAAKGGGPAPGGMDPLQLLQPLEAEIKGTKLKAHWNSGATITCVPQAFLEEEVPIKNIWIKTIHGEKEQPVYYLTFKIQGRKVEAEVISSPYDYILVSPSDIPWLMKKPLQLTTLVPLQEYEERLLKQTMLTGSYKEKLQSLFLKYDALWQHWENQVGHRRIKPHHIATGTVNPRPQKQYPINPKAKASIQTVINDLLKQGVLIQQNSIMNTPVYPVPKPDGKWRMVLDYREVNKTIPLIAAQNQHSAGILSSIFRGKYKTTLDLSNGFWAHSITPESYWLTAFTWLGQQYCWTRLPQGFLNSPALFNADVVDLLKEVPNVQVYVDDIYISHDDPREHLEQLEKVFSLLLNAGYVVSLKKSEIAQHEVEFLGFNITKEGRGLTETFKQKLLNITPPRDLKQLQSILGLLNFARNFIPNFSELVKPLYNIIATAPGKYITWTTDNSQQLQNIISMLNSAENLEERNPEVRLIMKVNTSPSAGYIRFYNEFAKRPIMYLNYVYTKAEVKFTNTEKLLTTIHKGLIKALDLGMGQEILVYSPIVSMTKIQKTPLPERKALPIRWITWMSYLEDPRIQFHYDKTLPELQQVPTVTDDIIAKIKHPSEFSMVFYTDGSAIKHPNVNKSHNAGMGIAQVQFKPEFTVINTWSIPLGDHTAQLAEVAAVEFACKKALKIDGPVLIVTDSFYVAESVNKELPYWQSNGFFNNKKKPLKHVSKWKSIADCIQLKPDIIIIHEKGHQPTASTFHTEGNNLADKLATQGSYVVNAGKRTADGSEFEKRTADGSEFESPKKKAKVE

SEQ ID NO: 637 - protein, 2180 aa, synthetic construct
MPAAKRVKLDGGDKKYSIGLDIGTNSVGWAVITDEYKVPSKKFKVLGNTDRHSIKKNLIGALLFDSGETAEATRLKRTARRRYTRRKNRICYLQEIFSNEMAKVDDSFFHRLEESFLVEEDKKHERHPIFGNIVDEVAYHEKYPTIYHLRKKLVDSTDKADLRLIYLALAHMIKFRGHFLIEGDLNPDNSDVDKLFIQLVQTYNQLFEENPINASGVDAKAILSARLSKSRRLENLIAQLPGEKKNGLFGNLIALSLGLTPNFKSNFDLAEDAKLQLSKDTYDDDLDNLLAQIGDQYADLFLAAKNLSDAILLSDILRVNTEITKAPLSASMIKRYDEHHQDLTLLKALVRQQLPEKYKEIFFDQSKNGYAGYIDGGASQEEFYKFIKPILEKMDGTEELLVKLNREDLLRKQRTFDNGSIPHQIHLGELHAILRRQEDFYPFLKDNREKIEKILTFRIPYYVGPLARGNSRFAWMTRKSEETITPWNFEEVVDKGASAQSFIERMTNFDKNLPNEKVLPKHSLLYEYFTVYNELTKVKYVTEGMRKPAFLSGEQKKAIVDLLFKTNRKVTVKQLKEDYFKKIECFDSVEISGVEDRFNASLGTYHDLLKIIKDKDFLDNEENEDILEDIVLTLTLFEDREMIEERLKTYAHLFDDKVMKQLKRRRYTGWGRLSRKLINGIRDKQSGKTILDFLKSDGFANRNFMQLIHDDSLTFKEDIQKAQVSGQGDSLHEHIANLAGSPAIKKGILQTVKVVDELVKVMGRHKPENIVIEMARENQTTQKGQKNSRERMKRIEEGIKELGSQILKEHPVENTQLQNEKLYLYYLQNGRDMYVDQELDINRLSDYDVDHIVPQSFLKDDSIDNKVLTRSDKARGKSDNVPSEEVVKKMKNYWRQLLNAKLITQRKFDNLTKAERGGLSELDKAGFIKRQLVETRQITKHVAQILDSRMNTKYDENDKLIREVKVITLKSKLVSDFRKDFQFYKVREINNYHHAHDAYLNAVVGTALIKKYPKLESEFVYGDYKVYDVRKMIAKSEQEIGKATAKYFFYSNIMNFFKTEITLANGEIRKRPLIETNGETGEIVWDKGRDFATVRKVLSMPQVNIVKKTEVQTGGFSKESILPKRNSDKLIARKKDWDPKKYGGFDSPTVAYSVLVVAKVEKGKSKKLKSVKELLGITIMERSSFEKNPIDFLEAKGYKEVKKDLIIKLPKYSLFELENGRKRMLASAGELQKGNELALPSKYVNFLYLASHYEKLKGSPEDNEQKQLFVEQHKHYLDEIIEQISEFSKRVILADANLDKVLSAYNKHRDKPIREQAENIIHLFTLTNLGAPAAFKYFDTTIDRKRYTSTKEVLDATLIHQSITGLYETRIDLSQLGGDGGGSSGSSGSSGSSGSSGGMDPLQLLQPLEAEIKGTKLKAHWNSGATITCVPQAFLEEEVPIKNIWIKTIHGEKEQPVYYLTFKIQGRKVEAEVISSPYDYILVSPSDIPWLMKKPLQLTTLVPLQEYEERLLKQTMLTGSYKEKLQSLFLKYDALWQHWENQVGHRRIKPHHIATGTVNPRPQKQYPINPKAKASIQTVINDLLKQGVLIQQNSIMNTPVYPVPKPDGKWRMVLDYREVNKTIPLIAAQNQHSAGILSSIFRGKYKTTLDLSNGFWAHSITPESYWLTAFTWLGQQYCWTRLPQGFLNSPALFNADVVDLLKEVPNVQVYVDDIYISHDDPREHLEQLEKVFSLLLNAGYVVSLKKSEIAQHEVEFLGFNITKEGRGLTETFKQKLLNITPPRDLKQLQSILGLLNFARNFIPNFSELVKPLYNIIATAPGKYITWTTDNSQQLQNIISMLNSAENLEERNPEVRLIMKVNTSPSAGYIRFYNEFAKRPIMYLNYVYTKAEVKFTNTEKLLTTIHKGLIKALDLGMGQEILVYSPIVSMTKIQKTPLPERKALPIRWITWMSYLEDPRIQFHYDKTLPELQQVPTVTDDIIAKIKHPSEFSMVFYTDGSAIKHPNVNKSHNAGMGIAQVQFKPEFTVINTWSIPLGDHTAQLAEVAAVEFACKKALKIDGPVLIVTDSFYVAESVNKELPYWQSNGFFNNKKKPLKHVSKWKSIADCIQLKPDIIIIHEKGHQPTASTFHTEGNNLADKLATQGSYVVNAGKRTADGSEFEKRTADGSEFESPKKKAKVE

SEQ ID NO: 638 - protein, 2173 aa, synthetic construct
MPAAKRVKLDGGDKKYSIGLDIGTNSVGWAVITDEYKVPSKKFKVLGNTDRHSIKKNLIGALLFDSGETAEATRLKRTARRRYTRRKNRICYLQEIFSNEMAKVDDSFFHRLEESFLVEEDKKHERHPIFGNIVDEVAYHEKYPTIYHLRKKLVDSTDKADLRLIYLALAHMIKFRGHFLIEGDLNPDNSDVDKLFIQLVQTYNQLFEENPINASGVDAKAILSARLSKSRRLENLIAQLPGEKKNGLFGNLIALSLGLTPNFKSNFDLAEDAKLQLSKDTYDDDLDNLLAQIGDQYADLFLAAKNLSDAILLSDILRVNTEITKAPLSASMIKRYDEHHQDLTLLKALVRQQLPEKYKEIFFDQSKNGYAGYIDGGASQEEFYKFIKPILEKMDGTEELLVKLNREDLLRKQRTFDNGSIPHQIHLGELHAILRRQEDFYPFLKDNREKIEKILTFRIPYYVGPLARGNSRFAWMTRKSEETITPWNFEEVVDKGASAQSFIERMTNFDKNLPNEKVLPKHSLLYEYFTVYNELTKVKYVTEGMRKPAFLSGEQKKAIVDLLFKTNRKVTVKQLKEDYFKKIECFDSVEISGVEDRFNASLGTYHDLLKIIKDKDFLDNEENEDILEDIVLTLTLFEDREMIEERLKTYAHLFDDKVMKQLKRRRYTGWGRLSRKLINGIRDKQSGKTILDFLKSDGFANRNFMQLIHDDSLTFKEDIQKAQVSGQGDSLHEHIANLAGSPAIKKGILQTVKVVDELVKVMGRHKPENIVIEMARENQTTQKGQKNSRERMKRIEEGIKELGSQILKEHPVENTQLQNEKLYLYYLQNGRDMYVDQELDINRLSDYDVDHIVPQSFLKDDSIDNKVLTRSDKARGKSDNVPSEEVVKKMKNYWRQLLNAKLITQRKFDNLTKAERGGLSELDKAGFIKRQLVETRQITKHVAQILDSRMNTKYDENDKLIREVKVITLKSKLVSDFRKDFQFYKVREINNYHHAHDAYLNAVVGTALIKKYPKLESEFVYGDYKVYDVRKMIAKSEQEIGKATAKYFFYSNIMNFFKTEITLANGEIRKRPLIETNGETGEIVWDKGRDFATVRKVLSMPQVNIVKKTEVQTGGFSKESILPKRNSDKLIARKKDWDPKKYGGFDSPTVAYSVLVVAKVEKGKSKKLKSVKELLGITIMERSSFEKNPIDFLEAKGYKEVKKDLIIKLPKYSLFELENGRKRMLASAGELQKGNELALPSKYVNFLYLASHYEKLKGSPEDNEQKQLFVEQHKHYLDEIIEQISEFSKRVILADANLDKVLSAYNKHRDKPIREQAENIIHLFTLTNLGAPAAFKYFDTTIDRKRYTSTKEVLDATLIHQSITGLYETRIDLSQLGGDGGEAAAKGSSGGMDPLQLLQPLEAEIKGTKLKAHWNSGATITCVPQAFLEEEVPIKNIWIKTIHGEKEQPVYYLTFKIQGRKVEAEVISSPYDYILVSPSDIPWLMKKPLQLTTLVPLQEYEERLLKQTMLTGSYKEKLQSLFLKYDALWQHWENQVGHRRIKPHHIATGTVNPRPQKQYPINPKAKASIQTVINDLLKQGVLIQQNSIMNTPVYPVPKPDGKWRMVLDYREVNKTIPLIAAQNQHSAGILSSIFRGKYKTTLDLSNGFWAHSITPESYWLTAFTWLGQQYCWTRLPQGFLNSPALFNADVVDLLKEVPNVQVYVDDIYISHDDPREHLEQLEKVFSLLLNAGYVVSLKKSEIAQHEVEFLGFNITKEGRGLTETFKQKLLNITPPRDLKQLQSILGLLNFARNFIPNFSELVKPLYNIIATAPGKYITWTTDNSQQLQNIISMLNSAENLEERNPEVRLIMKVNTSPSAGYIRFYNEFAKRPIMYLNYVYTKAEVKFTNTEKLLTTIHKGLIKALDLGMGQEILVYSPIVSMTKIQKTPLPERKALPIRWITWMSYLEDPRIQFHYDKTLPELQQVPTVTDDIIAKIKHPSEFSMVFYTDGSAIKHPNVNKSHNAGMGIAQVQFKPEFTVINTWSIPLGDHTAQLAEVAAVEFACKKALKIDGPVLIVTDSFYVAESVNKELPYWQSNGFFNNKKKPLKHVSKWKSIADCIQLKPDIIIIHEKGHQPTASTFHTEGNNLADKLATQGSYVVNAGKRTADGSEFEKRTADGSEFESPKKKAKVE

SEQ ID NO: 639 - protein, 2172 aa, synthetic construct
MPAAKRVKLDGGDKKYSIGLDIGTNSVGWAVITDEYKVPSKKFKVLGNTDRHSIKKNLIGALLFDSGETAEATRLKRTARRRYTRRKNRICYLQEIFSNEMAKVDDSFFHRLEESFLVEEDKKHERHPIFGNIVDEVAYHEKYPTIYHLRKKLVDSTDKADLRLIYLALAHMIKFRGHFLIEGDLNPDNSDVDKLFIQLVQTYNQLFEENPINASGVDAKAILSARLSKSRRLENLIAQLPGEKKNGLFGNLIALSLGLTPNFKSNFDLAEDAKLQLSKDTYDDDLDNLLAQIGDQYADLFLAAKNLSDAILLSDILRVNTEITKAPLSASMIKRYDEHHQDLTLLKALVRQQLPEKYKEIFFDQSKNGYAGYIDGGASQEEFYKFIKPILEKMDGTEELLVKLNREDLLRKQRTFDNGSIPHQIHLGELHAILRRQEDFYPFLKDNREKIEKILTFRIPYYVGPLARGNSRFAWMTRKSEETITPWNFEEVVDKGASAQSFIERMTNFDKNLPNEKVLPKHSLLYEYFTVYNELTKVKYVTEGMRKPAFLSGEQKKAIVDLLFKTNRKVTVKQLKEDYFKKIECFDSVEISGVEDRFNASLGTYHDLLKIIKDKDFLDNEENEDILEDIVLTLTLFEDREMIEERLKTYAHLFDDKVMKQLKRRRYTGWGRLSRKLINGIRDKQSGKTILDFLKSDGFANRNFMQLIHDDSLTFKEDIQKAQVSGQGDSLHEHIANLAGSPAIKKGILQTVKVVDELVKVMGRHKPENIVIEMARENQTTQKGQKNSRERMKRIEEGIKELGSQILKEHPVENTQLQNEKLYLYYLQNGRDMYVDQELDINRLSDYDVDHIVPQSFLKDDSIDNKVLTRSDKARGKSDNVPSEEVVKKMKNYWRQLLNAKLITQRKFDNLTKAERGGLSELDKAGFIKRQLVETRQITKHVAQILDSRMNTKYDENDKLIREVKVITLKSKLVSDFRKDFQFYKVREINNYHHAHDAYLNAVVGTALIKKYPKLESEFVYGDYKVYDVRKMIAKSEQEIGKATAKYFFYSNIMNFFKTEITLANGEIRKRPLIETNGETGEIVWDKGRDFATVRKVLSMPQVNIVKKTEVQTGGFSKESILPKRNSDKLIARKKDWDPKKYGGFDSPTVAYSVLVVAKVEKGKSKKLKSVKELLGITIMERSSFEKNPIDFLEAKGYKEVKKDLIIKLPKYSLFELENGRKRMLASAGELQKGNELALPSKYVNFLYLASHYEKLKGSPEDNEQKQLFVEQHKHYLDEIIEQISEFSKRVILADANLDKVLSAYNKHRDKPIREQAENIIHLFTLTNLGAPAAFKYFDTTIDRKRYTSTKEVLDATLIHQSITGLYETRIDLSQLGGDGGGGGGGGGGGMDPLQLLQPLEAEIKGTKLKAHWNSGATITCVPQAFLEEEVPIKNIWIKTIHGEKEQPVYYLTFKIQGRKVEAEVISSPYDYILVSPSDIPWLMKKPLQLTTLVPLQEYEERLLKQTMLTGSYKEKLQSLFLKYDALWQHWENQVGHRRIKPHHIATGTVNPRPQKQYPINPKAKASIQTVINDLLKQGVLIQQNSIMNTPVYPVPKPDGKWRMVLDYREVNKTIPLIAAQNQHSAGILSSIFRGKYKTTLDLSNGFWAHSITPESYWLTAFTWLGQQYCWTRLPQGFLNSPALFNADVVDLLKEVPNVQVYVDDIYISHDDPREHLEQLEKVFSLLLNAGYVVSLKKSEIAQHEVEFLGFNITKEGRGLTETFKQKLLNITPPRDLKQLQSILGLLNFARNFIPNFSELVKPLYNIIATAPGKYITWTTDNSQQLQNIISMLNSAENLEERNPEVRLIMKVNTSPSAGYIRFYNEFAKRPIMYLNYVYTKAEVKFTNTEKLLTTIHKGLIKALDLGMGQEILVYSPIVSMTKIQKTPLPERKALPIRWITWMSYLEDPRIQFHYDKTLPELQQVPTVTDDIIAKIKHPSEFSMVFYTDGSAIKHPNVNKSHNAGMGIAQVQFKPEFTVINTWSIPLGDHTAQLAEVAAVEFACKKALKIDGPVLIVTDSFYVAESVNKELPYWQSNGFFNNKKKPLKHVSKWKSIADCIQLKPDIIIIHEKGHQPTASTFHTEGNNLADKLATQGSYVVNAGKRTADGSEFEKRTADGSEFESPKKKAKVE

SEQ ID NO: 640 - protein, 2176 aa, synthetic construct
MPAAKRVKLDGGDKKYSIGLDIGTNSVGWAVITDEYKVPSKKFKVLGNTDRHSIKKNLIGALLFDSGETAEATRLKRTARRRYTRRKNRICYLQEIFSNEMAKVDDSFFHRLEESFLVEEDKKHERHPIFGNIVDEVAYHEKYPTIYHLRKKLVDSTDKADLRLIYLALAHMIKFRGHFLIEGDLNPDNSDVDKLFIQLVQTYNQLFEENPINASGVDAKAILSARLSKSRRLENLIAQLPGEKKNGLFGNLIALSLGLTPNFKSNFDLAEDAKLQLSKDTYDDDLDNLLAQIGDQYADLFLAAKNLSDAILLSDILRVNTEITKAPLSASMIKRYDEHHQDLTLLKALVRQQLPEKYKEIFFDQSKNGYAGYIDGGASQEEFYKFIKPILEKMDGTEELLVKLNREDLLRKQRTFDNGSIPHQIHLGELHAILRRQEDFYPFLKDNREKIEKILTFRIPYYVGPLARGNSRFAWMTRKSEETITPWNFEEVVDKGASAQSFIERMTNFDKNLPNEKVLPKHSLLYEYFTVYNELTKVKYVTEGMRKPAFLSGEQKKAIVDLLFKTNRKVTVKQLKEDYFKKIECFDSVEISGVEDRFNASLGTYHDLLKIIKDKDFLDNEENEDILEDIVLTLTLFEDREMIEERLKTYAHLFDDKVMKQLKRRRYTGWGRLSRKLINGIRDKQSGKTILDFLKSDGFANRNFMQLIHDDSLTFKEDIQKAQVSGQGDSLHEHIANLAGSPAIKKGILQTVKVVDELVKVMGRHKPENIVIEMARENQTTQKGQKNSRERMKRIEEGIKELGSQILKEHPVENTQLQNEKLYLYYLQNGRDMYVDQELDINRLSDYDVDHIVPQSFLKDDSIDNKVLTRSDKARGKSDNVPSEEVVKKMKNYWRQLLNAKLITQRKFDNLTKAERGGLSELDKAGFIKRQLVETRQITKHVAQILDSRMNTKYDENDKLIREVKVITLKSKLVSDFRKDFQFYKVREINNYHHAHDAYLNAVVGTALIKKYPKLESEFVYGDYKVYDVRKMIAKSEQEIGKATAKYFFYSNIMNFFKTEITLANGEIRKRPLIETNGETGEIVWDKGRDFATVRKVLSMPQVNIVKKTEVQTGGFSKESILPKRNSDKLIARKKDWDPKKYGGFDSPTVAYSVLVVAKVEKGKSKKLKSVKELLGITIMERSSFEKNPIDFLEAKGYKEVKKDLIIKLPKYSLFELENGRKRMLASAGELQKGNELALPSKYVNFLYLASHYEKLKGSPEDNEQKQLFVEQHKHYLDEIIEQISEFSKRVILADANLDKVLSAYNKHRDKPIREQAENIIHLFTLTNLGAPAAFKYFDTTIDRKRYTSTKEVLDATLIHQSITGLYETRIDLSQLGGDGGGGSEAAAKGSSGGMDPLQLLQPLEAEIKGTKLKAHWNSGATITCVPQAFLEEEVPIKNIWIKTIHGEKEQPVYYLTFKIQGRKVEAEVISSPYDYILVSPSDIPWLMKKPLQLTTLVPLQEYEERLLKQTMLTGSYKEKLQSLFLKYDALWQHWENQVGHRRIKPHHIATGTVNPRPQKQYPINPKAKASIQTVINDLLKQGVLIQQNSIMNTPVYPVPKPDGKWRMVLDYREVNKTIPLIAAQNQHSAGILSSIFRGKYKTTLDLSNGFWAHSITPESYWLTAFTWLGQQYCWTRLPQGFLNSPALFNADVVDLLKEVPNVQVYVDDIYISHDDPREHLEQLEKVFSLLLNAGYVVSLKKSEIAQHEVEFLGFNITKEGRGLTETFKQKLLNITPPRDLKQLQSILGLLNFARNFIPNFSELVKPLYNIIATAPGKYITWTTDNSQQLQNIISMLNSAENLEERNPEVRLIMKVNTSPSAGYIRFYNEFAKRPIMYLNYVYTKAEVKFTNTEKLLTTIHKGLIKALDLGMGQEILVYSPIVSMTKIQKTPLPERKALPIRWITWMSYLEDPRIQFHYDKTLPELQQVPTVTDDIIAKIKHPSEFSMVFYTDGSAIKHPNVNKSHNAGMGIAQVQFKPEFTVINTWSIPLGDHTAQLAEVAAVEFACKKALKIDGPVLIVTDSFYVAESVNKELPYWQSNGFFNNKKKPLKHVSKWKSIADCIQLKPDIIIIHEKGHQPTASTFHTEGNNLADKLATQGSYVVNAGKRTADGSEFEKRTADGSEFESPKKKAKVE

SEQ ID NO: 641 - protein, 2176 aa, synthetic construct
MPAAKRVKLDGGDKKYSIGLDIGTNSVGWAVITDEYKVPSKKFKVLGNTDRHSIKKNLIGALLFDSGETAEATRLKRTARRRYTRRKNRICYLQEIFSNEMAKVDDSFFHRLEESFLVEEDKKHERHPIFGNIVDEVAYHEKYPTIYHLRKKLVDSTDKADLRLIYLALAHMIKFRGHFLIEGDLNPDNSDVDKLFIQLVQTYNQLFEENPINASGVDAKAILSARLSKSRRLENLIAQLPGEKKNGLFGNLIALSLGLTPNFKSNFDLAEDAKLQLSKDTYDDDLDNLLAQIGDQYADLFLAAKNLSDAILLSDILRVNTEITKAPLSASMIKRYDEHHQDLTLLKALVRQQLPEKYKEIFFDQSKNGYAGYIDGGASQEEFYKFIKPILEKMDGTEELLVKLNREDLLRKQRTFDNGSIPHQIHLGELHAILRRQEDFYPFLKDNREKIEKILTFRIPYYVGPLARGNSRFAWMTRKSEETITPWNFEEVVDKGASAQSFIERMTNFDKNLPNEKVLPKHSLLYEYFTVYNELTKVKYVTEGMRKPAFLSGEQKKAIVDLLFKTNRKVTVKQLKEDYFKKIECFDSVEISGVEDRFNASLGTYHDLLKIIKDKDFLDNEENEDILEDIVLTLTLFEDREMIEERLKTYAHLFDDKVMKQLKRRRYTGWGRLSRKLINGIRDKQSGKTILDFLKSDGFANRNFMQLIHDDSLTFKEDIQKAQVSGQGDSLHEHIANLAGSPAIKKGILQTVKVVDELVKVMGRHKPENIVIEMARENQTTQKGQKNSRERMKRIEEGIKELGSQILKEHPVENTQLQNEKLYLYYLQNGRDMYVDQELDINRLSDYDVDHIVPQSFLKDDSIDNKVLTRSDKARGKSDNVPSEEVVKKMKNYWRQLLNAKLITQRKFDNLTKAERGGLSELDKAGFIKRQLVETRQITKHVAQILDSRMNTKYDENDKLIREVKVITLKSKLVSDFRKDFQFYKVREINNYHHAHDAYLNAVVGTALIKKYPKLESEFVYGDYKVYDVRKMIAKSEQEIGKATAKYFFYSNIMNFFKTEITLANGEIRKRPLIETNGETGEIVWDKGRDFATVRKVLSMPQVNIVKKTEVQTGGFSKESILPKRNSDKLIARKKDWDPKKYGGFDSPTVAYSVLVVAKVEKGKSKKLKSVKELLGITIMERSSFEKNPIDFLEAKGYKEVKKDLIIKLPKYSLFELENGRKRMLASAGELQKGNELALPSKYVNFLYLASHYEKLKGSPEDNEQKQLFVEQHKHYLDEIIEQISEFSKRVILADANLDKVLSAYNKHRDKPIREQAENIIHLFTLTNLGAPAAFKYFDTTIDRKRYTSTKEVLDATLIHQSITGLYETRIDLSQLGGDGGPAPEAAAKGGSGGMDPLQLLQPLEAEIKGTKLKAHWNSGATITCVPQAFLEEEVPIKNIWIKTIHGEKEQPVYYLTFKIQGRKVEAEVISSPYDYILVSPSDIPWLMKKPLQLTTLVPLQEYEERLLKQTMLTGSYKEKLQSLFLKYDALWQHWENQVGHRRIKPHHIATGTVNPRPQKQYPINPKAKASIQTVINDLLKQGVLIQQNSIMNTPVYPVPKPDGKWRMVLDYREVNKTIPLIAAQNQHSAGILSSIFRGKYKTTLDLSNGFWAHSITPESYWLTAFTWLGQQYCWTRLPQGFLNSPALFNADVVDLLKEVPNVQVYVDDIYISHDDPREHLEQLEKVFSLLLNAGYVVSLKKSEIAQHEVEFLGFNITKEGRGLTETFKQKLLNITPPRDLKQLQSILGLLNFARNFIPNFSELVKPLYNIIATAPGKYITWTTDNSQQLQNIISMLNSAENLEERNPEVRLIMKVNTSPSAGYIRFYNEFAKRPIMYLNYVYTKAEVKFTNTEKLLTTIHKGLIKALDLGMGQEILVYSPIVSMTKIQKTPLPERKALPIRWITWMSYLEDPRIQFHYDKTLPELQQVPTVTDDIIAKIKHPSEFSMVFYTDGSAIKHPNVNKSHNAGMGIAQVQFKPEFTVINTWSIPLGDHTAQLAEVAAVEFACKKALKIDGPVLIVTDSFYVAESVNKELPYWQSNGFFNNKKKPLKHVSKWKSIADCIQLKPDIIIIHEKGHQPTASTFHTEGNNLADKLATQGSYVVNAGKRTADGSEFEKRTADGSEFESPKKKAKVE

SEQ ID NO: 642 - protein, 2173 aa, synthetic construct
MPAAKRVKLDGGDKKYSIGLDIGTNSVGWAVITDEYKVPSKKFKVLGNTDRHSIKKNLIGALLFDSGETAEATRLKRTARRRYTRRKNRICYLQEIFSNEMAKVDDSFFHRLEESFLVEEDKKHERHPIFGNIVDEVAYHEKYPTIYHLRKKLVDSTDKADLRLIYLALAHMIKFRGHFLIEGDLNPDNSDVDKLFIQLVQTYNQLFEENPINASGVDAKAILSARLSKSRRLENLIAQLPGEKKNGLFGNLIALSLGLTPNFKSNFDLAEDAKLQLSKDTYDDDLDNLLAQIGDQYADLFLAAKNLSDAILLSDILRVNTEITKAPLSASMIKRYDEHHQDLTLLKALVRQQLPEKYKEIFFDQSKNGYAGYIDGGASQEEFYKFIKPILEKMDGTEELLVKLNREDLLRKQRTFDNGSIPHQIHLGELHAILRRQEDFYPFLKDNREKIEKILTFRIPYYVGPLARGNSRFAWMTRKSEETITPWNFEEVVDKGASAQSFIERMTNFDKNLPNEKVLPKHSLLYEYFTVYNELTKVKYVTEGMRKPAFLSGEQKKAIVDLLFKTNRKVTVKQLKEDYFKKIECFDSVEISGVEDRFNASLGTYHDLLKIIKDKDFLDNEENEDILEDIVLTLTLFEDREMIEERLKTYAHLFDDKVMKQLKRRRYTGWGRLSRKLINGIRDKQSGKTILDFLKSDGFANRNFMQLIHDDSLTFKEDIQKAQVSGQGDSLHEHIANLAGSPAIKKGILQTVKVVDELVKVMGRHKPENIVIEMARENQTTQKGQKNSRERMKRIEEGIKELGSQILKEHPVENTQLQNEKLYLYYLQNGRDMYVDQELDINRLSDYDVDHIVPQSFLKDDSIDNKVLTRSDKARGKSDNVPSEEVVKKMKNYWRQLLNAKLITQRKFDNLTKAERGGLSELDKAGFIKRQLVETRQITKHVAQILDSRMNTKYDENDKLIREVKVITLKSKLVSDFRKDFQFYKVREINNYHHAHDAYLNAVVGTALIKKYPKLESEFVYGDYKVYDVRKMIAKSEQEIGKATAKYFFYSNIMNFFKTEITLANGEIRKRPLIETNGETGEIVWDKGRDFATVRKVLSMPQVNIVKKTEVQTGGFSKESILPKRNSDKLIARKKDWDPKKYGGFDSPTVAYSVLVVAKVEKGKSKKLKSVKELLGITIMERSSFEKNPIDFLEAKGYKEVKKDLIIKLPKYSLFELENGRKRMLASAGELQKGNELALPSKYVNFLYLASHYEKLKGSPEDNEQKQLFVEQHKHYLDEIIEQISEFSKRVILADANLDKVLSAYNKHRDKPIREQAENIIHLFTLTNLGAPAAFKYFDTTIDRKRYTSTKEVLDATLIHQSITGLYETRIDLSQLGGDGGGGGGGGGGGGMDPLQLLQPLEAEIKGTKLKAHWNSGATITCVPQAFLEEEVPIKNIWIKTIHGEKEQPVYYLTFKIQGRKVEAEVISSPYDYILVSPSDIPWLMKKPLQLTTLVPLQEYEERLLKQTMLTGSYKEKLQSLFLKYDALWQHWENQVGHRRIKPHHIATGTVNPRPQKQYPINPKAKASIQTVINDLLKQGVLIQQNSIMNTPVYPVPKPDGKWRMVLDYREVNKTIPLIAAQNQHSAGILSSIFRGKYKTTLDLSNGFWAHSITPESYWLTAFTWLGQQYCWTRLPQGFLNSPALFNADVVDLLKEVPNVQVYVDDIYISHDDPREHLEQLEKVFSLLLNAGYVVSLKKSEIAQHEVEFLGFNITKEGRGLTETFKQKLLNITPPRDLKQLQSILGLLNFARNFIPNFSELVKPLYNIIATAPGKYITWTTDNSQQLQNIISMLNSAENLEERNPEVRLIMKVNTSPSAGYIRFYNEFAKRPIMYLNYVYTKAEVKFTNTEKLLTTIHKGLIKALDLGMGQEILVYSPIVSMTKIQKTPLPERKALPIRWITWMSYLEDPRIQFHYDKTLPELQQVPTVTDDIIAKIKHPSEFSMVFYTDGSAIKHPNVNKSHNAGMGIAQVQFKPEFTVINTWSIPLGDHTAQLAEVAAVEFACKKALKIDGPVLIVTDSFYVAESVNKELPYWQSNGFFNNKKKPLKHVSKWKSIADCIQLKPDIIIIHEKGHQPTASTFHTEGNNLADKLATQGSYVVNAGKRTADGSEFEKRTADGSEFESPKKKAKVE

SEQ ID NO: 643 - protein, 2171 aa, synthetic construct
MPAAKRVKLDGGDKKYSIGLDIGTNSVGWAVITDEYKVPSKKFKVLGNTDRHSIKKNLIGALLFDSGETAEATRLKRTARRRYTRRKNRICYLQEIFSNEMAKVDDSFFHRLEESFLVEEDKKHERHPIFGNIVDEVAYHEKYPTIYHLRKKLVDSTDKADLRLIYLALAHMIKFRGHFLIEGDLNPDNSDVDKLFIQLVQTYNQLFEENPINASGVDAKAILSARLSKSRRLENLIAQLPGEKKNGLFGNLIALSLGLTPNFKSNFDLAEDAKLQLSKDTYDDDLDNLLAQIGDQYADLFLAAKNLSDAILLSDILRVNTEITKAPLSASMIKRYDEHHQDLTLLKALVRQQLPEKYKEIFFDQSKNGYAGYIDGGASQEEFYKFIKPILEKMDGTEELLVKLNREDLLRKQRTFDNGSIPHQIHLGELHAILRRQEDFYPFLKDNREKIEKILTFRIPYYVGPLARGNSRFAWMTRKSEETITPWNFEEVVDKGASAQSFIERMTNFDKNLPNEKVLPKHSLLYEYFTVYNELTKVKYVTEGMRKPAFLSGEQKKAIVDLLFKTNRKVTVKQLKEDYFKKIECFDSVEISGVEDRFNASLGTYHDLLKIIKDKDFLDNEENEDILEDIVLTLTLFEDREMIEERLKTYAHLFDDKVMKQLKRRRYTGWGRLSRKLINGIRDKQSGKTILDFLKSDGFANRNFMQLIHDDSLTFKEDIQKAQVSGQGDSLHEHIANLAGSPAIKKGILQTVKVVDELVKVMGRHKPENIVIEMARENQTTQKGQKNSRERMKRIEEGIKELGSQILKEHPVENTQLQNEKLYLYYLQNGRDMYVDQELDINRLSDYDVDHIVPQSFLKDDSIDNKVLTRSDKARGKSDNVPSEEVVKKMKNYWRQLLNAKLITQRKFDNLTKAERGGLSELDKAGFIKRQLVETRQITKHVAQILDSRMNTKYDENDKLIREVKVITLKSKLVSDFRKDFQFYKVREINNYHHAHDAYLNAVVGTALIKKYPKLESEFVYGDYKVYDVRKMIAKSEQEIGKATAKYFFYSNIMNFFKTEITLANGEIRKRPLIETNGETGEIVWDKGRDFATVRKVLSMPQVNIVKKTEVQTGGFSKESILPKRNSDKLIARKKDWDPKKYGGFDSPTVAYSVLVVAKVEKGKSKKLKSVKELLGITIMERSSFEKNPIDFLEAKGYKEVKKDLIIKLPKYSLFELENGRKRMLASAGELQKGNELALPSKYVNFLYLASHYEKLKGSPEDNEQKQLFVEQHKHYLDEIIEQISEFSKRVILADANLDKVLSAYNKHRDKPIREQAENIIHLFTLTNLGAPAAFKYFDTTIDRKRYTSTKEVLDATLIHQSITGLYETRIDLSQLGGDGGGGSGSSGGMDPLQLLQPLEAEIKGTKLKAHWNSGATITCVPQAFLEEEVPIKNIWIKTIHGEKEQPVYYLTFKIQGRKVEAEVISSPYDYILVSPSDIPWLMKKPLQLTTLVPLQEYEERLLKQTMLTGSYKEKLQSLFLKYDALWQHWENQVGHRRIKPHHIATGTVNPRPQKQYPINPKAKASIQTVINDLLKQGVLIQQNSIMNTPVYPVPKPDGKWRMVLDYREVNKTIPLIAAQNQHSAGILSSIFRGKYKTTLDLSNGFWAHSITPESYWLTAFTWLGQQYCWTRLPQGFLNSPALFNADVVDLLKEVPNVQVYVDDIYISHDDPREHLEQLEKVFSLLLNAGYVVSLKKSEIAQHEVEFLGFNITKEGRGLTETFKQKLLNITPPRDLKQLQSILGLLNFARNFIPNFSELVKPLYNIIATAPGKYITWTTDNSQQLQNIISMLNSAENLEERNPEVRLIMKVNTSPSAGYIRFYNEFAKRPIMYLNYVYTKAEVKFTNTEKLLTTIHKGLIKALDLGMGQEILVYSPIVSMTKIQKTPLPERKALPIRWITWMSYLEDPRIQFHYDKTLPELQQVPTVTDDIIAKIKHPSEFSMVFYTDGSAIKHPNVNKSHNAGMGIAQVQFKPEFTVINTWSIPLGDHTAQLAEVAAVEFACKKALKIDGPVLIVTDSFYVAESVNKELPYWQSNGFFNNKKKPLKHVSKWKSIADCIQLKPDIIIIHEKGHQPTASTFHTEGNNLADKLATQGSYVVNAGKRTADGSEFEKRTADGSEFESPKKKAKVE

SEQ ID NO: 644 - protein, 2171 aa, synthetic construct
MPAAKRVKLDGGDKKYSIGLDIGTNSVGWAVITDEYKVPSKKFKVLGNTDRHSIKKNLIGALLFDSGETAEATRLKRTARRRYTRRKNRICYLQEIFSNEMAKVDDSFFHRLEESFLVEEDKKHERHPIFGNIVDEVAYHEKYPTIYHLRKKLVDSTDKADLRLIYLALAHMIKFRGHFLIEGDLNPDNSDVDKLFIQLVQTYNQLFEENPINASGVDAKAILSARLSKSRRLENLIAQLPGEKKNGLFGNLIALSLGLTPNFKSNFDLAEDAKLQLSKDTYDDDLDNLLAQIGDQYADLFLAAKNLSDAILLSDILRVNTEITKAPLSASMIKRYDEHHQDLTLLKALVRQQLPEKYKEIFFDQSKNGYAGYIDGGASQEEFYKFIKPILEKMDGTEELLVKLNREDLLRKQRTFDNGSIPHQIHLGELHAILRRQEDFYPFLKDNREKIEKILTFRIPYYVGPLARGNSRFAWMTRKSEETITPWNFEEVVDKGASAQSFIERMTNFDKNLPNEKVLPKHSLLYEYFTVYNELTKVKYVTEGMRKPAFLSGEQKKAIVDLLFKTNRKVTVKQLKEDYFKKIECFDSVEISGVEDRFNASLGTYHDLLKIIKDKDFLDNEENEDILEDIVLTLTLFEDREMIEERLKTYAHLFDDKVMKQLKRRRYTGWGRLSRKLINGIRDKQSGKTILDFLKSDGFANRNFMQLIHDDSLTFKEDIQKAQVSGQGDSLHEHIANLAGSPAIKKGILQTVKVVDELVKVMGRHKPENIVIEMARENQTTQKGQKNSRERMKRIEEGIKELGSQILKEHPVENTQLQNEKLYLYYLQNGRDMYVDQELDINRLSDYDVDHIVPQSFLKDDSIDNKVLTRSDKARGKSDNVPSEEVVKKMKNYWRQLLNAKLITQRKFDNLTKAERGGLSELDKAGFIKRQLVETRQITKHVAQILDSRMNTKYDENDKLIREVKVITLKSKLVSDFRKDFQFYKVREINNYHHAHDAYLNAVVGTALIKKYPKLESEFVYGDYKVYDVRKMIAKSEQEIGKATAKYFFYSNIMNFFKTEITLANGEIRKRPLIETNGETGEIVWDKGRDFATVRKVLSMPQVNIVKKTEVQTGGFSKESILPKRNSDKLIARKKDWDPKKYGGFDSPTVAYSVLVVAKVEKGKSKKLKSVKELLGITIMERSSFEKNPIDFLEAKGYKEVKKDLIIKLPKYSLFELENGRKRMLASAGELQKGNELALPSKYVNFLYLASHYEKLKGSPEDNEQKQLFVEQHKHYLDEIIEQISEFSKRVILADANLDKVLSAYNKHRDKPIREQAENIIHLFTLTNLGAPAAFKYFDTTIDRKRYTSTKEVLDATLIHQSITGLYETRIDLSQLGGDGGGGGGGGGGMDPLQLLQPLEAEIKGTKLKAHWNSGATITCVPQAFLEEEVPIKNIWIKTIHGEKEQPVYYLTFKIQGRKVEAEVISSPYDYILVSPSDIPWLMKKPLQLTTLVPLQEYEERLLKQTMLTGSYKEKLQSLFLKYDALWQHWENQVGHRRIKPHHIATGTVNPRPQKQYPINPKAKASIQTVINDLLKQGVLIQQNSIMNTPVYPVPKPDGKWRMVLDYREVNKTIPLIAAQNQHSAGILSSIFRGKYKTTLDLSNGFWAHSITPESYWLTAFTWLGQQYCWTRLPQGFLNSPALFNADVVDLLKEVPNVQVYVDDIYISHDDPREHLEQLEKVFSLLLNAGYVVSLKKSEIAQHEVEFLGFNITKEGRGLTETFKQKLLNITPPRDLKQLQSILGLLNFARNFIPNFSELVKPLYNIIATAPGKYITWTTDNSQQLQNIISMLNSAENLEERNPEVRLIMKVNTSPSAGYIRFYNEFAKRPIMYLNYVYTKAEVKFTNTEKLLTTIHKGLIKALDLGMGQEILVYSPIVSMTKIQKTPLPERKALPIRWITWMSYLEDPRIQFHYDKTLPELQQVPTVTDDIIAKIKHPSEFSMVFYTDGSAIKHPNVNKSHNAGMGIAQVQFKPEFTVINTWSIPLGDHTAQLAEVAAVEFACKKALKIDGPVLIVTDSFYVAESVNKELPYWQSNGFFNNKKKPLKHVSKWKSIADCIQLKPDIIIIHEKGHQPTASTFHTEGNNLADKLATQGSYVVNAGKRTADGSEFEKRTADGSEFESPKKKAKVE

SEQ ID NO: 645 - protein, 2174 aa, synthetic construct
MPAAKRVKLDGGDKKYSIGLDIGTNSVGWAVITDEYKVPSKKFKVLGNTDRHSIKKNLIGALLFDSGETAEATRLKRTARRRYTRRKNRICYLQEIFSNEMAKVDDSFFHRLEESFLVEEDKKHERHPIFGNIVDEVAYHEKYPTIYHLRKKLVDSTDKADLRLIYLALAHMIKFRGHFLIEGDLNPDNSDVDKLFIQLVQTYNQLFEENPINASGVDAKAILSARLSKSRRLENLIAQLPGEKKNGLFGNLIALSLGLTPNFKSNFDLAEDAKLQLSKDTYDDDLDNLLAQIGDQYADLFLAAKNLSDAILLSDILRVNTEITKAPLSASMIKRYDEHHQDLTLLKALVRQQLPEKYKEIFFDQSKNGYAGYIDGGASQEEFYKFIKPILEKMDGTEELLVKLNREDLLRKQRTFDNGSIPHQIHLGELHAILRRQEDFYPFLKDNREKIEKILTFRIPYYVGPLARGNSRFAWMTRKSEETITPWNFEEVVDKGASAQSFIERMTNFDKNLPNEKVLPKHSLLYEYFTVYNELTKVKYVTEGMRKPAFLSGEQKKAIVDLLFKTNRKVTVKQLKEDYFKKIECFDSVEISGVEDRFNASLGTYHDLLKIIKDKDFLDNEENEDILEDIVLTLTLFEDREMIEERLKTYAHLFDDKVMKQLKRRRYTGWGRLSRKLINGIRDKQSGKTILDFLKSDGFANRNFMQLIHDDSLTFKEDIQKAQVSGQGDSLHEHIANLAGSPAIKKGILQTVKVVDELVKVMGRHKPENIVIEMARENQTTQKGQKNSRERMKRIEEGIKELGSQILKEHPVENTQLQNEKLYLYYLQNGRDMYVDQELDINRLSDYDVDHIVPQSFLKDDSIDNKVLTRSDKARGKSDNVPSEEVVKKMKNYWRQLLNAKLITQRKFDNLTKAERGGLSELDKAGFIKRQLVETRQITKHVAQILDSRMNTKYDENDKLIREVKVITLKSKLVSDFRKDFQFYKVREINNYHHAHDAYLNAVVGTALIKKYPKLESEFVYGDYKVYDVRKMIAKSEQEIGKATAKYFFYSNIMNFFKTEITLANGEIRKRPLIETNGETGEIVWDKGRDFATVRKVLSMPQVNIVKKTEVQTGGFSKESILPKRNSDKLIARKKDWDPKKYGGFDSPTVAYSVLVVAKVEKGKSKKLKSVKELLGITIMERSSFEKNPIDFLEAKGYKEVKKDLIIKLPKYSLFELENGRKRMLASAGELQKGNELALPSKYVNFLYLASHYEKLKGSPEDNEQKQLFVEQHKHYLDEIIEQISEFSKRVILADANLDKVLSAYNKHRDKPIREQAENIIHLFTLTNLGAPAAFKYFDTTIDRKRYTSTKEVLDATLIHQSITGLYETRIDLSQLGGDGGGGSGGGPAPGGMDPLQLLQPLEAEIKGTKLKAHWNSGATITCVPQAFLEEEVPIKNIWIKTIHGEKEQPVYYLTFKIQGRKVEAEVISSPYDYILVSPSDIPWLMKKPLQLTTLVPLQEYEERLLKQTMLTGSYKEKLQSLFLKYDALWQHWENQVGHRRIKPHHIATGTVNPRPQKQYPINPKAKASIQTVINDLLKQGVLIQQNSIMNTPVYPVPKPDGKWRMVLDYREVNKTIPLIAAQNQHSAGILSSIFRGKYKTTLDLSNGFWAHSITPESYWLTAFTWLGQQYCWTRLPQGFLNSPALFNADVVDLLKEVPNVQVYVDDIYISHDDPREHLEQLEKVFSLLLNAGYVVSLKKSEIAQHEVEFLGFNITKEGRGLTETFKQKLLNITPPRDLKQLQSILGLLNFARNFIPNFSELVKPLYNIIATAPGKYITWTTDNSQQLQNIISMLNSAENLEERNPEVRLIMKVNTSPSAGYIRFYNEFAKRPIMYLNYVYTKAEVKFTNTEKLLTTIHKGLIKALDLGMGQEILVYSPIVSMTKIQKTPLPERKALPIRWITWMSYLEDPRIQFHYDKTLPELQQVPTVTDDIIAKIKHPSEFSMVFYTDGSAIKHPNVNKSHNAGMGIAQVQFKPEFTVINTWSIPLGDHTAQLAEVAAVEFACKKALKIDGPVLIVTDSFYVAESVNKELPYWQSNGFFNNKKKPLKHVSKWKSIADCIQLKPDIIIIHEKGHQPTASTFHTEGNNLADKLATQGSYVVNAGKRTADGSEFEKRTADGSEFESPKKKAKVE

SEQ ID NO: 646 - protein, 2176 aa, synthetic construct
MPAAKRVKLDGGDKKYSIGLDIGTNSVGWAVITDEYKVPSKKFKVLGNTDRHSIKKNLIGALLFDSGETAEATRLKRTARRRYTRRKNRICYLQEIFSNEMAKVDDSFFHRLEESFLVEEDKKHERHPIFGNIVDEVAYHEKYPTIYHLRKKLVDSTDKADLRLIYLALAHMIKFRGHFLIEGDLNPDNSDVDKLFIQLVQTYNQLFEENPINASGVDAKAILSARLSKSRRLENLIAQLPGEKKNGLFGNLIALSLGLTPNFKSNFDLAEDAKLQLSKDTYDDDLDNLLAQIGDQYADLFLAAKNLSDAILLSDILRVNTEITKAPLSASMIKRYDEHHQDLTLLKALVRQQLPEKYKEIFFDQSKNGYAGYIDGGASQEEFYKFIKPILEKMDGTEELLVKLNREDLLRKQRTFDNGSIPHQIHLGELHAILRRQEDFYPFLKDNREKIEKILTFRIPYYVGPLARGNSRFAWMTRKSEETITPWNFEEVVDKGASAQSFIERMTNFDKNLPNEKVLPKHSLLYEYFTVYNELTKVKYVTEGMRKPAFLSGEQKKAIVDLLFKTNRKVTVKQLKEDYFKKIECFDSVEISGVEDRFNASLGTYHDLLKIIKDKDFLDNEENEDILEDIVLTLTLFEDREMIEERLKTYAHLFDDKVMKQLKRRRYTGWGRLSRKLINGIRDKQSGKTILDFLKSDGFANRNFMQLIHDDSLTFKEDIQKAQVSGQGDSLHEHIANLAGSPAIKKGILQTVKVVDELVKVMGRHKPENIVIEMARENQTTQKGQKNSRERMKRIEEGIKELGSQILKEHPVENTQLQNEKLYLYYLQNGRDMYVDQELDINRLSDYDVDHIVPQSFLKDDSIDNKVLTRSDKARGKSDNVPSEEVVKKMKNYWRQLLNAKLITQRKFDNLTKAERGGLSELDKAGFIKRQLVETRQITKHVAQILDSRMNTKYDENDKLIREVKVITLKSKLVSDFRKDFQFYKVREINNYHHAHDAYLNAVVGTALIKKYPKLESEFVYGDYKVYDVRKMIAKSEQEIGKATAKYFFYSNIMNFFKTEITLANGEIRKRPLIETNGETGEIVWDKGRDFATVRKVLSMPQVNIVKKTEVQTGGFSKESILPKRNSDKLIARKKDWDPKKYGGFDSPTVAYSVLVVAKVEKGKSKKLKSVKELLGITIMERSSFEKNPIDFLEAKGYKEVKKDLIIKLPKYSLFELENGRKRMLASAGELQKGNELALPSKYVNFLYLASHYEKLKGSPEDNEQKQLFVEQHKHYLDEIIEQISEFSKRVILADANLDKVLSAYNKHRDKPIREQAENIIHLFTLTNLGAPAAFKYFDTTIDRKRYTSTKEVLDATLIHQSITGLYETRIDLSQLGGDGGEAAAKGGSGGGGGMDPLQLLQPLEAEIKGTKLKAHWNSGATITCVPQAFLEEEVPIKNIWIKTIHGEKEQPVYYLTFKIQGRKVEAEVISSPYDYILVSPSDIPWLMKKPLQLTTLVPLQEYEERLLKQTMLTGSYKEKLQSLFLKYDALWQHWENQVGHRRIKPHHIATGTVNPRPQKQYPINPKAKASIQTVINDLLKQGVLIQQNSIMNTPVYPVPKPDGKWRMVLDYREVNKTIPLIAAQNQHSAGILSSIFRGKYKTTLDLSNGFWAHSITPESYWLTAFTWLGQQYCWTRLPQGFLNSPALFNADVVDLLKEVPNVQVYVDDIYISHDDPREHLEQLEKVFSLLLNAGYVVSLKKSEIAQHEVEFLGFNITKEGRGLTETFKQKLLNITPPRDLKQLQSILGLLNFARNFIPNFSELVKPLYNIIATAPGKYITWTTDNSQQLQNIISMLNSAENLEERNPEVRLIMKVNTSPSAGYIRFYNEFAKRPIMYLNYVYTKAEVKFTNTEKLLTTIHKGLIKALDLGMGQEILVYSPIVSMTKIQKTPLPERKALPIRWITWMSYLEDPRIQFHYDKTLPELQQVPTVTDDIIAKIKHPSEFSMVFYTDGSAIKHPNVNKSHNAGMGIAQVQFKPEFTVINTWSIPLGDHTAQLAEVAAVEFACKKALKIDGPVLIVTDSFYVAESVNKELPYWQSNGFFNNKKKPLKHVSKWKSIADCIQLKPDIIIIHEKGHQPTASTFHTEGNNLADKLATQGSYVVNAGKRTADGSEFEKRTADGSEFESPKKKAKVE

SEQ ID NO: 647 - protein, 2211 aa, synthetic construct
MPAAKRVKLDGGDKKYSIGLDIGTNSVGWAVITDEYKVPSKKFKVLGNTDRHSIKKNLIGALLFDSGETAEATRLKRTARRRYTRRKNRICYLQEIFSNEMAKVDDSFFHRLEESFLVEEDKKHERHPIFGNIVDEVAYHEKYPTIYHLRKKLVDSTDKADLRLIYLALAHMIKFRGHFLIEGDLNPDNSDVDKLFIQLVQTYNQLFEENPINASGVDAKAILSARLSKSRRLENLIAQLPGEKKNGLFGNLIALSLGLTPNFKSNFDLAEDAKLQLSKDTYDDDLDNLLAQIGDQYADLFLAAKNLSDAILLSDILRVNTEITKAPLSASMIKRYDEHHQDLTLLKALVRQQLPEKYKEIFFDQSKNGYAGYIDGGASQEEFYKFIKPILEKMDGTEELLVKLNREDLLRKQRTFDNGSIPHQIHLGELHAILRRQEDFYPFLKDNREKIEKILTFRIPYYVGPLARGNSRFAWMTRKSEETITPWNFEEVVDKGASAQSFIERMTNFDKNLPNEKVLPKHSLLYEYFTVYNELTKVKYVTEGMRKPAFLSGEQKKAIVDLLFKTNRKVTVKQLKEDYFKKIECFDSVEISGVEDRFNASLGTYHDLLKIIKDKDFLDNEENEDILEDIVLTLTLFEDREMIEERLKTYAHLFDDKVMKQLKRRRYTGWGRLSRKLINGIRDKQSGKTILDFLKSDGFANRNFMQLIHDDSLTFKEDIQKAQVSGQGDSLHEHIANLAGSPAIKKGILQTVKVVDELVKVMGRHKPENIVIEMARENQTTQKGQKNSRERMKRIEEGIKELGSQILKEHPVENTQLQNEKLYLYYLQNGRDMYVDQELDINRLSDYDVDHIVPQSFLKDDSIDNKVLTRSDKARGKSDNVPSEEVVKKMKNYWRQLLNAKLITQRKFDNLTKAERGGLSELDKAGFIKRQLVETRQITKHVAQILDSRMNTKYDENDKLIREVKVITLKSKLVSDFRKDFQFYKVREINNYHHAHDAYLNAVVGTALIKKYPKLESEFVYGDYKVYDVRKMIAKSEQEIGKATAKYFFYSNIMNFFKTEITLANGEIRKRPLIETNGETGEIVWDKGRDFATVRKVLSMPQVNIVKKTEVQTGGFSKESILPKRNSDKLIARKKDWDPKKYGGFDSPTVAYSVLVVAKVEKGKSKKLKSVKELLGITIMERSSFEKNPIDFLEAKGYKEVKKDLIIKLPKYSLFELENGRKRMLASAGELQKGNELALPSKYVNFLYLASHYEKLKGSPEDNEQKQLFVEQHKHYLDEIIEQISEFSKRVILADANLDKVLSAYNKHRDKPIREQAENIIHLFTLTNLGAPAAFKYFDTTIDRKRYTSTKEVLDATLIHQSITGLYETRIDLSQLGGDGGAEAAAKEAAAKEAAAKEAAAKALEAEAAAKEAAAKEAAAKEAAAKAGGMDPLQLLQPLEAEIKGTKLKAHWNSGATITCVPQAFLEEEVPIKNIWIKTIHGEKEQPVYYLTFKIQGRKVEAEVISSPYDYILVSPSDIPWLMKKPLQLTTLVPLQEYEERLLKQTMLTGSYKEKLQSLFLKYDALWQHWENQVGHRRIKPHHIATGTVNPRPQKQYPINPKAKASIQTVINDLLKQGVLIQQNSIMNTPVYPVPKPDGKWRMVLDYREVNKTIPLIAAQNQHSAGILSSIFRGKYKTTLDLSNGFWAHSITPESYWLTAFTWLGQQYCWTRLPQGFLNSPALFNADVVDLLKEVPNVQVYVDDIYISHDDPREHLEQLEKVFSLLLNAGYVVSLKKSEIAQHEVEFLGFNITKEGRGLTETFKQKLLNITPPRDLKQLQSILGKLNFARNFIPNFSELVKPLYNIIATAPGKYITWTTDNSQQLQNIISMLNSAENLEERNPEVRLIMKVNTSPSAGYIRFYNEFAKRPIMYLNYVYTKAEVKFTNTEKLLTTIHKGLIKALDLGMGQEILVYSPIVSMTKIQKTPLPERKALPIRWITWMSYLEDPRIQFHYDKTLPELQQVPTVTDDIIAKIKHPSEFSMVFYTDGSAIKHPNVNKSHNAGMGIAQVQFKPEFTVINTWSIPLGDHTAQLAEVAAVEFACKKALKIDGPVLIVTDSFYVAESVNKELPYWQSNGFFNNKKKPLKHVSKWKSIADCIQLKPDIIIIHEKGHQPTASTFHTEGNNLADKLATQGSYVVNAGKRTADGSEFEKRTADGSEFESPKKKAKVE

SEQ ID NO: 648 - protein, 2195 aa, synthetic construct
MPAAKRVKLDGGDKKYSIGLDIGTNSVGWAVITDEYKVPSKKFKVLGNTDRHSIKKNLIGALLFDSGETAEATRLKRTARRRYTRRKNRICYLQEIFSNEMAKVDDSFFHRLEESFLVEEDKKHERHPIFGNIVDEVAYHEKYPTIYHLRKKLVDSTDKADLRLIYLALAHMIKFRGHFLIEGDLNPDNSDVDKLFIQLVQTYNQLFEENPINASGVDAKAILSARLSKSRRLENLIAQLPGEKKNGLFGNLIALSLGLTPNFKSNFDLAEDAKLQLSKDTYDDDLDNLLAQIGDQYADLFLAAKNLSDAILLSDILRVNTEITKAPLSASMIKRYDEHHQDLTLLKALVRQQLPEKYKEIFFDQSKNGYAGYIDGGASQEEFYKFIKPILEKMDGTEELLVKLNREDLLRKQRTFDNGSIPHQIHLGELHAILRRQEDFYPFLKDNREKIEKILTFRIPYYVGPLARGNSRFAWMTRKSEETITPWNFEEVVDKGASAQSFIERMTNFDKNLPNEKVLPKHSLLYEYFTVYNELTKVKYVTEGMRKPAFLSGEQKKAIVDLLFKTNRKVTVKQLKEDYFKKIECFDSVEISGVEDRFNASLGTYHDLLKIIKDKDFLDNEENEDILEDIVLTLTLFEDREMIEERLKTYAHLFDDKVMKQLKRRRYTGWGRLSRKLINGIRDKQSGKTILDFLKSDGFANRNFMQLIHDDSLTFKEDIQKAQVSGQGDSLHEHIANLAGSPAIKKGILQTVKVVDELVKVMGRHKPENIVIEMARENQTTQKGQKNSRERMKRIEEGIKELGSQILKEHPVENTQLQNEKLYLYYLQNGRDMYVDQELDINRLSDYDVDHIVPQSFLKDDSIDNKVLTRSDKARGKSDNVPSEEVVKKMKNYWRQLLNAKLITQRKFDNLTKAERGGLSELDKAGFIKRQLVETRQITKHVAQILDSRMNTKYDENDKLIREVKVITLKSKLVSDFRKDFQFYKVREINNYHHAHDAYLNAVVGTALIKKYPKLESEFVYGDYKVYDVRKMIAKSEQEIGKATAKYFFYSNIMNFFKTEITLANGEIRKRPLIETNGETGEIVWDKGRDFATVRKVLSMPQVNIVKKTEVQTGGFSKESILPKRNSDKLIARKKDWDPKKYGGFDSPTVAYSVLVVAKVEKGKSKKLKSVKELLGITIMERSSFEKNPIDFLEAKGYKEVKKDLIIKLPKYSLFELENGRKRMLASAGELQKGNELALPSKYVNFLYLASHYEKLKGSPEDNEQKQLFVEQHKHYLDEIIEQISEFSKRVILADANLDKVLSAYNKHRDKPIREQAENIIHLFTLTNLGAPAAFKYFDTTIDRKRYTSTKEVLDATLIHQSITGLYETRIDLSQLGGDGGGGGGSGGGGSGGGGSGGGGSGGGGSGGGGSGGMDPLQLLQPLEAEIKGTKLKAHWNSGATITCVPQAFLEEEVPIKNIWIKTIHGEKEQPVYYLTFKIQGRKVEAEVISSPYDYILVSPSDIPWLMKKPLQLTTLVPLQEYEERLLKQTMLTGSYKEKLQSLFLKYDALWQHWENQVGHRRIKPHHIATGTVNPRPQKQYPINPKAKASIQTVINDLLKQGVLIQQNSIMNTPVYPVPKPDGKWRMVLDYREVNKTIPLIAAQNQHSAGILSSIFRGKYKTTLDLSNGFWAHSITPESYWLTAFTWLGQQYCWTRLPQGFLNSPALFNADVVDLLKEVPNVQVYVDDIYISHDDPREHLEQLEKVFSLLLNAGYVVSLKKSEIAQHEVEFLGFNITKEGRGLTETFKQKLLNITPPRDLKQLQSILGKLNFARNFIPNFSELVKPLYNIIATAPGKYITWTTDNSQQLQNIISMLNSAENLEERNPEVRLIMKVNTSPSAGYIRFYNEFAKRPIMYLNYVYTKAEVKFTNTEKLLTTIHKGLIKALDLGMGQEILVYSPIVSMTKIQKTPLPERKALPIRWITWMSYLEDPRIQFHYDKTLPELQQVPTVTDDIIAKIKHPSEFSMVFYTDGSAIKHPNVNKSHNAGMGIAQVQFKPEFTVINTWSIPLGDHTAQLAEVAAVEFACKKALKIDGPVLIVTDSFYVAESVNKELPYWQSNGFFNNKKKPLKHVSKWKSIADCIQLKPDIIIIHEKGHQPTASTFHTEGNNLADKLATQGSYVVNAGKRTADGSEFEKRTADGSEFESPKKKAKVE

SEQ ID NO: 649 - protein, 2190 aa, synthetic construct
MPAAKRVKLDGGDKKYSIGLDIGTNSVGWAVITDEYKVPSKKFKVLGNTDRHSIKKNLIGALLFDSGETAEATRLKRTARRRYTRRKNRICYLQEIFSNEMAKVDDSFFHRLEESFLVEEDKKHERHPIFGNIVDEVAYHEKYPTIYHLRKKLVDSTDKADLRLIYLALAHMIKFRGHFLIEGDLNPDNSDVDKLFIQLVQTYNQLFEENPINASGVDAKAILSARLSKSRRLENLIAQLPGEKKNGLFGNLIALSLGLTPNFKSNFDLAEDAKLQLSKDTYDDDLDNLLAQIGDQYADLFLAAKNLSDAILLSDILRVNTEITKAPLSASMIKRYDEHHQDLTLLKALVRQQLPEKYKEIFFDQSKNGYAGYIDGGASQEEFYKFIKPILEKMDGTEELLVKLNREDLLRKQRTFDNGSIPHQIHLGELHAILRRQEDFYPFLKDNREKIEKILTFRIPYYVGPLARGNSRFAWMTRKSEETITPWNFEEVVDKGASAQSFIERMTNFDKNLPNEKVLPKHSLLYEYFTVYNELTKVKYVTEGMRKPAFLSGEQKKAIVDLLFKTNRKVTVKQLKEDYFKKIECFDSVEISGVEDRFNASLGTYHDLLKIIKDKDFLDNEENEDILEDIVLTLTLFEDREMIEERLKTYAHLFDDKVMKQLKRRRYTGWGRLSRKLINGIRDKQSGKTILDFLKSDGFANRNFMQLIHDDSLTFKEDIQKAQVSGQGDSLHEHIANLAGSPAIKKGILQTVKVVDELVKVMGRHKPENIVIEMARENQTTQKGQKNSRERMKRIEEGIKELGSQILKEHPVENTQLQNEKLYLYYLQNGRDMYVDQELDINRLSDYDVDHIVPQSFLKDDSIDNKVLTRSDKARGKSDNVPSEEVVKKMKNYWRQLLNAKLITQRKFDNLTKAERGGLSELDKAGFIKRQLVETRQITKHVAQILDSRMNTKYDENDKLIREVKVITLKSKLVSDFRKDFQFYKVREINNYHHAHDAYLNAVVGTALIKKYPKLESEFVYGDYKVYDVRKMIAKSEQEIGKATAKYFFYSNIMNFFKTEITLANGEIRKRPLIETNGETGEIVWDKGRDFATVRKVLSMPQVNIVKKTEVQTGGFSKESILPKRNSDKLIARKKDWDPKKYGGFDSPTVAYSVLVVAKVEKGKSKKLKSVKELLGITIMERSSFEKNPIDFLEAKGYKEVKKDLIIKLPKYSLFELENGRKRMLASAGELQKGNELALPSKYVNFLYLASHYEKLKGSPEDNEQKQLFVEQHKHYLDEIIEQISEFSKRVILADANLDKVLSAYNKHRDKPIREQAENIIHLFTLTNLGAPAAFKYFDTTIDRKRYTSTKEVLDATLIHQSITGLYETRIDLSQLGGDGGEAAAKEAAAKEAAAKEAAAKEAAAKGGMDPLQLLQPLEAEIKGTKLKAHWNSGATITCVPQAFLEEEVPIKNIWIKTIHGEKEQPVYYLTFKIQGRKVEAEVISSPYDYILVSPSDIPWLMKKPLQLTTLVPLQEYEERLLKQTMLTGSYKEKLQSLFLKYDALWQHWENQVGHRRIKPHHIATGTVNPRPQKQYPINPKAKASIQTVINDLLKQGVLIQQNSIMNTPVYPVPKPDGKWRMVLDYREVNKTIPLIAAQNQHSAGILSSIFRGKYKTTLDLSNGFWAHSITPESYWLTAFTWLGQQYCWTRLPQGFLNSPALFNADVVDLLKEVPNVQVYVDDIYISHDDPREHLEQLEKVFSLLLNAGYVVSLKKSEIAQHEVEFLGFNITKEGRGLTETFKQKLLNITPPRDLKQLQSILGKLNFARNFIPNFSELVKPLYNIIATAPGKYITWTTDNSQQLQNIISMLNSAENLEERNPEVRLIMKVNTSPSAGYIRFYNEFAKRPIMYLNYVYTKAEVKFTNTEKLLTTIHKGLIKALDLGMGQEILVYSPIVSMTKIQKTPLPERKALPIRWITWMSYLEDPRIQFHYDKTLPELQQVPTVTDDIIAKIKHPSEFSMVFYTDGSAIKHPNVNKSHNAGMGIAQVQFKPEFTVINTWSIPLGDHTAQLAEVAAVEFACKKALKIDGPVLIVTDSFYVAESVNKELPYWQSNGFFNNKKKPLKHVSKWKSIADCIQLKPDIIIIHEKGHQPTASTFHTEGNNLADKLATQGSYVVNAGKRTADGSEFEKRTADGSEFESPKKKAKVE

SEQ ID NO: 650 - protein, 2176 aa, synthetic construct
MPAAKRVKLDGGDKKYSIGLDIGTNSVGWAVITDEYKVPSKKFKVLGNTDRHSIKKNLIGALLFDSGETAEATRLKRTARRRYTRRKNRICYLQEIFSNEMAKVDDSFFHRLEESFLVEEDKKHERHPIFGNIVDEVAYHEKYPTIYHLRKKLVDSTDKADLRLIYLALAHMIKFRGHFLIEGDLNPDNSDVDKLFIQLVQTYNQLFEENPINASGVDAKAILSARLSKSRRLENLIAQLPGEKKNGLFGNLIALSLGLTPNFKSNFDLAEDAKLQLSKDTYDDDLDNLLAQIGDQYADLFLAAKNLSDAILLSDILRVNTEITKAPLSASMIKRYDEHHQDLTLLKALVRQQLPEKYKEIFFDQSKNGYAGYIDGGASQEEFYKFIKPILEKMDGTEELLVKLNREDLLRKQRTFDNGSIPHQIHLGELHAILRRQEDFYPFLKDNREKIEKILTFRIPYYVGPLARGNSRFAWMTRKSEETITPWNFEEVVDKGASAQSFIERMTNFDKNLPNEKVLPKHSLLYEYFTVYNELTKVKYVTEGMRKPAFLSGEQKKAIVDLLFKTNRKVTVKQLKEDYFKKIECFDSVEISGVEDRFNASLGTYHDLLKIIKDKDFLDNEENEDILEDIVLTLTLFEDREMIEERLKTYAHLFDDKVMKQLKRRRYTGWGRLSRKLINGIRDKQSGKTILDFLKSDGFANRNFMQLIHDDSLTFKEDIQKAQVSGQGDSLHEHIANLAGSPAIKKGILQTVKVVDELVKVMGRHKPENIVIEMARENQTTQKGQKNSRERMKRIEEGIKELGSQILKEHPVENTQLQNEKLYLYYLQNGRDMYVDQELDINRLSDYDVDHIVPQSFLKDDSIDNKVLTRSDKARGKSDNVPSEEVVKKMKNYWRQLLNAKLITQRKFDNLTKAERGGLSELDKAGFIKRQLVETRQITKHVAQILDSRMNTKYDENDKLIREVKVITLKSKLVSDFRKDFQFYKVREINNYHHAHDAYLNAVVGTALIKKYPKLESEFVYGDYKVYDVRKMIAKSEQEIGKATAKYFFYSNIMNFFKTEITLANGEIRKRPLIETNGETGEIVWDKGRDFATVRKVLSMPQVNIVKKTEVQTGGFSKESILPKRNSDKLIARKKDWDPKKYGGFDSPTVAYSVLVVAKVEKGKSKKLKSVKELLGITIMERSSFEKNPIDFLEAKGYKEVKKDLIIKLPKYSLFELENGRKRMLASAGELQKGNELALPSKYVNFLYLASHYEKLKGSPEDNEQKQLFVEQHKHYLDEIIEQISEFSKRVILADANLDKVLSAYNKHRDKPIREQAENIIHLFTLTNLGAPAAFKYFDTTIDRKRYTSTKEVLDATLIHQSITGLYETRIDLSQLGGDGGPAPGSSEAAAKGGMDPLQLLQPLEAEIKGTKLKAHWNSGATITCVPQAFLEEEVPIKNIWIKTIHGEKEQPVYYLTFKIQGRKVEAEVISSPYDYILVSPSDIPWLMKKPLQLTTLVPLQEYEERLLKQTMLTGSYKEKLQSLFLKYDALWQHWENQVGHRRIKPHHIATGTVNPRPQKQYPINPKAKASIQTVINDLLKQGVLIQQNSIMNTPVYPVPKPDGKWRMVLDYREVNKTIPLIAAQNQHSAGILSSIFRGKYKTTLDLSNGFWAHSITPESYWLTAFTWLGQQYCWTRLPQGFLNSPALFNADVVDLLKEVPNVQVYVDDIYISHDDPREHLEQLEKVFSLLLNAGYVVSLKKSEIAQHEVEFLGFNITKEGRGLTETFKQKLLNITPPRDLKQLQSILGKLNFARNFIPNFSELVKPLYNIIATAPGKYITWTTDNSQQLQNIISMLNSAENLEERNPEVRLIMKVNTSPSAGYIRFYNEFAKRPIMYLNYVYTKAEVKFTNTEKLLTTIHKGLIKALDLGMGQEILVYSPIVSMTKIQKTPLPERKALPIRWITWMSYLEDPRIQFHYDKTLPELQQVPTVTDDIIAKIKHPSEFSMVFYTDGSAIKHPNVNKSHNAGMGIAQVQFKPEFTVINTWSIPLGDHTAQLAEVAAVEFACKKALKIDGPVLIVTDSFYVAESVNKELPYWQSNGFFNNKKKPLKHVSKWKSIADCIQLKPDIIIIHEKGHQPTASTFHTEGNNLADKLATQGSYVVNAGKRTADGSEFEKRTADGSEFESPKKKAKVE

SEQ ID NO: 651 - protein, 2195 aa, synthetic construct
MPAAKRVKLDGGDKKYSIGLDIGTNSVGWAVITDEYKVPSKKFKVLGNTDRHSIKKNLIGALLFDSGETAEATRLKRTARRRYTRRKNRICYLQEIFSNEMAKVDDSFFHRLEESFLVEEDKKHERHPIFGNIVDEVAYHEKYPTIYHLRKKLVDSTDKADLRLIYLALAHMIKFRGHFLIEGDLNPDNSDVDKLFIQLVQTYNQLFEENPINASGVDAKAILSARLSKSRRLENLIAQLPGEKKNGLFGNLIALSLGLTPNFKSNFDLAEDAKLQLSKDTYDDDLDNLLAQIGDQYADLFLAAKNLSDAILLSDILRVNTEITKAPLSASMIKRYDEHHQDLTLLKALVRQQLPEKYKEIFFDQSKNGYAGYIDGGASQEEFYKFIKPILEKMDGTEELLVKLNREDLLRKQRTFDNGSIPHQIHLGELHAILRRQEDFYPFLKDNREKIEKILTFRIPYYVGPLARGNSRFAWMTRKSEETITPWNFEEVVDKGASAQSFIERMTNFDKNLPNEKVLPKHSLLYEYFTVYNELTKVKYVTEGMRKPAFLSGEQKKAIVDLLFKTNRKVTVKQLKEDYFKKIECFDSVEISGVEDRFNASLGTYHDLLKIIKDKDFLDNEENEDILEDIVLTLTLFEDREMIEERLKTYAHLFDDKVMKQLKRRRYTGWGRLSRKLINGIRDKQSGKTILDFLKSDGFANRNFMQLIHDDSLTFKEDIQKAQVSGQGDSLHEHIANLAGSPAIKKGILQTVKVVDELVKVMGRHKPENIVIEMARENQTTQKGQKNSRERMKRIEEGIKELGSQILKEHPVENTQLQNEKLYLYYLQNGRDMYVDQELDINRLSDYDVDHIVPQSFLKDDSIDNKVLTRSDKARGKSDNVPSEEVVKKMKNYWRQLLNAKLITQRKFDNLTKAERGGLSELDKAGFIKRQLVETRQITKHVAQILDSRMNTKYDENDKLIREVKVITLKSKLVSDFRKDFQFYKVREINNYHHAHDAYLNAVVGTALIKKYPKLESEFVYGDYKVYDVRKMIAKSEQEIGKATAKYFFYSNIMNFFKTEITLANGEIRKRPLIETNGETGEIVWDKGRDFATVRKVLSMPQVNIVKKTEVQTGGFSKESILPKRNSDKLIARKKDWDPKKYGGFDSPTVAYSVLVVAKVEKGKSKKLKSVKELLGITIMERSSFEKNPIDFLEAKGYKEVKKDLIIKLPKYSLFELENGRKRMLASAGELQKGNELALPSKYVNFLYLASHYEKLKGSPEDNEQKQLFVEQHKHYLDEIIEQISEFSKRVILADANLDKVLSAYNKHRDKPIREQAENIIHLFTLTNLGAPAAFKYFDTTIDRKRYTSTKEVLDATLIHQSITGLYETRIDLSQLGGDGGEAAAKEAAAKEAAAKEAAAKEAAAKEAAAKGGMDPLQLLQPLEAEIKGTKLKAHWNSGATITCVPQAFLEEEVPIKNIWIKTIHGEKEQPVYYLTFKIQGRKVEAEVISSPYDYILVSPSDIPWLMKKPLQLTTLVPLQEYEERLLKQTMLTGSYKEKLQSLFLKYDALWQHWENQVGHRRIKPHHIATGTVNPRPQKQYPINPKAKASIQTVINDLLKQGVLIQQNSIMNTPVYPVPKPDGKWRMVLDYREVNKTIPLIAAQNQHSAGILSSIFRGKYKTTLDLSNGFWAHSITPESYWLTAFTWLGQQYCWTRLPQGFLNSPALFNADVVDLLKEVPNVQVYVDDIYISHDDPREHLEQLEKVFSLLLNAGYVVSLKKSEIAQHEVEFLGFNITKEGRGLTETFKQKLLNITPPRDLKQLQSILGKLNFARNFIPNFSELVKPLYNIIATAPGKYITWTTDNSQQLQNIISMLNSAENLEERNPEVRLIMKVNTSPSAGYIRFYNEFAKRPIMYLNYVYTKAEVKFTNTEKLLTTIHKGLIKALDLGMGQEILVYSPIVSMTKIQKTPLPERKALPIRWITWMSYLEDPRIQFHYDKTLPELQQVPTVTDDIIAKIKHPSEFSMVFYTDGSAIKHPNVNKSHNAGMGIAQVQFKPEFTVINTWSIPLGDHTAQLAEVAAVEFACKKALKIDGPVLIVTDSFYVAESVNKELPYWQSNGFFNNKKKPLKHVSKWKSIADCIQLKPDIIIIHEKGHQPTASTFHTEGNNLADKLATQGSYVVNAGKRTADGSEFEKRTADGSEFESPKKKAKVE

SEQ ID NO: 652 - protein, 2198 aa, synthetic construct
MPAAKRVKLDGGDKKYSIGLDIGTNSVGWAVITDEYKVPSKKFKVLGNTDRHSIKKNLIGALLFDSGETAEATRLKRTARRRYTRRKNRICYLQEIFSNEMAKVDDSFFHRLEESFLVEEDKKHERHPIFGNIVDEVAYHEKYPTIYHLRKKLVDSTDKADLRLIYLALAHMIKFRGHFLIEGDLNPDNSDVDKLFIQLVQTYNQLFEENPINASGVDAKAILSARLSKSRRLENLIAQLPGEKKNGLFGNLIALSLGLTPNFKSNFDLAEDAKLQLSKDTYDDDLDNLLAQIGDQYADLFLAAKNLSDAILLSDILRVNTEITKAPLSASMIKRYDEHHQDLTLLKALVRQQLPEKYKEIFFDQSKNGYAGYIDGGASQEEFYKFIKPILEKMDGTEELLVKLNREDLLRKQRTFDNGSIPHQIHLGELHAILRRQEDFYPFLKDNREKIEKILTFRIPYYVGPLARGNSRFAWMTRKSEETITPWNFEEVVDKGASAQSFIERMTNFDKNLPNEKVLPKHSLLYEYFTVYNELTKVKYVTEGMRKPAFLSGEQKKAIVDLLFKTNRKVTVKQLKEDYFKKIECFDSVEISGVEDRFNASLGTYHDLLKIIKDKDFLDNEENEDILEDIVLTLTLFEDREMIEERLKTYAHLFDDKVMKQLKRRRYTGWGRLSRKLINGIRDKQSGKTILDFLKSDGFANRNFMQLIHDDSLTFKEDIQKAQVSGQGDSLHEHIANLAGSPAIKKGILQTVKVVDELVKVMGRHKPENIVIEMARENQTTQKGQKNSRERMKRIEEGIKELGSQILKEHPVENTQLQNEKLYLYYLQNGRDMYVDQELDINRLSDYDVDHIVPQSFLKDDSIDNKVLTRSDKARGKSDNVPSEEVVKKMKNYWRQLLNAKLITQRKFDNLTKAERGGLSELDKAGFIKRQLVETRQITKHVAQILDSRMNTKYDENDKLIREVKVITLKSKLVSDFRKDFQFYKVREINNYHHAHDAYLNAVVGTALIKKYPKLESEFVYGDYKVYDVRKMIAKSEQEIGKATAKYFFYSNIMNFFKTEITLANGEIRKRPLIETNGETGEIVWDKGRDFATVRKVLSMPQVNIVKKTEVQTGGFSKESILPKRNSDKLIARKKDWDPKKYGGFDSPTVAYSVLVVAKVEKGKSKKLKSVKELLGITIMERSSFEKNPIDFLEAKGYKEVKKDLIIKLPKYSLFELENGRKRMLASAGELQKGNELALPSKYVNFLYLASHYEKLKGSPEDNEQKQLFVEQHKHYLDEIIEQISEFSKRVILADANLDKVLSAYNKHRDKPIREQAENIIHLFTLTNLGAPAAFKYFDTTIDRKRYTSTKEVLDATLIHQSITGLYETRIDLSQLGGDGGSGGSSGGSSGSETPGTSESATPESSGGSSGGSSGGMDPLQLLQPLEAEIKGTKLKAHWNSGATITCVPQAFLEEEVPIKNIWIKTIHGEKEQPVYYLTFKIQGRKVEAEVISSPYDYILVSPSDIPWLMKKPLQLTTLVPLQEYEERLLKQTMLTGSYKEKLQSLFLKYDALWQHWENQVGHRRIKPHHIATGTVNPRPQKQYPINPKAKASIQTVINDLLKQGVLIQQNSIMNTPVYPVPKPDGKWRMVLDYREVNKTIPLIAAQNQHSAGILSSIFRGKYKTTLDLSNGFWAHSITPESYWLTAFTWLGQQYCWTRLPQGFLNSPALFNADVVDLLKEVPNVQVYVDDIYISHDDPREHLEQLEKVFSLLLNAGYVVSLKKSEIAQHEVEFLGFNITKEGRGLTETFKQKLLNITPPRDLKQLQSILGKLNFARNFIPNFSELVKPLYNIIATAPGKYITWTTDNSQQLQNIISMLNSAENLEERNPEVRLIMKVNTSPSAGYIRFYNEFAKRPIMYLNYVYTKAEVKFTNTEKLLTTIHKGLIKALDLGMGQEILVYSPIVSMTKIQKTPLPERKALPIRWITWMSYLEDPRIQFHYDKTLPELQQVPTVTDDIIAKIKHPSEFSMVFYTDGSAIKHPNVNKSHNAGMGIAQVQFKPEFTVINTWSIPLGDHTAQLAEVAAVEFACKKALKIDGPVLIVTDSFYVAESVNKELPYWQSNGFFNNKKKPLKHVSKWKSIADCIQLKPDIIIIHEKGHQPTASTFHTEGNNLADKLATQGSYVVNAGKRTADGSEFEKRTADGSEFESPKKKAKVE

SEQ ID NO: 653 - protein, 2176 aa, synthetic construct
MPAAKRVKLDGGDKKYSIGLDIGTNSVGWAVITDEYKVPSKKFKVLGNTDRHSIKKNLIGALLFDSGETAEATRLKRTARRRYTRRKNRICYLQEIFSNEMAKVDDSFFHRLEESFLVEEDKKHERHPIFGNIVDEVAYHEKYPTIYHLRKKLVDSTDKADLRLIYLALAHMIKFRGHFLIEGDLNPDNSDVDKLFIQLVQTYNQLFEENPINASGVDAKAILSARLSKSRRLENLIAQLPGEKKNGLFGNLIALSLGLTPNFKSNFDLAEDAKLQLSKDTYDDDLDNLLAQIGDQYADLFLAAKNLSDAILLSDILRVNTEITKAPLSASMIKRYDEHHQDLTLLKALVRQQLPEKYKEIFFDQSKNGYAGYIDGGASQEEFYKFIKPILEKMDGTEELLVKLNREDLLRKQRTFDNGSIPHQIHLGELHAILRRQEDFYPFLKDNREKIEKILTFRIPYYVGPLARGNSRFAWMTRKSEETITPWNFEEVVDKGASAQSFIERMTNFDKNLPNEKVLPKHSLLYEYFTVYNELTKVKYVTEGMRKPAFLSGEQKKAIVDLLFKTNRKVTVKQLKEDYFKKIECFDSVEISGVEDRFNASLGTYHDLLKIIKDKDFLDNEENEDILEDIVLTLTLFEDREMIEERLKTYAHLFDDKVMKQLKRRRYTGWGRLSRKLINGIRDKQSGKTILDFLKSDGFANRNFMQLIHDDSLTFKEDIQKAQVSGQGDSLHEHIANLAGSPAIKKGILQTVKVVDELVKVMGRHKPENIVIEMARENQTTQKGQKNSRERMKRIEEGIKELGSQILKEHPVENTQLQNEKLYLYYLQNGRDMYVDQELDINRLSDYDVDHIVPQSFLKDDSIDNKVLTRSDKARGKSDNVPSEEVVKKMKNYWRQLLNAKLITQRKFDNLTKAERGGLSELDKAGFIKRQLVETRQITKHVAQILDSRMNTKYDENDKLIREVKVITLKSKLVSDFRKDFQFYKVREINNYHHAHDAYLNAVVGTALIKKYPKLESEFVYGDYKVYDVRKMIAKSEQEIGKATAKYFFYSNIMNFFKTEITLANGEIRKRPLIETNGETGEIVWDKGRDFATVRKVLSMPQVNIVKKTEVQTGGFSKESILPKRNSDKLIARKKDWDPKKYGGFDSPTVAYSVLVVAKVEKGKSKKLKSVKELLGITIMERSSFEKNPIDFLEAKGYKEVKKDLIIKLPKYSLFELENGRKRMLASAGELQKGNELALPSKYVNFLYLASHYEKLKGSPEDNEQKQLFVEQHKHYLDEIIEQISEFSKRVILADANLDKVLSAYNKHRDKPIREQAENIIHLFTLTNLGAPAAFKYFDTTIDRKRYTSTKEVLDATLIHQSITGLYETRIDLSQLGGDGGGGGGGSEAAAKGGMDPLQLLQPLEAEIKGTKLKAHWNSGATITCVPQAFLEEEVPIKNIWIKTIHGEKEQPVYYLTFKIQGRKVEAEVISSPYDYILVSPSDIPWLMKKPLQLTTLVPLQEYEERLLKQTMLTGSYKEKLQSLFLKYDALWQHWENQVGHRRIKPHHIATGTVNPRPQKQYPINPKAKASIQTVINDLLKQGVLIQQNSIMNTPVYPVPKPDGKWRMVLDYREVNKTIPLIAAQNQHSAGILSSIFRGKYKTTLDLSNGFWAHSITPESYWLTAFTWLGQQYCWTRLPQGFLNSPALFNADVVDLLKEVPNVQVYVDDIYISHDDPREHLEQLEKVFSLLLNAGYVVSLKKSEIAQHEVEFLGFNITKEGRGLTETFKQKLLNITPPRDLKQLQSILGKLNFARNFIPNFSELVKPLYNIIATAPGKYITWTTDNSQQLQNIISMLNSAENLEERNPEVRLIMKVNTSPSAGYIRFYNEFAKRPIMYLNYVYTKAEVKFTNTEKLLTTIHKGLIKALDLGMGQEILVYSPIVSMTKIQKTPLPERKALPIRWITWMSYLEDPRIQFHYDKTLPELQQVPTVTDDIIAKIKHPSEFSMVFYTDGSAIKHPNVNKSHNAGMGIAQVQFKPEFTVINTWSIPLGDHTAQLAEVAAVEFACKKALKIDGPVLIVTDSFYVAESVNKELPYWQSNGFFNNKKKPLKHVSKWKSIADCIQLKPDIIIIHEKGHQPTASTFHTEGNNLADKLATQGSYVVNAGKRTADGSEFEKRTADGSEFESPKKKAKVE

SEQ ID NO: 654 - protein, 2178 aa, synthetic construct
MPAAKRVKLDGGDKKYSIGLDIGTNSVGWAVITDEYKVPSKKFKVLGNTDRHSIKKNLIGALLFDSGETAEATRLKRTARRRYTRRKNRICYLQEIFSNEMAKVDDSFFHRLEESFLVEEDKKHERHPIFGNIVDEVAYHEKYPTIYHLRKKLVDSTDKADLRLIYLALAHMIKFRGHFLIEGDLNPDNSDVDKLFIQLVQTYNQLFEENPINASGVDAKAILSARLSKSRRLENLIAQLPGEKKNGLFGNLIALSLGLTPNFKSNFDLAEDAKLQLSKDTYDDDLDNLLAQIGDQYADLFLAAKNLSDAILLSDILRVNTEITKAPLSASMIKRYDEHHQDLTLLKALVRQQLPEKYKEIFFDQSKNGYAGYIDGGASQEEFYKFIKPILEKMDGTEELLVKLNREDLLRKQRTFDNGSIPHQIHLGELHAILRRQEDFYPFLKDNREKIEKILTFRIPYYVGPLARGNSRFAWMTRKSEETITPWNFEEVVDKGASAQSFIERMTNFDKNLPNEKVLPKHSLLYEYFTVYNELTKVKYVTEGMRKPAFLSGEQKKAIVDLLFKTNRKVTVKQLKEDYFKKIECFDSVEISGVEDRFNASLGTYHDLLKIIKDKDFLDNEENEDILEDIVLTLTLFEDREMIEERLKTYAHLFDDKVMKQLKRRRYTGWGRLSRKLINGIRDKQSGKTILDFLKSDGFANRNFMQLIHDDSLTFKEDIQKAQVSGQGDSLHEHIANLAGSPAIKKGILQTVKVVDELVKVMGRHKPENIVIEMARENQTTQKGQKNSRERMKRIEEGIKELGSQILKEHPVENTQLQNEKLYLYYLQNGRDMYVDQELDINRLSDYDVDHIVPQSFLKDDSIDNKVLTRSDKARGKSDNVPSEEVVKKMKNYWRQLLNAKLITQRKFDNLTKAERGGLSELDKAGFIKRQLVETRQITKHVAQILDSRMNTKYDENDKLIREVKVITLKSKLVSDFRKDFQFYKVREINNYHHAHDAYLNAVVGTALIKKYPKLESEFVYGDYKVYDVRKMIAKSEQEIGKATAKYFFYSNIMNFFKTEITLANGEIRKRPLIETNGETGEIVWDKGRDFATVRKVLSMPQVNIVKKTEVQTGGFSKESILPKRNSDKLIARKKDWDPKKYGGFDSPTVAYSVLVVAKVEKGKSKKLKSVKELLGITIMERSSFEKNPIDFLEAKGYKEVKKDLIIKLPKYSLFELENGRKRMLASAGELQKGNELALPSKYVNFLYLASHYEKLKGSPEDNEQKQLFVEQHKHYLDEIIEQISEFSKRVILADANLDKVLSAYNKHRDKPIREQAENIIHLFTLTNLGAPAAFKYFDTTIDRKRYTSTKEVLDATLIHQSITGLYETRIDLSQLGGDGGPAPAPAPAPAPAPGGMDPLQLLQPLEAEIKGTKLKAHWNSGATITCVPQAFLEEEVPIKNIWIKTIHGEKEQPVYYLTFKIQGRKVEAEVISSPYDYILVSPSDIPWLMKKPLQLTTLVPLQEYEERLLKQTMLTGSYKEKLQSLFLKYDALWQHWENQVGHRRIKPHHIATGTVNPRPQKQYPINPKAKASIQTVINDLLKQGVLIQQNSIMNTPVYPVPKPDGKWRMVLDYREVNKTIPLIAAQNQHSAGILSSIFRGKYKTTLDLSNGFWAHSITPESYWLTAFTWLGQQYCWTRLPQGFLNSPALFNADVVDLLKEVPNVQVYVDDIYISHDDPREHLEQLEKVFSLLLNAGYVVSLKKSEIAQHEVEFLGFNITKEGRGLTETFKQKLLNITPPRDLKQLQSILGKLNFARNFIPNFSELVKPLYNIIATAPGKYITWTTDNSQQLQNIISMLNSAENLEERNPEVRLIMKVNTSPSAGYIRFYNEFAKRPIMYLNYVYTKAEVKFTNTEKLLTTIHKGLIKALDLGMGQEILVYSPIVSMTKIQKTPLPERKALPIRWITWMSYLEDPRIQFHYDKTLPELQQVPTVTDDIIAKIKHPSEFSMVFYTDGSAIKHPNVNKSHNAGMGIAQVQFKPEFTVINTWSIPLGDHTAQLAEVAAVEFACKKALKIDGPVLIVTDSFYVAESVNKELPYWQSNGFFNNKKKPLKHVSKWKSIADCIQLKPDIIIIHEKGHQPTASTFHTEGNNLADKLATQGSYVVNAGKRTADGSEFEKRTADGSEFESPKKKAKVE

SEQ ID NO: 655 - protein, 2176 aa, synthetic construct
MPAAKRVKLDGGDKKYSIGLDIGTNSVGWAVITDEYKVPSKKFKVLGNTDRHSIKKNLIGALLFDSGETAEATRLKRTARRRYTRRKNRICYLQEIFSNEMAKVDDSFFHRLEESFLVEEDKKHERHPIFGNIVDEVAYHEKYPTIYHLRKKLVDSTDKADLRLIYLALAHMIKFRGHFLIEGDLNPDNSDVDKLFIQLVQTYNQLFEENPINASGVDAKAILSARLSKSRRLENLIAQLPGEKKNGLFGNLIALSLGLTPNFKSNFDLAEDAKLQLSKDTYDDDLDNLLAQIGDQYADLFLAAKNLSDAILLSDILRVNTEITKAPLSASMIKRYDEHHQDLTLLKALVRQQLPEKYKEIFFDQSKNGYAGYIDGGASQEEFYKFIKPILEKMDGTEELLVKLNREDLLRKQRTFDNGSIPHQIHLGELHAILRRQEDFYPFLKDNREKIEKILTFRIPYYVGPLARGNSRFAWMTRKSEETITPWNFEEVVDKGASAQSFIERMTNFDKNLPNEKVLPKHSLLYEYFTVYNELTKVKYVTEGMRKPAFLSGEQKKAIVDLLFKTNRKVTVKQLKEDYFKKIECFDSVEISGVEDRFNASLGTYHDLLKIIKDKDFLDNEENEDILEDIVLTLTLFEDREMIEERLKTYAHLFDDKVMKQLKRRRYTGWGRLSRKLINGIRDKQSGKTILDFLKSDGFANRNFMQLIHDDSLTFKEDIQKAQVSGQGDSLHEHIANLAGSPAIKKGILQTVKVVDELVKVMGRHKPENIVIEMARENQTTQKGQKNSRERMKRIEEGIKELGSQILKEHPVENTQLQNEKLYLYYLQNGRDMYVDQELDINRLSDYDVDHIVPQSFLKDDSIDNKVLTRSDKARGKSDNVPSEEVVKKMKNYWRQLLNAKLITQRKFDNLTKAERGGLSELDKAGFIKRQLVETRQITKHVAQILDSRMNTKYDENDKLIREVKVITLKSKLVSDFRKDFQFYKVREINNYHHAHDAYLNAVVGTALIKKYPKLESEFVYGDYKVYDVRKMIAKSEQEIGKATAKYFFYSNIMNFFKTEITLANGEIRKRPLIETNGETGEIVWDKGRDFATVRKVLSMPQVNIVKKTEVQTGGFSKESILPKRNSDKLIARKKDWDPKKYGGFDSPTVAYSVLVVAKVEKGKSKKLKSVKELLGITIMERSSFEKNPIDFLEAKGYKEVKKDLIIKLPKYSLFELENGRKRMLASAGELQKGNELALPSKYVNFLYLASHYEKLKGSPEDNEQKQLFVEQHKHYLDEIIEQISEFSKRVILADANLDKVLSAYNKHRDKPIREQAENIIHLFTLTNLGAPAAFKYFDTTIDRKRYTSTKEVLDATLIHQSITGLYETRIDLSQLGGDGGGGGGSSEAAAKGGMDPLQLLQPLEAEIKGTKLKAHWNSGATITCVPQAFLEEEVPIKNIWIKTIHGEKEQPVYYLTFKIQGRKVEAEVISSPYDYILVSPSDIPWLMKKPLQLTTLVPLQEYEERLLKQTMLTGSYKEKLQSLFLKYDALWQHWENQVGHRRIKPHHIATGTVNPRPQKQYPINPKAKASIQTVINDLLKQGVLIQQNSIMNTPVYPVPKPDGKWRMVLDYREVNKTIPLIAAQNQHSAGILSSIFRGKYKTTLDLSNGFWAHSITPESYWLTAFTWLGQQYCWTRLPQGFLNSPALFNADVVDLLKEVPNVQVYVDDIYISHDDPREHLEQLEKVFSLLLNAGYVVSLKKSEIAQHEVEFLGFNITKEGRGLTETFKQKLLNITPPRDLKQLQSILGKLNFARNFIPNFSELVKPLYNIIATAPGKYITWTTDNSQQLQNIISMLNSAENLEERNPEVRLIMKVNTSPSAGYIRFYNEFAKRPIMYLNYVYTKAEVKFTNTEKLLTTIHKGLIKALDLGMGQEILVYSPIVSMTKIQKTPLPERKALPIRWITWMSYLEDPRIQFHYDKTLPELQQVPTVTDDIIAKIKHPSEFSMVFYTDGSAIKHPNVNKSHNAGMGIAQVQFKPEFTVINTWSIPLGDHTAQLAEVAAVEFACKKALKIDGPVLIVTDSFYVAESVNKELPYWQSNGFFNNKKKPLKHVSKWKSIADCIQLKPDIIIIHEKGHQPTASTFHTEGNNLADKLATQGSYVVNAGKRTADGSEFEKRTADGSEFESPKKKAKVE

SEQ ID NO: 656 - protein, 2181 aa, synthetic construct
MPAAKRVKLDGGDKKYSIGLDIGTNSVGWAVITDEYKVPSKKFKVLGNTDRHSIKKNLIGALLFDSGETAEATRLKRTARRRYTRRKNRICYLQEIFSNEMAKVDDSFFHRLEESFLVEEDKKHERHPIFGNIVDEVAYHEKYPTIYHLRKKLVDSTDKADLRLIYLALAHMIKFRGHFLIEGDLNPDNSDVDKLFIQLVQTYNQLFEENPINASGVDAKAILSARLSKSRRLENLIAQLPGEKKNGLFGNLIALSLGLTPNFKSNFDLAEDAKLQLSKDTYDDDLDNLLAQIGDQYADLFLAAKNLSDAILLSDILRVNTEITKAPLSASMIKRYDEHHQDLTLLKALVRQQLPEKYKEIFFDQSKNGYAGYIDGGASQEEFYKFIKPILEKMDGTEELLVKLNREDLLRKQRTFDNGSIPHQIHLGELHAILRRQEDFYPFLKDNREKIEKILTFRIPYYVGPLARGNSRFAWMTRKSEETITPWNFEEVVDKGASAQSFIERMTNFDKNLPNEKVLPKHSLLYEYFTVYNELTKVKYVTEGMRKPAFLSGEQKKAIVDLLFKTNRKVTVKQLKEDYFKKIECFDSVEISGVEDRFNASLGTYHDLLKIIKDKDFLDNEENEDILEDIVLTLTLFEDREMIEERLKTYAHLFDDKVMKQLKRRRYTGWGRLSRKLINGIRDKQSGKTILDFLKSDGFANRNFMQLIHDDSLTFKEDIQKAQVSGQGDSLHEHIANLAGSPAIKKGILQTVKVVDELVKVMGRHKPENIVIEMARENQTTQKGQKNSRERMKRIEEGIKELGSQILKEHPVENTQLQNEKLYLYYLQNGRDMYVDQELDINRLSDYDVDHIVPQSFLKDDSIDNKVLTRSDKARGKSDNVPSEEVVKKMKNYWRQLLNAKLITQRKFDNLTKAERGGLSELDKAGFIKRQLVETRQITKHVAQILDSRMNTKYDENDKLIREVKVITLKSKLVSDFRKDFQFYKVREINNYHHAHDAYLNAVVGTALIKKYPKLESEFVYGDYKVYDVRKMIAKSEQEIGKATAKYFFYSNIMNFFKTEITLANGEIRKRPLIETNGETGEIVWDKGRDFATVRKVLSMPQVNIVKKTEVQTGGFSKESILPKRNSDKLIARKKDWDPKKYGGFDSPTVAYSVLVVAKVEKGKSKKLKSVKELLGITIMERSSFEKNPIDFLEAKGYKEVKKDLIIKLPKYSLFELENGRKRMLASAGELQKGNELALPSKYVNFLYLASHYEKLKGSPEDNEQKQLFVEQHKHYLDEIIEQISEFSKRVILADANLDKVLSAYNKHRDKPIREQAENIIHLFTLTNLGAPAAFKYFDTTIDRKRYTSTKEVLDATLIHQSITGLYETRIDLSQLGGDGGSGSETPGTSESATPESGGMDPLQLLQPLEAEIKGTKLKAHWNSGATITCVPQAFLEEEVPIKNIWIKTIHGEKEQPVYYLTFKIQGRKVEAEVISSPYDYILVSPSDIPWLMKKPLQLTTLVPLQEYEERLLKQTMLTGSYKEKLQSLFLKYDALWQHWENQVGHRRIKPHHIATGTVNPRPQKQYPINPKAKASIQTVINDLLKQGVLIQQNSIMNTPVYPVPKPDGKWRMVLDYREVNKTIPLIAAQNQHSAGILSSIFRGKYKTTLDLSNGFWAHSITPESYWLTAFTWLGQQYCWTRLPQGFLNSPALFNADVVDLLKEVPNVQVYVDDIYISHDDPREHLEQLEKVFSLLLNAGYVVSLKKSEIAQHEVEFLGFNITKEGRGLTETFKQKLLNITPPRDLKQLQSILGKLNFARNFIPNFSELVKPLYNIIATAPGKYITWTTDNSQQLQNIISMLNSAENLEERNPEVRLIMKVNTSPSAGYIRFYNEFAKRPIMYLNYVYTKAEVKFTNTEKLLTTIHKGLIKALDLGMGQEILVYSPIVSMTKIQKTPLPERKALPIRWITWMSYLEDPRIQFHYDKTLPELQQVPTVTDDIIAKIKHPSEFSMVFYTDGSAIKHPNVNKSHNAGMGIAQVQFKPEFTVINTWSIPLGDHTAQLAEVAAVEFACKKALKIDGPVLIVTDSFYVAESVNKELPYWQSNGFFNNKKKPLKHVSKWKSIADCIQLKPDIIIIHEKGHQPTASTFHTEGNNLADKLATQGSYVVNAGKRTADGSEFEKRTADGSEFESPKKKAKVE

SEQ ID NO: 657 - protein, 2177 aa, synthetic construct
MPAAKRVKLDGGDKKYSIGLDIGTNSVGWAVITDEYKVPSKKFKVLGNTDRHSIKKNLIGALLFDSGETAEATRLKRTARRRYTRRKNRICYLQEIFSNEMAKVDDSFFHRLEESFLVEEDKKHERHPIFGNIVDEVAYHEKYPTIYHLRKKLVDSTDKADLRLIYLALAHMIKFRGHFLIEGDLNPDNSDVDKLFIQLVQTYNQLFEENPINASGVDAKAILSARLSKSRRLENLIAQLPGEKKNGLFGNLIALSLGLTPNFKSNFDLAEDAKLQLSKDTYDDDLDNLLAQIGDQYADLFLAAKNLSDAILLSDILRVNTEITKAPLSASMIKRYDEHHQDLTLLKALVRQQLPEKYKEIFFDQSKNGYAGYIDGGASQEEFYKFIKPILEKMDGTEELLVKLNREDLLRKQRTFDNGSIPHQIHLGELHAILRRQEDFYPFLKDNREKIEKILTFRIPYYVGPLARGNSRFAWMTRKSEETITPWNFEEVVDKGASAQSFIERMTNFDKNLPNEKVLPKHSLLYEYFTVYNELTKVKYVTEGMRKPAFLSGEQKKAIVDLLFKTNRKVTVKQLKEDYFKKIECFDSVEISGVEDRFNASLGTYHDLLKIIKDKDFLDNEENEDILEDIVLTLTLFEDREMIEERLKTYAHLFDDKVMKQLKRRRYTGWGRLSRKLINGIRDKQSGKTILDFLKSDGFANRNFMQLIHDDSLTFKEDIQKAQVSGQGDSLHEHIANLAGSPAIKKGILQTVKVVDELVKVMGRHKPENIVIEMARENQTTQKGQKNSRERMKRIEEGIKELGSQILKEHPVENTQLQNEKLYLYYLQNGRDMYVDQELDINRLSDYDVDHIVPQSFLKDDSIDNKVLTRSDKARGKSDNVPSEEVVKKMKNYWRQLLNAKLITQRKFDNLTKAERGGLSELDKAGFIKRQLVETRQITKHVAQILDSRMNTKYDENDKLIREVKVITLKSKLVSDFRKDFQFYKVREINNYHHAHDAYLNAVVGTALIKKYPKLESEFVYGDYKVYDVRKMIAKSEQEIGKATAKYFFYSNIMNFFKTEITLANGEIRKRPLIETNGETGEIVWDKGRDFATVRKVLSMPQVNIVKKTEVQTGGFSKESILPKRNSDKLIARKKDWDPKKYGGFDSPTVAYSVLVVAKVEKGKSKKLKSVKELLGITIMERSSFEKNPIDFLEAKGYKEVKKDLIIKLPKYSLFELENGRKRMLASAGELQKGNELALPSKYVNFLYLASHYEKLKGSPEDNEQKQLFVEQHKHYLDEIIEQISEFSKRVILADANLDKVLSAYNKHRDKPIREQAENIIHLFTLTNLGAPAAFKYFDTTIDRKRYTSTKEVLDATLIHQSITGLYETRIDLSQLGGDGGGSAGSAAGSGEFGGMDPLQLLQPLEAEIKGTKLKAHWNSGATITCVPQAFLEEEVPIKNIWIKTIHGEKEQPVYYLTFKIQGRKVEAEVISSPYDYILVSPSDIPWLMKKPLQLTTLVPLQEYEERLLKQTMLTGSYKEKLQSLFLKYDALWQHWENQVGHRRIKPHHIATGTVNPRPQKQYPINPKAKASIQTVINDLLKQGVLIQQNSIMNTPVYPVPKPDGKWRMVLDYREVNKTIPLIAAQNQHSAGILSSIFRGKYKTTLDLSNGFWAHSITPESYWLTAFTWLGQQYCWTRLPQGFLNSPALFNADVVDLLKEVPNVQVYVDDIYISHDDPREHLEQLEKVFSLLLNAGYVVSLKKSEIAQHEVEFLGFNITKEGRGLTETFKQKLLNITPPRDLKQLQSILGKLNFARNFIPNFSELVKPLYNIIATAPGKYITWTTDNSQQLQNIISMLNSAENLEERNPEVRLIMKVNTSPSAGYIRFYNEFAKRPIMYLNYVYTKAEVKFTNTEKLLTTIHKGLIKALDLGMGQEILVYSPIVSMTKIQKTPLPERKALPIRWITWMSYLEDPRIQFHYDKTLPELQQVPTVTDDIIAKIKHPSEFSMVFYTDGSAIKHPNVNKSHNAGMGIAQVQFKPEFTVINTWSIPLGDHTAQLAEVAAVEFACKKALKIDGPVLIVTDSFYVAESVNKELPYWQSNGFFNNKKKPLKHVSKWKSIADCIQLKPDIIIIHEKGHQPTASTFHTEGNNLADKLATQGSYVVNAGKRTADGSEFEKRTADGSEFESPKKKAKVE

SEQ ID NO: 658 - protein, 2168 aa, synthetic construct
MPAAKRVKLDGGDKKYSIGLDIGTNSVGWAVITDEYKVPSKKFKVLGNTDRHSIKKNLIGALLFDSGETAEATRLKRTARRRYTRRKNRICYLQEIFSNEMAKVDDSFFHRLEESFLVEEDKKHERHPIFGNIVDEVAYHEKYPTIYHLRKKLVDSTDKADLRLIYLALAHMIKFRGHFLIEGDLNPDNSDVDKLFIQLVQTYNQLFEENPINASGVDAKAILSARLSKSRRLENLIAQLPGEKKNGLFGNLIALSLGLTPNFKSNFDLAEDAKLQLSKDTYDDDLDNLLAQIGDQYADLFLAAKNLSDAILLSDILRVNTEITKAPLSASMIKRYDEHHQDLTLLKALVRQQLPEKYKEIFFDQSKNGYAGYIDGGASQEEFYKFIKPILEKMDGTEELLVKLNREDLLRKQRTFDNGSIPHQIHLGELHAILRRQEDFYPFLKDNREKIEKILTFRIPYYVGPLARGNSRFAWMTRKSEETITPWNFEEVVDKGASAQSFIERMTNFDKNLPNEKVLPKHSLLYEYFTVYNELTKVKYVTEGMRKPAFLSGEQKKAIVDLLFKTNRKVTVKQLKEDYFKKIECFDSVEISGVEDRFNASLGTYHDLLKIIKDKDFLDNEENEDILEDIVLTLTLFEDREMIEERLKTYAHLFDDKVMKQLKRRRYTGWGRLSRKLINGIRDKQSGKTILDFLKSDGFANRNFMQLIHDDSLTFKEDIQKAQVSGQGDSLHEHIANLAGSPAIKKGILQTVKVVDELVKVMGRHKPENIVIEMARENQTTQKGQKNSRERMKRIEEGIKELGSQILKEHPVENTQLQNEKLYLYYLQNGRDMYVDQELDINRLSDYDVDHIVPQSFLKDDSIDNKVLTRSDKARGKSDNVPSEEVVKKMKNYWRQLLNAKLITQRKFDNLTKAERGGLSELDKAGFIKRQLVETRQITKHVAQILDSRMNTKYDENDKLIREVKVITLKSKLVSDFRKDFQFYKVREINNYHHAHDAYLNAVVGTALIKKYPKLESEFVYGDYKVYDVRKMIAKSEQEIGKATAKYFFYSNIMNFFKTEITLANGEIRKRPLIETNGETGEIVWDKGRDFATVRKVLSMPQVNIVKKTEVQTGGFSKESILPKRNSDKLIARKKDWDPKKYGGFDSPTVAYSVLVVAKVEKGKSKKLKSVKELLGITIMERSSFEKNPIDFLEAKGYKEVKKDLIIKLPKYSLFELENGRKRMLASAGELQKGNELALPSKYVNFLYLASHYEKLKGSPEDNEQKQLFVEQHKHYLDEIIEQISEFSKRVILADANLDKVLSAYNKHRDKPIREQAENIIHLFTLTNLGAPAAFKYFDTTIDRKRYTSTKEVLDATLIHQSITGLYETRIDLSQLGGDGGGGGGGMDPLQLLQPLEAEIKGTKLKAHWNSGATITCVPQAFLEEEVPIKNIWIKTIHGEKEQPVYYLTFKIQGRKVEAEVISSPYDYILVSPSDIPWLMKKPLQLTTLVPLQEYEERLLKQTMLTGSYKEKLQSLFLKYDALWQHWENQVGHRRIKPHHIATGTVNPRPQKQYPINPKAKASIQTVINDLLKQGVLIQQNSIMNTPVYPVPKPDGKWRMVLDYREVNKTIPLIAAQNQHSAGILSSIFRGKYKTTLDLSNGFWAHSITPESYWLTAFTWLGQQYCWTRLPQGFLNSPALFNADVVDLLKEVPNVQVYVDDIYISHDDPREHLEQLEKVFSLLLNAGYVVSLKKSEIAQHEVEFLGFNITKEGRGLTETFKQKLLNITPPRDLKQLQSILGKLNFARNFIPNFSELVKPLYNIIATAPGKYITWTTDNSQQLQNIISMLNSAENLEERNPEVRLIMKVNTSPSAGYIRFYNEFAKRPIMYLNYVYTKAEVKFTNTEKLLTTIHKGLIKALDLGMGQEILVYSPIVSMTKIQKTPLPERKALPIRWITWMSYLEDPRIQFHYDKTLPELQQVPTVTDDIIAKIKHPSEFSMVFYTDGSAIKHPNVNKSHNAGMGIAQVQFKPEFTVINTWSIPLGDHTAQLAEVAAVEFACKKALKIDGPVLIVTDSFYVAESVNKELPYWQSNGFFNNKKKPLKHVSKWKSIADCIQLKPDIIIIHEKGHQPTASTFHTEGNNLADKLATQGSYVVNAGKRTADGSEFEKRTADGSEFESPKKKAKVE

SEQ ID NO: 659 - protein, 2176 aa, synthetic construct
MPAAKRVKLDGGDKKYSIGLDIGTNSVGWAVITDEYKVPSKKFKVLGNTDRHSIKKNLIGALLFDSGETAEATRLKRTARRRYTRRKNRICYLQEIFSNEMAKVDDSFFHRLEESFLVEEDKKHERHPIFGNIVDEVAYHEKYPTIYHLRKKLVDSTDKADLRLIYLALAHMIKFRGHFLIEGDLNPDNSDVDKLFIQLVQTYNQLFEENPINASGVDAKAILSARLSKSRRLENLIAQLPGEKKNGLFGNLIALSLGLTPNFKSNFDLAEDAKLQLSKDTYDDDLDNLLAQIGDQYADLFLAAKNLSDAILLSDILRVNTEITKAPLSASMIKRYDEHHQDLTLLKALVRQQLPEKYKEIFFDQSKNGYAGYIDGGASQEEFYKFIKPILEKMDGTEELLVKLNREDLLRKQRTFDNGSIPHQIHLGELHAILRRQEDFYPFLKDNREKIEKILTFRIPYYVGPLARGNSRFAWMTRKSEETITPWNFEEVVDKGASAQSFIERMTNFDKNLPNEKVLPKHSLLYEYFTVYNELTKVKYVTEGMRKPAFLSGEQKKAIVDLLFKTNRKVTVKQLKEDYFKKIECFDSVEISGVEDRFNASLGTYHDLLKIIKDKDFLDNEENEDILEDIVLTLTLFEDREMIEERLKTYAHLFDDKVMKQLKRRRYTGWGRLSRKLINGIRDKQSGKTILDFLKSDGFANRNFMQLIHDDSLTFKEDIQKAQVSGQGDSLHEHIANLAGSPAIKKGILQTVKVVDELVKVMGRHKPENIVIEMARENQTTQKGQKNSRERMKRIEEGIKELGSQILKEHPVENTQLQNEKLYLYYLQNGRDMYVDQELDINRLSDYDVDHIVPQSFLKDDSIDNKVLTRSDKARGKSDNVPSEEVVKKMKNYWRQLLNAKLITQRKFDNLTKAERGGLSELDKAGFIKRQLVETRQITKHVAQILDSRMNTKYDENDKLIREVKVITLKSKLVSDFRKDFQFYKVREINNYHHAHDAYLNAVVGTALIKKYPKLESEFVYGDYKVYDVRKMIAKSEQEIGKATAKYFFYSNIMNFFKTEITLANGEIRKRPLIETNGETGEIVWDKGRDFATVRKVLSMPQVNIVKKTEVQTGGFSKESILPKRNSDKLIARKKDWDPKKYGGFDSPTVAYSVLVVAKVEKGKSKKLKSVKELLGITIMERSSFEKNPIDFLEAKGYKEVKKDLIIKLPKYSLFELENGRKRMLASAGELQKGNELALPSKYVNFLYLASHYEKLKGSPEDNEQKQLFVEQHKHYLDEIIEQISEFSKRVILADANLDKVLSAYNKHRDKPIREQAENIIHLFTLTNLGAPAAFKYFDTTIDRKRYTSTKEVLDATLIHQSITGLYETRIDLSQLGGDGGGGSGGGEAAAKGGMDPLQLLQPLEAEIKGTKLKAHWNSGATITCVPQAFLEEEVPIKNIWIKTIHGEKEQPVYYLTFKIQGRKVEAEVISSPYDYILVSPSDIPWLMKKPLQLTTLVPLQEYEERLLKQTMLTGSYKEKLQSLFLKYDALWQHWENQVGHRRIKPHHIATGTVNPRPQKQYPINPKAKASIQTVINDLLKQGVLIQQNSIMNTPVYPVPKPDGKWRMVLDYREVNKTIPLIAAQNQHSAGILSSIFRGKYKTTLDLSNGFWAHSITPESYWLTAFTWLGQQYCWTRLPQGFLNSPALFNADVVDLLKEVPNVQVYVDDIYISHDDPREHLEQLEKVFSLLLNAGYVVSLKKSEIAQHEVEFLGFNITKEGRGLTETFKQKLLNITPPRDLKQLQSILGKLNFARNFIPNFSELVKPLYNIIATAPGKYITWTTDNSQQLQNIISMLNSAENLEERNPEVRLIMKVNTSPSAGYIRFYNEFAKRPIMYLNYVYTKAEVKFTNTEKLLTTIHKGLIKALDLGMGQEILVYSPIVSMTKIQKTPLPERKALPIRWITWMSYLEDPRIQFHYDKTLPELQQVPTVTDDIIAKIKHPSEFSMVFYTDGSAIKHPNVNKSHNAGMGIAQVQFKPEFTVINTWSIPLGDHTAQLAEVAAVEFACKKALKIDGPVLIVTDSFYVAESVNKELPYWQSNGFFNNKKKPLKHVSKWKSIADCIQLKPDIIIIHEKGHQPTASTFHTEGNNLADKLATQGSYVVNAGKRTADGSEFEKRTADGSEFESPKKKAKVE

SEQ ID NO: 660 - protein, 2180 aa, synthetic construct
MPAAKRVKLDGGDKKYSIGLDIGTNSVGWAVITDEYKVPSKKFKVLGNTDRHSIKKNLIGALLFDSGETAEATRLKRTARRRYTRRKNRICYLQEIFSNEMAKVDDSFFHRLEESFLVEEDKKHERHPIFGNIVDEVAYHEKYPTIYHLRKKLVDSTDKADLRLIYLALAHMIKFRGHFLIEGDLNPDNSDVDKLFIQLVQTYNQLFEENPINASGVDAKAILSARLSKSRRLENLIAQLPGEKKNGLFGNLIALSLGLTPNFKSNFDLAEDAKLQLSKDTYDDDLDNLLAQIGDQYADLFLAAKNLSDAILLSDILRVNTEITKAPLSASMIKRYDEHHQDLTLLKALVRQQLPEKYKEIFFDQSKNGYAGYIDGGASQEEFYKFIKPILEKMDGTEELLVKLNREDLLRKQRTFDNGSIPHQIHLGELHAILRRQEDFYPFLKDNREKIEKILTFRIPYYVGPLARGNSRFAWMTRKSEETITPWNFEEVVDKGASAQSFIERMTNFDKNLPNEKVLPKHSLLYEYFTVYNELTKVKYVTEGMRKPAFLSGEQKKAIVDLLFKTNRKVTVKQLKEDYFKKIECFDSVEISGVEDRFNASLGTYHDLLKIIKDKDFLDNEENEDILEDIVLTLTLFEDREMIEERLKTYAHLFDDKVMKQLKRRRYTGWGRLSRKLINGIRDKQSGKTILDFLKSDGFANRNFMQLIHDDSLTFKEDIQKAQVSGQGDSLHEHIANLAGSPAIKKGILQTVKVVDELVKVMGRHKPENIVIEMARENQTTQKGQKNSRERMKRIEEGIKELGSQILKEHPVENTQLQNEKLYLYYLQNGRDMYVDQELDINRLSDYDVDHIVPQSFLKDDSIDNKVLTRSDKARGKSDNVPSEEVVKKMKNYWRQLLNAKLITQRKFDNLTKAERGGLSELDKAGFIKRQLVETRQITKHVAQILDSRMNTKYDENDKLIREVKVITLKSKLVSDFRKDFQFYKVREINNYHHAHDAYLNAVVGTALIKKYPKLESEFVYGDYKVYDVRKMIAKSEQEIGKATAKYFFYSNIMNFFKTEITLANGEIRKRPLIETNGETGEIVWDKGRDFATVRKVLSMPQVNIVKKTEVQTGGFSKESILPKRNSDKLIARKKDWDPKKYGGFDSPTVAYSVLVVAKVEKGKSKKLKSVKELLGITIMERSSFEKNPIDFLEAKGYKEVKKDLIIKLPKYSLFELENGRKRMLASAGELQKGNELALPSKYVNFLYLASHYEKLKGSPEDNEQKQLFVEQHKHYLDEIIEQISEFSKRVILADANLDKVLSAYNKHRDKPIREQAENIIHLFTLTNLGAPAAFKYFDTTIDRKRYTSTKEVLDATLIHQSITGLYETRIDLSQLGGDGGEAAAKGGGGSEAAAKGGMDPLQLLQPLEAEIKGTKLKAHWNSGATITCVPQAFLEEEVPIKNIWIKTIHGEKEQPVYYLTFKIQGRKVEAEVISSPYDYILVSPSDIPWLMKKPLQLTTLVPLQEYEERLLKQTMLTGSYKEKLQSLFLKYDALWQHWENQVGHRRIKPHHIATGTVNPRPQKQYPINPKAKASIQTVINDLLKQGVLIQQNSIMNTPVYPVPKPDGKWRMVLDYREVNKTIPLIAAQNQHSAGILSSIFRGKYKTTLDLSNGFWAHSITPESYWLTAFTWLGQQYCWTRLPQGFLNSPALFNADVVDLLKEVPNVQVYVDDIYISHDDPREHLEQLEKVFSLLLNAGYVVSLKKSEIAQHEVEFLGFNITKEGRGLTETFKQKLLNITPPRDLKQLQSILGKLNFARNFIPNFSELVKPLYNIIATAPGKYITWTTDNSQQLQNIISMLNSAENLEERNPEVRLIMKVNTSPSAGYIRFYNEFAKRPIMYLNYVYTKAEVKFTNTEKLLTTIHKGLIKALDLGMGQEILVYSPIVSMTKIQKTPLPERKALPIRWITWMSYLEDPRIQFHYDKTLPELQQVPTVTDDIIAKIKHPSEFSMVFYTDGSAIKHPNVNKSHNAGMGIAQVQFKPEFTVINTWSIPLGDHTAQLAEVAAVEFACKKALKIDGPVLIVTDSFYVAESVNKELPYWQSNGFFNNKKKPLKHVSKWKSIADCIQLKPDIIIIHEKGHQPTASTFHTEGNNLADKLATQGSYVVNAGKRTADGSEFEKRTADGSEFESPKKKAKVE

SEQ ID NO: 661 - protein, 2176 aa, synthetic construct
MPAAKRVKLDGGDKKYSIGLDIGTNSVGWAVITDEYKVPSKKFKVLGNTDRHSIKKNLIGALLFDSGETAEATRLKRTARRRYTRRKNRICYLQEIFSNEMAKVDDSFFHRLEESFLVEEDKKHERHPIFGNIVDEVAYHEKYPTIYHLRKKLVDSTDKADLRLIYLALAHMIKFRGHFLIEGDLNPDNSDVDKLFIQLVQTYNQLFEENPINASGVDAKAILSARLSKSRRLENLIAQLPGEKKNGLFGNLIALSLGLTPNFKSNFDLAEDAKLQLSKDTYDDDLDNLLAQIGDQYADLFLAAKNLSDAILLSDILRVNTEITKAPLSASMIKRYDEHHQDLTLLKALVRQQLPEKYKEIFFDQSKNGYAGYIDGGASQEEFYKFIKPILEKMDGTEELLVKLNREDLLRKQRTFDNGSIPHQIHLGELHAILRRQEDFYPFLKDNREKIEKILTFRIPYYVGPLARGNSRFAWMTRKSEETITPWNFEEVVDKGASAQSFIERMTNFDKNLPNEKVLPKHSLLYEYFTVYNELTKVKYVTEGMRKPAFLSGEQKKAIVDLLFKTNRKVTVKQLKEDYFKKIECFDSVEISGVEDRFNASLGTYHDLLKIIKDKDFLDNEENEDILEDIVLTLTLFEDREMIEERLKTYAHLFDDKVMKQLKRRRYTGWGRLSRKLINGIRDKQSGKTILDFLKSDGFANRNFMQLIHDDSLTFKEDIQKAQVSGQGDSLHEHIANLAGSPAIKKGILQTVKVVDELVKVMGRHKPENIVIEMARENQTTQKGQKNSRERMKRIEEGIKELGSQILKEHPVENTQLQNEKLYLYYLQNGRDMYVDQELDINRLSDYDVDHIVPQSFLKDDSIDNKVLTRSDKARGKSDNVPSEEVVKKMKNYWRQLLNAKLITQRKFDNLTKAERGGLSELDKAGFIKRQLVETRQITKHVAQILDSRMNTKYDENDKLIREVKVITLKSKLVSDFRKDFQFYKVREINNYHHAHDAYLNAVVGTALIKKYPKLESEFVYGDYKVYDVRKMIAKSEQEIGKATAKYFFYSNIMNFFKTEITLANGEIRKRPLIETNGETGEIVWDKGRDFATVRKVLSMPQVNIVKKTEVQTGGFSKESILPKRNSDKLIARKKDWDPKKYGGFDSPTVAYSVLVVAKVEKGKSKKLKSVKELLGITIMERSSFEKNPIDFLEAKGYKEVKKDLIIKLPKYSLFELENGRKRMLASAGELQKGNELALPSKYVNFLYLASHYEKLKGSPEDNEQKQLFVEQHKHYLDEIIEQISEFSKRVILADANLDKVLSAYNKHRDKPIREQAENIIHLFTLTNLGAPAAFKYFDTTIDRKRYTSTKEVLDATLIHQSITGLYETRIDLSQLGGDGGGGSEAAAKGGGGGMDPLQLLQPLEAEIKGTKLKAHWNSGATITCVPQAFLEEEVPIKNIWIKTIHGEKEQPVYYLTFKIQGRKVEAEVISSPYDYILVSPSDIPWLMKKPLQLTTLVPLQEYEERLLKQTMLTGSYKEKLQSLFLKYDALWQHWENQVGHRRIKPHHIATGTVNPRPQKQYPINPKAKASIQTVINDLLKQGVLIQQNSIMNTPVYPVPKPDGKWRMVLDYREVNKTIPLIAAQNQHSAGILSSIFRGKYKTTLDLSNGFWAHSITPESYWLTAFTWLGQQYCWTRLPQGFLNSPALFNADVVDLLKEVPNVQVYVDDIYISHDDPREHLEQLEKVFSLLLNAGYVVSLKKSEIAQHEVEFLGFNITKEGRGLTETFKQKLLNITPPRDLKQLQSILGKLNFARNFIPNFSELVKPLYNIIATAPGKYITWTTDNSQQLQNIISMLNSAENLEERNPEVRLIMKVNTSPSAGYIRFYNEFAKRPIMYLNYVYTKAEVKFTNTEKLLTTIHKGLIKALDLGMGQEILVYSPIVSMTKIQKTPLPERKALPIRWITWMSYLEDPRIQFHYDKTLPELQQVPTVTDDIIAKIKHPSEFSMVFYTDGSAIKHPNVNKSHNAGMGIAQVQFKPEFTVINTWSIPLGDHTAQLAEVAAVEFACKKALKIDGPVLIVTDSFYVAESVNKELPYWQSNGFFNNKKKPLKHVSKWKSIADCIQLKPDIIIIHEKGHQPTASTFHTEGNNLADKLATQGSYVVNAGKRTADGSEFEKRTADGSEFESPKKKAKVE

SEQ ID NO: 662 - protein, 2183 aa, synthetic construct
MPAAKRVKLDGGDKKYSIGLDIGTNSVGWAVITDEYKVPSKKFKVLGNTDRHSIKKNLIGALLFDSGETAEATRLKRTARRRYTRRKNRICYLQEIFSNEMAKVDDSFFHRLEESFLVEEDKKHERHPIFGNIVDEVAYHEKYPTIYHLRKKLVDSTDKADLRLIYLALAHMIKFRGHFLIEGDLNPDNSDVDKLFIQLVQTYNQLFEENPINASGVDAKAILSARLSKSRRLENLIAQLPGEKKNGLFGNLIALSLGLTPNFKSNFDLAEDAKLQLSKDTYDDDLDNLLAQIGDQYADLFLAAKNLSDAILLSDILRVNTEITKAPLSASMIKRYDEHHQDLTLLKALVRQQLPEKYKEIFFDQSKNGYAGYIDGGASQEEFYKFIKPILEKMDGTEELLVKLNREDLLRKQRTFDNGSIPHQIHLGELHAILRRQEDFYPFLKDNREKIEKILTFRIPYYVGPLARGNSRFAWMTRKSEETITPWNFEEVVDKGASAQSFIERMTNFDKNLPNEKVLPKHSLLYEYFTVYNELTKVKYVTEGMRKPAFLSGEQKKAIVDLLFKTNRKVTVKQLKEDYFKKIECFDSVEISGVEDRFNASLGTYHDLLKIIKDKDFLDNEENEDILEDIVLTLTLFEDREMIEERLKTYAHLFDDKVMKQLKRRRYTGWGRLSRKLINGIRDKQSGKTILDFLKSDGFANRNFMQLIHDDSLTFKEDIQKAQVSGQGDSLHEHIANLAGSPAIKKGILQTVKVVDELVKVMGRHKPENIVIEMARENQTTQKGQKNSRERMKRIEEGIKELGSQILKEHPVENTQLQNEKLYLYYLQNGRDMYVDQELDINRLSDYDVDHIVPQSFLKDDSIDNKVLTRSDKARGKSDNVPSEEVVKKMKNYWRQLLNAKLITQRKFDNLTKAERGGLSELDKAGFIKRQLVETRQITKHVAQILDSRMNTKYDENDKLIREVKVITLKSKLVSDFRKDFQFYKVREINNYHHAHDAYLNAVVGTALIKKYPKLESEFVYGDYKVYDVRKMIAKSEQEIGKATAKYFFYSNIMNFFKTEITLANGEIRKRPLIETNGETGEIVWDKGRDFATVRKVLSMPQVNIVKKTEVQTGGFSKESILPKRNSDKLIARKKDWDPKKYGGFDSPTVAYSVLVVAKVEKGKSKKLKSVKELLGITIMERSSFEKNPIDFLEAKGYKEVKKDLIIKLPKYSLFELENGRKRMLASAGELQKGNELALPSKYVNFLYLASHYEKLKGSPEDNEQKQLFVEQHKHYLDEIIEQISEFSKRVILADANLDKVLSAYNKHRDKPIREQAENIIHLFTLTNLGAPAAFKYFDTTIDRKRYTSTKEVLDATLIHQSITGLYETRIDLSQLGGDGGGSSGSSGSSGSSGSSGSSGGMDPLQLLQPLEAEIKGTKLKAHWNSGATITCVPQAFLEEEVPIKNIWIKTIHGEKEQPVYYLTFKIQGRKVEAEVISSPYDYILVSPSDIPWLMKKPLQLTTLVPLQEYEERLLKQTMLTGSYKEKLQSLFLKYDALWQHWENQVGHRRIKPHHIATGTVNPRPQKQYPINPKAKASIQTVINDLLKQGVLIQQNSIMNTPVYPVPKPDGKWRMVLDYREVNKTIPLIAAQNQHSAGILSSIFRGKYKTTLDLSNGFWAHSITPESYWLTAFTWLGQQYCWTRLPQGFLNSPALFNADVVDLLKEVPNVQVYVDDIYISHDDPREHLEQLEKVFSLLLNAGYVVSLKKSEIAQHEVEFLGFNITKEGRGLTETFKQKLLNITPPRDLKQLQSILGKLNFARNFIPNFSELVKPLYNIIATAPGKYITWTTDNSQQLQNIISMLNSAENLEERNPEVRLIMKVNTSPSAGYIRFYNEFAKRPIMYLNYVYTKAEVKFTNTEKLLTTIHKGLIKALDLGMGQEILVYSPIVSMTKIQKTPLPERKALPIRWITWMSYLEDPRIQFHYDKTLPELQQVPTVTDDIIAKIKHPSEFSMVFYTDGSAIKHPNVNKSHNAGMGIAQVQFKPEFTVINTWSIPLGDHTAQLAEVAAVEFACKKALKIDGPVLIVTDSFYVAESVNKELPYWQSNGFFNNKKKPLKHVSKWKSIADCIQLKPDIIIIHEKGHQPTASTFHTEGNNLADKLATQGSYVVNAGKRTADGSEFEKRTADGSEFESPKKKAKVE

SEQ ID NO: 663 - protein, 2176 aa, synthetic construct
MPAAKRVKLDGGDKKYSIGLDIGTNSVGWAVITDEYKVPSKKFKVLGNTDRHSIKKNLIGALLFDSGETAEATRLKRTARRRYTRRKNRICYLQEIFSNEMAKVDDSFFHRLEESFLVEEDKKHERHPIFGNIVDEVAYHEKYPTIYHLRKKLVDSTDKADLRLIYLALAHMIKFRGHFLIEGDLNPDNSDVDKLFIQLVQTYNQLFEENPINASGVDAKAILSARLSKSRRLENLIAQLPGEKKNGLFGNLIALSLGLTPNFKSNFDLAEDAKLQLSKDTYDDDLDNLLAQIGDQYADLFLAAKNLSDAILLSDILRVNTEITKAPLSASMIKRYDEHHQDLTLLKALVRQQLPEKYKEIFFDQSKNGYAGYIDGGASQEEFYKFIKPILEKMDGTEELLVKLNREDLLRKQRTFDNGSIPHQIHLGELHAILRRQEDFYPFLKDNREKIEKILTFRIPYYVGPLARGNSRFAWMTRKSEETITPWNFEEVVDKGASAQSFIERMTNFDKNLPNEKVLPKHSLLYEYFTVYNELTKVKYVTEGMRKPAFLSGEQKKAIVDLLFKTNRKVTVKQLKEDYFKKIECFDSVEISGVEDRFNASLGTYHDLLKIIKDKDFLDNEENEDILEDIVLTLTLFEDREMIEERLKTYAHLFDDKVMKQLKRRRYTGWGRLSRKLINGIRDKQSGKTILDFLKSDGFANRNFMQLIHDDSLTFKEDIQKAQVSGQGDSLHEHIANLAGSPAIKKGILQTVKVVDELVKVMGRHKPENIVIEMARENQTTQKGQKNSRERMKRIEEGIKELGSQILKEHPVENTQLQNEKLYLYYLQNGRDMYVDQELDINRLSDYDVDHIVPQSFLKDDSIDNKVLTRSDKARGKSDNVPSEEVVKKMKNYWRQLLNAKLITQRKFDNLTKAERGGLSELDKAGFIKRQLVETRQITKHVAQILDSRMNTKYDENDKLIREVKVITLKSKLVSDFRKDFQFYKVREINNYHHAHDAYLNAVVGTALIKKYPKLESEFVYGDYKVYDVRKMIAKSEQEIGKATAKYFFYSNIMNFFKTEITLANGEIRKRPLIETNGETGEIVWDKGRDFATVRKVLSMPQVNIVKKTEVQTGGFSKESILPKRNSDKLIARKKDWDPKKYGGFDSPTVAYSVLVVAKVEKGKSKKLKSVKELLGITIMERSSFEKNPIDFLEAKGYKEVKKDLIIKLPKYSLFELENGRKRMLASAGELQKGNELALPSKYVNFLYLASHYEKLKGSPEDNEQKQLFVEQHKHYLDEIIEQISEFSKRVILADANLDKVLSAYNKHRDKPIREQAENIIHLFTLTNLGAPAAFKYFDTTIDRKRYTSTKEVLDATLIHQSITGLYETRIDLSQLGGDGGGGGPAPEAAAKGGMDPLQLLQPLEAEIKGTKLKAHWNSGATITCVPQAFLEEEVPIKNIWIKTIHGEKEQPVYYLTFKIQGRKVEAEVISSPYDYILVSPSDIPWLMKKPLQLTTLVPLQEYEERLLKQTMLTGSYKEKLQSLFLKYDALWQHWENQVGHRRIKPHHIATGTVNPRPQKQYPINPKAKASIQTVINDLLKQGVLIQQNSIMNTPVYPVPKPDGKWRMVLDYREVNKTIPLIAAQNQHSAGILSSIFRGKYKTTLDLSNGFWAHSITPESYWLTAFTWLGQQYCWTRLPQGFLNSPALFNADVVDLLKEVPNVQVYVDDIYISHDDPREHLEQLEKVFSLLLNAGYVVSLKKSEIAQHEVEFLGFNITKEGRGLTETFKQKLLNITPPRDLKQLQSILGKLNFARNFIPNFSELVKPLYNIIATAPGKYITWTTDNSQQLQNIISMLNSAENLEERNPEVRLIMKVNTSPSAGYIRFYNEFAKRPIMYLNYVYTKAEVKFTNTEKLLTTIHKGLIKALDLGMGQEILVYSPIVSMTKIQKTPLPERKALPIRWITWMSYLEDPRIQFHYDKTLPELQQVPTVTDDIIAKIKHPSEFSMVFYTDGSAIKHPNVNKSHNAGMGIAQVQFKPEFTVINTWSIPLGDHTAQLAEVAAVEFACKKALKIDGPVLIVTDSFYVAESVNKELPYWQSNGFFNNKKKPLKHVSKWKSIADCIQLKPDIIIIHEKGHQPTASTFHTEGNNLADKLATQGSYVVNAGKRTADGSEFEKRTADGSEFESPKKKAKVE

SEQ ID NO: 664 - protein, 2176 aa, synthetic construct
MPAAKRVKLDGGDKKYSIGLDIGTNSVGWAVITDEYKVPSKKFKVLGNTDRHSIKKNLIGALLFDSGETAEATRLKRTARRRYTRRKNRICYLQEIFSNEMAKVDDSFFHRLEESFLVEEDKKHERHPIFGNIVDEVAYHEKYPTIYHLRKKLVDSTDKADLRLIYLALAHMIKFRGHFLIEGDLNPDNSDVDKLFIQLVQTYNQLFEENPINASGVDAKAILSARLSKSRRLENLIAQLPGEKKNGLFGNLIALSLGLTPNFKSNFDLAEDAKLQLSKDTYDDDLDNLLAQIGDQYADLFLAAKNLSDAILLSDILRVNTEITKAPLSASMIKRYDEHHQDLTLLKALVRQQLPEKYKEIFFDQSKNGYAGYIDGGASQEEFYKFIKPILEKMDGTEELLVKLNREDLLRKQRTFDNGSIPHQIHLGELHAILRRQEDFYPFLKDNREKIEKILTFRIPYYVGPLARGNSRFAWMTRKSEETITPWNFEEVVDKGASAQSFIERMTNFDKNLPNEKVLPKHSLLYEYFTVYNELTKVKYVTEGMRKPAFLSGEQKKAIVDLLFKTNRKVTVKQLKEDYFKKIECFDSVEISGVEDRFNASLGTYHDLLKIIKDKDFLDNEENEDILEDIVLTLTLFEDREMIEERLKTYAHLFDDKVMKQLKRRRYTGWGRLSRKLINGIRDKQSGKTILDFLKSDGFANRNFMQLIHDDSLTFKEDIQKAQVSGQGDSLHEHIANLAGSPAIKKGILQTVKVVDELVKVMGRHKPENIVIEMARENQTTQKGQKNSRERMKRIEEGIKELGSQILKEHPVENTQLQNEKLYLYYLQNGRDMYVDQELDINRLSDYDVDHIVPQSFLKDDSIDNKVLTRSDKARGKSDNVPSEEVVKKMKNYWRQLLNAKLITQRKFDNLTKAERGGLSELDKAGFIKRQLVETRQITKHVAQILDSRMNTKYDENDKLIREVKVITLKSKLVSDFRKDFQFYKVREINNYHHAHDAYLNAVVGTALIKKYPKLESEFVYGDYKVYDVRKMIAKSEQEIGKATAKYFFYSNIMNFFKTEITLANGEIRKRPLIETNGETGEIVWDKGRDFATVRKVLSMPQVNIVKKTEVQTGGFSKESILPKRNSDKLIARKKDWDPKKYGGFDSPTVAYSVLVVAKVEKGKSKKLKSVKELLGITIMERSSFEKNPIDFLEAKGYKEVKKDLIIKLPKYSLFELENGRKRMLASAGELQKGNELALPSKYVNFLYLASHYEKLKGSPEDNEQKQLFVEQHKHYLDEIIEQISEFSKRVILADANLDKVLSAYNKHRDKPIREQAENIIHLFTLTNLGAPAAFKYFDTTIDRKRYTSTKEVLDATLIHQSITGLYETRIDLSQLGGDGGEAAAKPAPGGGGGMDPLQLLQPLEAEIKGTKLKAHWNSGATITCVPQAFLEEEVPIKNIWIKTIHGEKEQPVYYLTFKIQGRKVEAEVISSPYDYILVSPSDIPWLMKKPLQLTTLVPLQEYEERLLKQTMLTGSYKEKLQSLFLKYDALWQHWENQVGHRRIKPHHIATGTVNPRPQKQYPINPKAKASIQTVINDLLKQGVLIQQNSIMNTPVYPVPKPDGKWRMVLDYREVNKTIPLIAAQNQHSAGILSSIFRGKYKTTLDLSNGFWAHSITPESYWLTAFTWLGQQYCWTRLPQGFLNSPALFNADVVDLLKEVPNVQVYVDDIYISHDDPREHLEQLEKVFSLLLNAGYVVSLKKSEIAQHEVEFLGFNITKEGRGLTETFKQKLLNITPPRDLKQLQSILGKLNFARNFIPNFSELVKPLYNIIATAPGKYITWTTDNSQQLQNIISMLNSAENLEERNPEVRLIMKVNTSPSAGYIRFYNEFAKRPIMYLNYVYTKAEVKFTNTEKLLTTIHKGLIKALDLGMGQEILVYSPIVSMTKIQKTPLPERKALPIRWITWMSYLEDPRIQFHYDKTLPELQQVPTVTDDIIAKIKHPSEFSMVFYTDGSAIKHPNVNKSHNAGMGIAQVQFKPEFTVINTWSIPLGDHTAQLAEVAAVEFACKKALKIDGPVLIVTDSFYVAESVNKELPYWQSNGFFNNKKKPLKHVSKWKSIADCIQLKPDIIIIHEKGHQPTASTFHTEGNNLADKLATQGSYVVNAGKRTADGSEFEKRTADGSEFESPKKKAKVE

SEQ ID NO: 665 - protein, 2176 aa, synthetic construct
MPAAKRVKLDGGDKKYSIGLDIGTNSVGWAVITDEYKVPSKKFKVLGNTDRHSIKKNLIGALLFDSGETAEATRLKRTARRRYTRRKNRICYLQEIFSNEMAKVDDSFFHRLEESFLVEEDKKHERHPIFGNIVDEVAYHEKYPTIYHLRKKLVDSTDKADLRLIYLALAHMIKFRGHFLIEGDLNPDNSDVDKLFIQLVQTYNQLFEENPINASGVDAKAILSARLSKSRRLENLIAQLPGEKKNGLFGNLIALSLGLTPNFKSNFDLAEDAKLQLSKDTYDDDLDNLLAQIGDQYADLFLAAKNLSDAILLSDILRVNTEITKAPLSASMIKRYDEHHQDLTLLKALVRQQLPEKYKEIFFDQSKNGYAGYIDGGASQEEFYKFIKPILEKMDGTEELLVKLNREDLLRKQRTFDNGSIPHQIHLGELHAILRRQEDFYPFLKDNREKIEKILTFRIPYYVGPLARGNSRFAWMTRKSEETITPWNFEEVVDKGASAQSFIERMTNFDKNLPNEKVLPKHSLLYEYFTVYNELTKVKYVTEGMRKPAFLSGEQKKAIVDLLFKTNRKVTVKQLKEDYFKKIECFDSVEISGVEDRFNASLGTYHDLLKIIKDKDFLDNEENEDILEDIVLTLTLFEDREMIEERLKTYAHLFDDKVMKQLKRRRYTGWGRLSRKLINGIRDKQSGKTILDFLKSDGFANRNFMQLIHDDSLTFKEDIQKAQVSGQGDSLHEHIANLAGSPAIKKGILQTVKVVDELVKVMGRHKPENIVIEMARENQTTQKGQKNSRERMKRIEEGIKELGSQILKEHPVENTQLQNEKLYLYYLQNGRDMYVDQELDINRLSDYDVDHIVPQSFLKDDSIDNKVLTRSDKARGKSDNVPSEEVVKKMKNYWRQLLNAKLITQRKFDNLTKAERGGLSELDKAGFIKRQLVETRQITKHVAQILDSRMNTKYDENDKLIREVKVITLKSKLVSDFRKDFQFYKVREINNYHHAHDAYLNAVVGTALIKKYPKLESEFVYGDYKVYDVRKMIAKSEQEIGKATAKYFFYSNIMNFFKTEITLANGEIRKRPLIETNGETGEIVWDKGRDFATVRKVLSMPQVNIVKKTEVQTGGFSKESILPKRNSDKLIARKKDWDPKKYGGFDSPTVAYSVLVVAKVEKGKSKKLKSVKELLGITIMERSSFEKNPIDFLEAKGYKEVKKDLIIKLPKYSLFELENGRKRMLASAGELQKGNELALPSKYVNFLYLASHYEKLKGSPEDNEQKQLFVEQHKHYLDEIIEQISEFSKRVILADANLDKVLSAYNKHRDKPIREQAENIIHLFTLTNLGAPAAFKYFDTTIDRKRYTSTKEVLDATLIHQSITGLYETRIDLSQLGGDGGEAAAKGGSGSSGGMDPLQLLQPLEAEIKGTKLKAHWNSGATITCVPQAFLEEEVPIKNIWIKTIHGEKEQPVYYLTFKIQGRKVEAEVISSPYDYILVSPSDIPWLMKKPLQLTTLVPLQEYEERLLKQTMLTGSYKEKLQSLFLKYDALWQHWENQVGHRRIKPHHIATGTVNPRPQKQYPINPKAKASIQTVINDLLKQGVLIQQNSIMNTPVYPVPKPDGKWRMVLDYREVNKTIPLIAAQNQHSAGILSSIFRGKYKTTLDLSNGFWAHSITPESYWLTAFTWLGQQYCWTRLPQGFLNSPALFNADVVDLLKEVPNVQVYVDDIYISHDDPREHLEQLEKVFSLLLNAGYVVSLKKSEIAQHEVEFLGFNITKEGRGLTETFKQKLLNITPPRDLKQLQSILGKLNFARNFIPNFSELVKPLYNIIATAPGKYITWTTDNSQQLQNIISMLNSAENLEERNPEVRLIMKVNTSPSAGYIRFYNEFAKRPIMYLNYVYTKAEVKFTNTEKLLTTIHKGLIKALDLGMGQEILVYSPIVSMTKIQKTPLPERKALPIRWITWMSYLEDPRIQFHYDKTLPELQQVPTVTDDIIAKIKHPSEFSMVFYTDGSAIKHPNVNKSHNAGMGIAQVQFKPEFTVINTWSIPLGDHTAQLAEVAAVEFACKKALKIDGPVLIVTDSFYVAESVNKELPYWQSNGFFNNKKKPLKHVSKWKSIADCIQLKPDIIIIHEKGHQPTASTFHTEGNNLADKLATQGSYVVNAGKRTADGSEFEKRTADGSEFESPKKKAKVE

SEQ ID NO: 666 - protein, 2174 aa, synthetic construct
MPAAKRVKLDGGDKKYSIGLDIGTNSVGWAVITDEYKVPSKKFKVLGNTDRHSIKKNLIGALLFDSGETAEATRLKRTARRRYTRRKNRICYLQEIFSNEMAKVDDSFFHRLEESFLVEEDKKHERHPIFGNIVDEVAYHEKYPTIYHLRKKLVDSTDKADLRLIYLALAHMIKFRGHFLIEGDLNPDNSDVDKLFIQLVQTYNQLFEENPINASGVDAKAILSARLSKSRRLENLIAQLPGEKKNGLFGNLIALSLGLTPNFKSNFDLAEDAKLQLSKDTYDDDLDNLLAQIGDQYADLFLAAKNLSDAILLSDILRVNTEITKAPLSASMIKRYDEHHQDLTLLKALVRQQLPEKYKEIFFDQSKNGYAGYIDGGASQEEFYKFIKPILEKMDGTEELLVKLNREDLLRKQRTFDNGSIPHQIHLGELHAILRRQEDFYPFLKDNREKIEKILTFRIPYYVGPLARGNSRFAWMTRKSEETITPWNFEEVVDKGASAQSFIERMTNFDKNLPNEKVLPKHSLLYEYFTVYNELTKVKYVTEGMRKPAFLSGEQKKAIVDLLFKTNRKVTVKQLKEDYFKKIECFDSVEISGVEDRFNASLGTYHDLLKIIKDKDFLDNEENEDILEDIVLTLTLFEDREMIEERLKTYAHLFDDKVMKQLKRRRYTGWGRLSRKLINGIRDKQSGKTILDFLKSDGFANRNFMQLIHDDSLTFKEDIQKAQVSGQGDSLHEHIANLAGSPAIKKGILQTVKVVDELVKVMGRHKPENIVIEMARENQTTQKGQKNSRERMKRIEEGIKELGSQILKEHPVENTQLQNEKLYLYYLQNGRDMYVDQELDINRLSDYDVDHIVPQSFLKDDSIDNKVLTRSDKARGKSDNVPSEEVVKKMKNYWRQLLNAKLITQRKFDNLTKAERGGLSELDKAGFIKRQLVETRQITKHVAQILDSRMNTKYDENDKLIREVKVITLKSKLVSDFRKDFQFYKVREINNYHHAHDAYLNAVVGTALIKKYPKLESEFVYGDYKVYDVRKMIAKSEQEIGKATAKYFFYSNIMNFFKTEITLANGEIRKRPLIETNGETGEIVWDKGRDFATVRKVLSMPQVNIVKKTEVQTGGFSKESILPKRNSDKLIARKKDWDPKKYGGFDSPTVAYSVLVVAKVEKGKSKKLKSVKELLGITIMERSSFEKNPIDFLEAKGYKEVKKDLIIKLPKYSLFELENGRKRMLASAGELQKGNELALPSKYVNFLYLASHYEKLKGSPEDNEQKQLFVEQHKHYLDEIIEQISEFSKRVILADANLDKVLSAYNKHRDKPIREQAENIIHLFTLTNLGAPAAFKYFDTTIDRKRYTSTKEVLDATLIHQSITGLYETRIDLSQLGGDGGPAPAPAPAPGGMDPLQLLQPLEAEIKGTKLKAHWNSGATITCVPQAFLEEEVPIKNIWIKTIHGEKEQPVYYLTFKIQGRKVEAEVISSPYDYILVSPSDIPWLMKKPLQLTTLVPLQEYEERLLKQTMLTGSYKEKLQSLFLKYDALWQHWENQVGHRRIKPHHIATGTVNPRPQKQYPINPKAKASIQTVINDLLKQGVLIQQNSIMNTPVYPVPKPDGKWRMVLDYREVNKTIPLIAAQNQHSAGILSSIFRGKYKTTLDLSNGFWAHSITPESYWLTAFTWLGQQYCWTRLPQGFLNSPALFNADVVDLLKEVPNVQVYVDDIYISHDDPREHLEQLEKVFSLLLNAGYVVSLKKSEIAQHEVEFLGFNITKEGRGLTETFKQKLLNITPPRDLKQLQSILGKLNFARNFIPNFSELVKPLYNIIATAPGKYITWTTDNSQQLQNIISMLNSAENLEERNPEVRLIMKVNTSPSAGYIRFYNEFAKRPIMYLNYVYTKAEVKFTNTEKLLTTIHKGLIKALDLGMGQEILVYSPIVSMTKIQKTPLPERKALPIRWITWMSYLEDPRIQFHYDKTLPELQQVPTVTDDIIAKIKHPSEFSMVFYTDGSAIKHPNVNKSHNAGMGIAQVQFKPEFTVINTWSIPLGDHTAQLAEVAAVEFACKKALKIDGPVLIVTDSFYVAESVNKELPYWQSNGFFNNKKKPLKHVSKWKSIADCIQLKPDIIIIHEKGHQPTASTFHTEGNNLADKLATQGSYVVNAGKRTADGSEFEKRTADGSEFESPKKKAKVE

SEQ ID NO: 667 - protein, 2176 aa, synthetic construct
MPAAKRVKLDGGDKKYSIGLDIGTNSVGWAVITDEYKVPSKKFKVLGNTDRHSIKKNLIGALLFDSGETAEATRLKRTARRRYTRRKNRICYLQEIFSNEMAKVDDSFFHRLEESFLVEEDKKHERHPIFGNIVDEVAYHEKYPTIYHLRKKLVDSTDKADLRLIYLALAHMIKFRGHFLIEGDLNPDNSDVDKLFIQLVQTYNQLFEENPINASGVDAKAILSARLSKSRRLENLIAQLPGEKKNGLFGNLIALSLGLTPNFKSNFDLAEDAKLQLSKDTYDDDLDNLLAQIGDQYADLFLAAKNLSDAILLSDILRVNTEITKAPLSASMIKRYDEHHQDLTLLKALVRQQLPEKYKEIFFDQSKNGYAGYIDGGASQEEFYKFIKPILEKMDGTEELLVKLNREDLLRKQRTFDNGSIPHQIHLGELHAILRRQEDFYPFLKDNREKIEKILTFRIPYYVGPLARGNSRFAWMTRKSEETITPWNFEEVVDKGASAQSFIERMTNFDKNLPNEKVLPKHSLLYEYFTVYNELTKVKYVTEGMRKPAFLSGEQKKAIVDLLFKTNRKVTVKQLKEDYFKKIECFDSVEISGVEDRFNASLGTYHDLLKIIKDKDFLDNEENEDILEDIVLTLTLFEDREMIEERLKTYAHLFDDKVMKQLKRRRYTGWGRLSRKLINGIRDKQSGKTILDFLKSDGFANRNFMQLIHDDSLTFKEDIQKAQVSGQGDSLHEHIANLAGSPAIKKGILQTVKVVDELVKVMGRHKPENIVIEMARENQTTQKGQKNSRERMKRIEEGIKELGSQILKEHPVENTQLQNEKLYLYYLQNGRDMYVDQELDINRLSDYDVDHIVPQSFLKDDSIDNKVLTRSDKARGKSDNVPSEEVVKKMKNYWRQLLNAKLITQRKFDNLTKAERGGLSELDKAGFIKRQLVETRQITKHVAQILDSRMNTKYDENDKLIREVKVITLKSKLVSDFRKDFQFYKVREINNYHHAHDAYLNAVVGTALIKKYPKLESEFVYGDYKVYDVRKMIAKSEQEIGKATAKYFFYSNIMNFFKTEITLANGEIRKRPLIETNGETGEIVWDKGRDFATVRKVLSMPQVNIVKKTEVQTGGFSKESILPKRNSDKLIARKKDWDPKKYGGFDSPTVAYSVLVVAKVEKGKSKKLKSVKELLGITIMERSSFEKNPIDFLEAKGYKEVKKDLIIKLPKYSLFELENGRKRMLASAGELQKGNELALPSKYVNFLYLASHYEKLKGSPEDNEQKQLFVEQHKHYLDEIIEQISEFSKRVILADANLDKVLSAYNKHRDKPIREQAENIIHLFTLTNLGAPAAFKYFDTTIDRKRYTSTKEVLDATLIHQSITGLYETRIDLSQLGGDGGGSSGGGEAAAKGGMDPLQLLQPLEAEIKGTKLKAHWNSGATITCVPQAFLEEEVPIKNIWIKTIHGEKEQPVYYLTFKIQGRKVEAEVISSPYDYILVSPSDIPWLMKKPLQLTTLVPLQEYEERLLKQTMLTGSYKEKLQSLFLKYDALWQHWENQVGHRRIKPHHIATGTVNPRPQKQYPINPKAKASIQTVINDLLKQGVLIQQNSIMNTPVYPVPKPDGKWRMVLDYREVNKTIPLIAAQNQHSAGILSSIFRGKYKTTLDLSNGFWAHSITPESYWLTAFTWLGQQYCWTRLPQGFLNSPALFNADVVDLLKEVPNVQVYVDDIYISHDDPREHLEQLEKVFSLLLNAGYVVSLKKSEIAQHEVEFLGFNITKEGRGLTETFKQKLLNITPPRDLKQLQSILGKLNFARNFIPNFSELVKPLYNIIATAPGKYITWTTDNSQQLQNIISMLNSAENLEERNPEVRLIMKVNTSPSAGYIRFYNEFAKRPIMYLNYVYTKAEVKFTNTEKLLTTIHKGLIKALDLGMGQEILVYSPIVSMTKIQKTPLPERKALPIRWITWMSYLEDPRIQFHYDKTLPELQQVPTVTDDIIAKIKHPSEFSMVFYTDGSAIKHPNVNKSHNAGMGIAQVQFKPEFTVINTWSIPLGDHTAQLAEVAAVEFACKKALKIDGPVLIVTDSFYVAESVNKELPYWQSNGFFNNKKKPLKHVSKWKSIADCIQLKPDIIIIHEKGHQPTASTFHTEGNNLADKLATQGSYVVNAGKRTADGSEFEKRTADGSEFESPKKKAKVE

SEQ ID NO: 668 - protein, 2176 aa, synthetic construct
MPAAKRVKLDGGDKKYSIGLDIGTNSVGWAVITDEYKVPSKKFKVLGNTDRHSIKKNLIGALLFDSGETAEATRLKRTARRRYTRRKNRICYLQEIFSNEMAKVDDSFFHRLEESFLVEEDKKHERHPIFGNIVDEVAYHEKYPTIYHLRKKLVDSTDKADLRLIYLALAHMIKFRGHFLIEGDLNPDNSDVDKLFIQLVQTYNQLFEENPINASGVDAKAILSARLSKSRRLENLIAQLPGEKKNGLFGNLIALSLGLTPNFKSNFDLAEDAKLQLSKDTYDDDLDNLLAQIGDQYADLFLAAKNLSDAILLSDILRVNTEITKAPLSASMIKRYDEHHQDLTLLKALVRQQLPEKYKEIFFDQSKNGYAGYIDGGASQEEFYKFIKPILEKMDGTEELLVKLNREDLLRKQRTFDNGSIPHQIHLGELHAILRRQEDFYPFLKDNREKIEKILTFRIPYYVGPLARGNSRFAWMTRKSEETITPWNFEEVVDKGASAQSFIERMTNFDKNLPNEKVLPKHSLLYEYFTVYNELTKVKYVTEGMRKPAFLSGEQKKAIVDLLFKTNRKVTVKQLKEDYFKKIECFDSVEISGVEDRFNASLGTYHDLLKIIKDKDFLDNEENEDILEDIVLTLTLFEDREMIEERLKTYAHLFDDKVMKQLKRRRYTGWGRLSRKLINGIRDKQSGKTILDFLKSDGFANRNFMQLIHDDSLTFKEDIQKAQVSGQGDSLHEHIANLAGSPAIKKGILQTVKVVDELVKVMGRHKPENIVIEMARENQTTQKGQKNSRERMKRIEEGIKELGSQILKEHPVENTQLQNEKLYLYYLQNGRDMYVDQELDINRLSDYDVDHIVPQSFLKDDSIDNKVLTRSDKARGKSDNVPSEEVVKKMKNYWRQLLNAKLITQRKFDNLTKAERGGLSELDKAGFIKRQLVETRQITKHVAQILDSRMNTKYDENDKLIREVKVITLKSKLVSDFRKDFQFYKVREINNYHHAHDAYLNAVVGTALIKKYPKLESEFVYGDYKVYDVRKMIAKSEQEIGKATAKYFFYSNIMNFFKTEITLANGEIRKRPLIETNGETGEIVWDKGRDFATVRKVLSMPQVNIVKKTEVQTGGFSKESILPKRNSDKLIARKKDWDPKKYGGFDSPTVAYSVLVVAKVEKGKSKKLKSVKELLGITIMERSSFEKNPIDFLEAKGYKEVKKDLIIKLPKYSLFELENGRKRMLASAGELQKGNELALPSKYVNFLYLASHYEKLKGSPEDNEQKQLFVEQHKHYLDEIIEQISEFSKRVILADANLDKVLSAYNKHRDKPIREQAENIIHLFTLTNLGAPAAFKYFDTTIDRKRYTSTKEVLDATLIHQSITGLYETRIDLSQLGGDGGGGSEAAAKPAPGGMDPLQLLQPLEAEIKGTKLKAHWNSGATITCVPQAFLEEEVPIKNIWIKTIHGEKEQPVYYLTFKIQGRKVEAEVISSPYDYILVSPSDIPWLMKKPLQLTTLVPLQEYEERLLKQTMLTGSYKEKLQSLFLKYDALWQHWENQVGHRRIKPHHIATGTVNPRPQKQYPINPKAKASIQTVINDLLKQGVLIQQNSIMNTPVYPVPKPDGKWRMVLDYREVNKTIPLIAAQNQHSAGILSSIFRGKYKTTLDLSNGFWAHSITPESYWLTAFTWLGQQYCWTRLPQGFLNSPALFNADVVDLLKEVPNVQVYVDDIYISHDDPREHLEQLEKVFSLLLNAGYVVSLKKSEIAQHEVEFLGFNITKEGRGLTETFKQKLLNITPPRDLKQLQSILGKLNFARNFIPNFSELVKPLYNIIATAPGKYITWTTDNSQQLQNIISMLNSAENLEERNPEVRLIMKVNTSPSAGYIRFYNEFAKRPIMYLNYVYTKAEVKFTNTEKLLTTIHKGLIKALDLGMGQEILVYSPIVSMTKIQKTPLPERKALPIRWITWMSYLEDPRIQFHYDKTLPELQQVPTVTDDIIAKIKHPSEFSMVFYTDGSAIKHPNVNKSHNAGMGIAQVQFKPEFTVINTWSIPLGDHTAQLAEVAAVEFACKKALKIDGPVLIVTDSFYVAESVNKELPYWQSNGFFNNKKKPLKHVSKWKSIADCIQLKPDIIIIHEKGHQPTASTFHTEGNNLADKLATQGSYVVNAGKRTADGSEFEKRTADGSEFESPKKKAKVE

SEQ ID NO: 669 - protein, 2174 aa, synthetic construct
MPAAKRVKLDGGDKKYSIGLDIGTNSVGWAVITDEYKVPSKKFKVLGNTDRHSIKKNLIGALLFDSGETAEATRLKRTARRRYTRRKNRICYLQEIFSNEMAKVDDSFFHRLEESFLVEEDKKHERHPIFGNIVDEVAYHEKYPTIYHLRKKLVDSTDKADLRLIYLALAHMIKFRGHFLIEGDLNPDNSDVDKLFIQLVQTYNQLFEENPINASGVDAKAILSARLSKSRRLENLIAQLPGEKKNGLFGNLIALSLGLTPNFKSNFDLAEDAKLQLSKDTYDDDLDNLLAQIGDQYADLFLAAKNLSDAILLSDILRVNTEITKAPLSASMIKRYDEHHQDLTLLKALVRQQLPEKYKEIFFDQSKNGYAGYIDGGASQEEFYKFIKPILEKMDGTEELLVKLNREDLLRKQRTFDNGSIPHQIHLGELHAILRRQEDFYPFLKDNREKIEKILTFRIPYYVGPLARGNSRFAWMTRKSEETITPWNFEEVVDKGASAQSFIERMTNFDKNLPNEKVLPKHSLLYEYFTVYNELTKVKYVTEGMRKPAFLSGEQKKAIVDLLFKTNRKVTVKQLKEDYFKKIECFDSVEISGVEDRFNASLGTYHDLLKIIKDKDFLDNEENEDILEDIVLTLTLFEDREMIEERLKTYAHLFDDKVMKQLKRRRYTGWGRLSRKLINGIRDKQSGKTILDFLKSDGFANRNFMQLIHDDSLTFKEDIQKAQVSGQGDSLHEHIANLAGSPAIKKGILQTVKVVDELVKVMGRHKPENIVIEMARENQTTQKGQKNSRERMKRIEEGIKELGSQILKEHPVENTQLQNEKLYLYYLQNGRDMYVDQELDINRLSDYDVDHIVPQSFLKDDSIDNKVLTRSDKARGKSDNVPSEEVVKKMKNYWRQLLNAKLITQRKFDNLTKAERGGLSELDKAGFIKRQLVETRQITKHVAQILDSRMNTKYDENDKLIREVKVITLKSKLVSDFRKDFQFYKVREINNYHHAHDAYLNAVVGTALIKKYPKLESEFVYGDYKVYDVRKMIAKSEQEIGKATAKYFFYSNIMNFFKTEITLANGEIRKRPLIETNGETGEIVWDKGRDFATVRKVLSMPQVNIVKKTEVQTGGFSKESILPKRNSDKLIARKKDWDPKKYGGFDSPTVAYSVLVVAKVEKGKSKKLKSVKELLGITIMERSSFEKNPIDFLEAKGYKEVKKDLIIKLPKYSLFELENGRKRMLASAGELQKGNELALPSKYVNFLYLASHYEKLKGSPEDNEQKQLFVEQHKHYLDEIIEQISEFSKRVILADANLDKVLSAYNKHRDKPIREQAENIIHLFTLTNLGAPAAFKYFDTTIDRKRYTSTKEVLDATLIHQSITGLYETRIDLSQLGGDGGGGGGSSPAPGGMDPLQLLQPLEAEIKGTKLKAHWNSGATITCVPQAFLEEEVPIKNIWIKTIHGEKEQPVYYLTFKIQGRKVEAEVISSPYDYILVSPSDIPWLMKKPLQLTTLVPLQEYEERLLKQTMLTGSYKEKLQSLFLKYDALWQHWENQVGHRRIKPHHIATGTVNPRPQKQYPINPKAKASIQTVINDLLKQGVLIQQNSIMNTPVYPVPKPDGKWRMVLDYREVNKTIPLIAAQNQHSAGILSSIFRGKYKTTLDLSNGFWAHSITPESYWLTAFTWLGQQYCWTRLPQGFLNSPALFNADVVDLLKEVPNVQVYVDDIYISHDDPREHLEQLEKVFSLLLNAGYVVSLKKSEIAQHEVEFLGFNITKEGRGLTETFKQKLLNITPPRDLKQLQSILGKLNFARNFIPNFSELVKPLYNIIATAPGKYITWTTDNSQQLQNIISMLNSAENLEERNPEVRLIMKVNTSPSAGYIRFYNEFAKRPIMYLNYVYTKAEVKFTNTEKLLTTIHKGLIKALDLGMGQEILVYSPIVSMTKIQKTPLPERKALPIRWITWMSYLEDPRIQFHYDKTLPELQQVPTVTDDIIAKIKHPSEFSMVFYTDGSAIKHPNVNKSHNAGMGIAQVQFKPEFTVINTWSIPLGDHTAQLAEVAAVEFACKKALKIDGPVLIVTDSFYVAESVNKELPYWQSNGFFNNKKKPLKHVSKWKSIADCIQLKPDIIIIHEKGHQPTASTFHTEGNNLADKLATQGSYVVNAGKRTADGSEFEKRTADGSEFESPKKKAKVE

SEQ ID NO: 670 - protein, 2176 aa, synthetic construct
MPAAKRVKLDGGDKKYSIGLDIGTNSVGWAVITDEYKVPSKKFKVLGNTDRHSIKKNLIGALLFDSGETAEATRLKRTARRRYTRRKNRICYLQEIFSNEMAKVDDSFFHRLEESFLVEEDKKHERHPIFGNIVDEVAYHEKYPTIYHLRKKLVDSTDKADLRLIYLALAHMIKFRGHFLIEGDLNPDNSDVDKLFIQLVQTYNQLFEENPINASGVDAKAILSARLSKSRRLENLIAQLPGEKKNGLFGNLIALSLGLTPNFKSNFDLAEDAKLQLSKDTYDDDLDNLLAQIGDQYADLFLAAKNLSDAILLSDILRVNTEITKAPLSASMIKRYDEHHQDLTLLKALVRQQLPEKYKEIFFDQSKNGYAGYIDGGASQEEFYKFIKPILEKMDGTEELLVKLNREDLLRKQRTFDNGSIPHQIHLGELHAILRRQEDFYPFLKDNREKIEKILTFRIPYYVGPLARGNSRFAWMTRKSEETITPWNFEEVVDKGASAQSFIERMTNFDKNLPNEKVLPKHSLLYEYFTVYNELTKVKYVTEGMRKPAFLSGEQKKAIVDLLFKTNRKVTVKQLKEDYFKKIECFDSVEISGVEDRFNASLGTYHDLLKIIKDKDFLDNEENEDILEDIVLTLTLFEDREMIEERLKTYAHLFDDKVMKQLKRRRYTGWGRLSRKLINGIRDKQSGKTILDFLKSDGFANRNFMQLIHDDSLTFKEDIQKAQVSGQGDSLHEHIANLAGSPAIKKGILQTVKVVDELVKVMGRHKPENIVIEMARENQTTQKGQKNSRERMKRIEEGIKELGSQILKEHPVENTQLQNEKLYLYYLQNGRDMYVDQELDINRLSDYDVDHIVPQSFLKDDSIDNKVLTRSDKARGKSDNVPSEEVVKKMKNYWRQLLNAKLITQRKFDNLTKAERGGLSELDKAGFIKRQLVETRQITKHVAQILDSRMNTKYDENDKLIREVKVITLKSKLVSDFRKDFQFYKVREINNYHHAHDAYLNAVVGTALIKKYPKLESEFVYGDYKVYDVRKMIAKSEQEIGKATAKYFFYSNIMNFFKTEITLANGEIRKRPLIETNGETGEIVWDKGRDFATVRKVLSMPQVNIVKKTEVQTGGFSKESILPKRNSDKLIARKKDWDPKKYGGFDSPTVAYSVLVVAKVEKGKSKKLKSVKELLGITIMERSSFEKNPIDFLEAKGYKEVKKDLIIKLPKYSLFELENGRKRMLASAGELQKGNELALPSKYVNFLYLASHYEKLKGSPEDNEQKQLFVEQHKHYLDEIIEQISEFSKRVILADANLDKVLSAYNKHRDKPIREQAENIIHLFTLTNLGAPAAFKYFDTTIDRKRYTSTKEVLDATLIHQSITGLYETRIDLSQLGGDGGGSSGGSEAAAKGGMDPLQLLQPLEAEIKGTKLKAHWNSGATITCVPQAFLEEEVPIKNIWIKTIHGEKEQPVYYLTFKIQGRKVEAEVISSPYDYILVSPSDIPWLMKKPLQLTTLVPLQEYEERLLKQTMLTGSYKEKLQSLFLKYDALWQHWENQVGHRRIKPHHIATGTVNPRPQKQYPINPKAKASIQTVINDLLKQGVLIQQNSIMNTPVYPVPKPDGKWRMVLDYREVNKTIPLIAAQNQHSAGILSSIFRGKYKTTLDLSNGFWAHSITPESYWLTAFTWLGQQYCWTRLPQGFLNSPALFNADVVDLLKEVPNVQVYVDDIYISHDDPREHLEQLEKVFSLLLNAGYVVSLKKSEIAQHEVEFLGFNITKEGRGLTETFKQKLLNITPPRDLKQLQSILGKLNFARNFIPNFSELVKPLYNIIATAPGKYITWTTDNSQQLQNIISMLNSAENLEERNPEVRLIMKVNTSPSAGYIRFYNEFAKRPIMYLNYVYTKAEVKFTNTEKLLTTIHKGLIKALDLGMGQEILVYSPIVSMTKIQKTPLPERKALPIRWITWMSYLEDPRIQFHYDKTLPELQQVPTVTDDIIAKIKHPSEFSMVFYTDGSAIKHPNVNKSHNAGMGIAQVQFKPEFTVINTWSIPLGDHTAQLAEVAAVEFACKKALKIDGPVLIVTDSFYVAESVNKELPYWQSNGFFNNKKKPLKHVSKWKSIADCIQLKPDIIIIHEKGHQPTASTFHTEGNNLADKLATQGSYVVNAGKRTADGSEFEKRTADGSEFESPKKKAKVE

SEQ ID NO: 671 - protein, 2176 aa, synthetic construct
MPAAKRVKLDGGDKKYSIGLDIGTNSVGWAVITDEYKVPSKKFKVLGNTDRHSIKKNLIGALLFDSGETAEATRLKRTARRRYTRRKNRICYLQEIFSNEMAKVDDSFFHRLEESFLVEEDKKHERHPIFGNIVDEVAYHEKYPTIYHLRKKLVDSTDKADLRLIYLALAHMIKFRGHFLIEGDLNPDNSDVDKLFIQLVQTYNQLFEENPINASGVDAKAILSARLSKSRRLENLIAQLPGEKKNGLFGNLIALSLGLTPNFKSNFDLAEDAKLQLSKDTYDDDLDNLLAQIGDQYADLFLAAKNLSDAILLSDILRVNTEITKAPLSASMIKRYDEHHQDLTLLKALVRQQLPEKYKEIFFDQSKNGYAGYIDGGASQEEFYKFIKPILEKMDGTEELLVKLNREDLLRKQRTFDNGSIPHQIHLGELHAILRRQEDFYPFLKDNREKIEKILTFRIPYYVGPLARGNSRFAWMTRKSEETITPWNFEEVVDKGASAQSFIERMTNFDKNLPNEKVLPKHSLLYEYFTVYNELTKVKYVTEGMRKPAFLSGEQKKAIVDLLFKTNRKVTVKQLKEDYFKKIECFDSVEISGVEDRFNASLGTYHDLLKIIKDKDFLDNEENEDILEDIVLTLTLFEDREMIEERLKTYAHLFDDKVMKQLKRRRYTGWGRLSRKLINGIRDKQSGKTILDFLKSDGFANRNFMQLIHDDSLTFKEDIQKAQVSGQGDSLHEHIANLAGSPAIKKGILQTVKVVDELVKVMGRHKPENIVIEMARENQTTQKGQKNSRERMKRIEEGIKELGSQILKEHPVENTQLQNEKLYLYYLQNGRDMYVDQELDINRLSDYDVDHIVPQSFLKDDSIDNKVLTRSDKARGKSDNVPSEEVVKKMKNYWRQLLNAKLITQRKFDNLTKAERGGLSELDKAGFIKRQLVETRQITKHVAQILDSRMNTKYDENDKLIREVKVITLKSKLVSDFRKDFQFYKVREINNYHHAHDAYLNAVVGTALIKKYPKLESEFVYGDYKVYDVRKMIAKSEQEIGKATAKYFFYSNIMNFFKTEITLANGEIRKRPLIETNGETGEIVWDKGRDFATVRKVLSMPQVNIVKKTEVQTGGFSKESILPKRNSDKLIARKKDWDPKKYGGFDSPTVAYSVLVVAKVEKGKSKKLKSVKELLGITIMERSSFEKNPIDFLEAKGYKEVKKDLIIKLPKYSLFELENGRKRMLASAGELQKGNELALPSKYVNFLYLASHYEKLKGSPEDNEQKQLFVEQHKHYLDEIIEQISEFSKRVILADANLDKVLSAYNKHRDKPIREQAENIIHLFTLTNLGAPAAFKYFDTTIDRKRYTSTKEVLDATLIHQSITGLYETRIDLSQLGGDGGEAAAKGSSGGGGGMDPLQLLQPLEAEIKGTKLKAHWNSGATITCVPQAFLEEEVPIKNIWIKTIHGEKEQPVYYLTFKIQGRKVEAEVISSPYDYILVSPSDIPWLMKKPLQLTTLVPLQEYEERLLKQTMLTGSYKEKLQSLFLKYDALWQHWENQVGHRRIKPHHIATGTVNPRPQKQYPINPKAKASIQTVINDLLKQGVLIQQNSIMNTPVYPVPKPDGKWRMVLDYREVNKTIPLIAAQNQHSAGILSSIFRGKYKTTLDLSNGFWAHSITPESYWLTAFTWLGQQYCWTRLPQGFLNSPALFNADVVDLLKEVPNVQVYVDDIYISHDDPREHLEQLEKVFSLLLNAGYVVSLKKSEIAQHEVEFLGFNITKEGRGLTETFKQKLLNITPPRDLKQLQSILGKLNFARNFIPNFSELVKPLYNIIATAPGKYITWTTDNSQQLQNIISMLNSAENLEERNPEVRLIMKVNTSPSAGYIRFYNEFAKRPIMYLNYVYTKAEVKFTNTEKLLTTIHKGLIKALDLGMGQEILVYSPIVSMTKIQKTPLPERKALPIRWITWMSYLEDPRIQFHYDKTLPELQQVPTVTDDIIAKIKHPSEFSMVFYTDGSAIKHPNVNKSHNAGMGIAQVQFKPEFTVINTWSIPLGDHTAQLAEVAAVEFACKKALKIDGPVLIVTDSFYVAESVNKELPYWQSNGFFNNKKKPLKHVSKWKSIADCIQLKPDIIIIHEKGHQPTASTFHTEGNNLADKLATQGSYVVNAGKRTADGSEFEKRTADGSEFESPKKKAKVE

SEQ ID NO: 672 - protein, 2171 aa, synthetic construct
MPAAKRVKLDGGDKKYSIGLDIGTNSVGWAVITDEYKVPSKKFKVLGNTDRHSIKKNLIGALLFDSGETAEATRLKRTARRRYTRRKNRICYLQEIFSNEMAKVDDSFFHRLEESFLVEEDKKHERHPIFGNIVDEVAYHEKYPTIYHLRKKLVDSTDKADLRLIYLALAHMIKFRGHFLIEGDLNPDNSDVDKLFIQLVQTYNQLFEENPINASGVDAKAILSARLSKSRRLENLIAQLPGEKKNGLFGNLIALSLGLTPNFKSNFDLAEDAKLQLSKDTYDDDLDNLLAQIGDQYADLFLAAKNLSDAILLSDILRVNTEITKAPLSASMIKRYDEHHQDLTLLKALVRQQLPEKYKEIFFDQSKNGYAGYIDGGASQEEFYKFIKPILEKMDGTEELLVKLNREDLLRKQRTFDNGSIPHQIHLGELHAILRRQEDFYPFLKDNREKIEKILTFRIPYYVGPLARGNSRFAWMTRKSEETITPWNFEEVVDKGASAQSFIERMTNFDKNLPNEKVLPKHSLLYEYFTVYNELTKVKYVTEGMRKPAFLSGEQKKAIVDLLFKTNRKVTVKQLKEDYFKKIECFDSVEISGVEDRFNASLGTYHDLLKIIKDKDFLDNEENEDILEDIVLTLTLFEDREMIEERLKTYAHLFDDKVMKQLKRRRYTGWGRLSRKLINGIRDKQSGKTILDFLKSDGFANRNFMQLIHDDSLTFKEDIQKAQVSGQGDSLHEHIANLAGSPAIKKGILQTVKVVDELVKVMGRHKPENIVIEMARENQTTQKGQKNSRERMKRIEEGIKELGSQILKEHPVENTQLQNEKLYLYYLQNGRDMYVDQELDINRLSDYDVDHIVPQSFLKDDSIDNKVLTRSDKARGKSDNVPSEEVVKKMKNYWRQLLNAKLITQRKFDNLTKAERGGLSELDKAGFIKRQLVETRQITKHVAQILDSRMNTKYDENDKLIREVKVITLKSKLVSDFRKDFQFYKVREINNYHHAHDAYLNAVVGTALIKKYPKLESEFVYGDYKVYDVRKMIAKSEQEIGKATAKYFFYSNIMNFFKTEITLANGEIRKRPLIETNGETGEIVWDKGRDFATVRKVLSMPQVNIVKKTEVQTGGFSKESILPKRNSDKLIARKKDWDPKKYGGFDSPTVAYSVLVVAKVEKGKSKKLKSVKELLGITIMERSSFEKNPIDFLEAKGYKEVKKDLIIKLPKYSLFELENGRKRMLASAGELQKGNELALPSKYVNFLYLASHYEKLKGSPEDNEQKQLFVEQHKHYLDEIIEQISEFSKRVILADANLDKVLSAYNKHRDKPIREQAENIIHLFTLTNLGAPAAFKYFDTTIDRKRYTSTKEVLDATLIHQSITGLYETRIDLSQLGGDGGGGSPAPGGMDPLQLLQPLEAEIKGTKLKAHWNSGATITCVPQAFLEEEVPIKNIWIKTIHGEKEQPVYYLTFKIQGRKVEAEVISSPYDYILVSPSDIPWLMKKPLQLTTLVPLQEYEERLLKQTMLTGSYKEKLQSLFLKYDALWQHWENQVGHRRIKPHHIATGTVNPRPQKQYPINPKAKASIQTVINDLLKQGVLIQQNSIMNTPVYPVPKPDGKWRMVLDYREVNKTIPLIAAQNQHSAGILSSIFRGKYKTTLDLSNGFWAHSITPESYWLTAFTWLGQQYCWTRLPQGFLNSPALFNADVVDLLKEVPNVQVYVDDIYISHDDPREHLEQLEKVFSLLLNAGYVVSLKKSEIAQHEVEFLGFNITKEGRGLTETFKQKLLNITPPRDLKQLQSILGKLNFARNFIPNFSELVKPLYNIIATAPGKYITWTTDNSQQLQNIISMLNSAENLEERNPEVRLIMKVNTSPSAGYIRFYNEFAKRPIMYLNYVYTKAEVKFTNTEKLLTTIHKGLIKALDLGMGQEILVYSPIVSMTKIQKTPLPERKALPIRWITWMSYLEDPRIQFHYDKTLPELQQVPTVTDDIIAKIKHPSEFSMVFYTDGSAIKHPNVNKSHNAGMGIAQVQFKPEFTVINTWSIPLGDHTAQLAEVAAVEFACKKALKIDGPVLIVTDSFYVAESVNKELPYWQSNGFFNNKKKPLKHVSKWKSIADCIQLKPDIIIIHEKGHQPTASTFHTEGNNLADKLATQGSYVVNAGKRTADGSEFEKRTADGSEFESPKKKAKVE

SEQ ID NO: 673 - protein, 2185 aa, synthetic construct
MPAAKRVKLDGGDKKYSIGLDIGTNSVGWAVITDEYKVPSKKFKVLGNTDRHSIKKNLIGALLFDSGETAEATRLKRTARRRYTRRKNRICYLQEIFSNEMAKVDDSFFHRLEESFLVEEDKKHERHPIFGNIVDEVAYHEKYPTIYHLRKKLVDSTDKADLRLIYLALAHMIKFRGHFLIEGDLNPDNSDVDKLFIQLVQTYNQLFEENPINASGVDAKAILSARLSKSRRLENLIAQLPGEKKNGLFGNLIALSLGLTPNFKSNFDLAEDAKLQLSKDTYDDDLDNLLAQIGDQYADLFLAAKNLSDAILLSDILRVNTEITKAPLSASMIKRYDEHHQDLTLLKALVRQQLPEKYKEIFFDQSKNGYAGYIDGGASQEEFYKFIKPILEKMDGTEELLVKLNREDLLRKQRTFDNGSIPHQIHLGELHAILRRQEDFYPFLKDNREKIEKILTFRIPYYVGPLARGNSRFAWMTRKSEETITPWNFEEVVDKGASAQSFIERMTNFDKNLPNEKVLPKHSLLYEYFTVYNELTKVKYVTEGMRKPAFLSGEQKKAIVDLLFKTNRKVTVKQLKEDYFKKIECFDSVEISGVEDRFNASLGTYHDLLKIIKDKDFLDNEENEDILEDIVLTLTLFEDREMIEERLKTYAHLFDDKVMKQLKRRRYTGWGRLSRKLINGIRDKQSGKTILDFLKSDGFANRNFMQLIHDDSLTFKEDIQKAQVSGQGDSLHEHIANLAGSPAIKKGILQTVKVVDELVKVMGRHKPENIVIEMARENQTTQKGQKNSRERMKRIEEGIKELGSQILKEHPVENTQLQNEKLYLYYLQNGRDMYVDQELDINRLSDYDVDHIVPQSFLKDDSIDNKVLTRSDKARGKSDNVPSEEVVKKMKNYWRQLLNAKLITQRKFDNLTKAERGGLSELDKAGFIKRQLVETRQITKHVAQILDSRMNTKYDENDKLIREVKVITLKSKLVSDFRKDFQFYKVREINNYHHAHDAYLNAVVGTALIKKYPKLESEFVYGDYKVYDVRKMIAKSEQEIGKATAKYFFYSNIMNFFKTEITLANGEIRKRPLIETNGETGEIVWDKGRDFATVRKVLSMPQVNIVKKTEVQTGGFSKESILPKRNSDKLIARKKDWDPKKYGGFDSPTVAYSVLVVAKVEKGKSKKLKSVKELLGITIMERSSFEKNPIDFLEAKGYKEVKKDLIIKLPKYSLFELENGRKRMLASAGELQKGNELALPSKYVNFLYLASHYEKLKGSPEDNEQKQLFVEQHKHYLDEIIEQISEFSKRVILADANLDKVLSAYNKHRDKPIREQAENIIHLFTLTNLGAPAAFKYFDTTIDRKRYTSTKEVLDATLIHQSITGLYETRIDLSQLGGDGGGGGGSGGGGSGGGGSGGGGSGGMDPLQLLQPLEAEIKGTKLKAHWNSGATITCVPQAFLEEEVPIKNIWIKTIHGEKEQPVYYLTFKIQGRKVEAEVISSPYDYILVSPSDIPWLMKKPLQLTTLVPLQEYEERLLKQTMLTGSYKEKLQSLFLKYDALWQHWENQVGHRRIKPHHIATGTVNPRPQKQYPINPKAKASIQTVINDLLKQGVLIQQNSIMNTPVYPVPKPDGKWRMVLDYREVNKTIPLIAAQNQHSAGILSSIFRGKYKTTLDLSNGFWAHSITPESYWLTAFTWLGQQYCWTRLPQGFLNSPALFNADVVDLLKEVPNVQVYVDDIYISHDDPREHLEQLEKVFSLLLNAGYVVSLKKSEIAQHEVEFLGFNITKEGRGLTETFKQKLLNITPPRDLKQLQSILGKLNFARNFIPNFSELVKPLYNIIATAPGKYITWTTDNSQQLQNIISMLNSAENLEERNPEVRLIMKVNTSPSAGYIRFYNEFAKRPIMYLNYVYTKAEVKFTNTEKLLTTIHKGLIKALDLGMGQEILVYSPIVSMTKIQKTPLPERKALPIRWITWMSYLEDPRIQFHYDKTLPELQQVPTVTDDIIAKIKHPSEFSMVFYTDGSAIKHPNVNKSHNAGMGIAQVQFKPEFTVINTWSIPLGDHTAQLAEVAAVEFACKKALKIDGPVLIVTDSFYVAESVNKELPYWQSNGFFNNKKKPLKHVSKWKSIADCIQLKPDIIIIHEKGHQPTASTFHTEGNNLADKLATQGSYVVNAGKRTADGSEFEKRTADGSEFESPKKKAKVE

SEQ ID NO: 674 - protein, 2176 aa, synthetic construct
MPAAKRVKLDGGDKKYSIGLDIGTNSVGWAVITDEYKVPSKKFKVLGNTDRHSIKKNLIGALLFDSGETAEATRLKRTARRRYTRRKNRICYLQEIFSNEMAKVDDSFFHRLEESFLVEEDKKHERHPIFGNIVDEVAYHEKYPTIYHLRKKLVDSTDKADLRLIYLALAHMIKFRGHFLIEGDLNPDNSDVDKLFIQLVQTYNQLFEENPINASGVDAKAILSARLSKSRRLENLIAQLPGEKKNGLFGNLIALSLGLTPNFKSNFDLAEDAKLQLSKDTYDDDLDNLLAQIGDQYADLFLAAKNLSDAILLSDILRVNTEITKAPLSASMIKRYDEHHQDLTLLKALVRQQLPEKYKEIFFDQSKNGYAGYIDGGASQEEFYKFIKPILEKMDGTEELLVKLNREDLLRKQRTFDNGSIPHQIHLGELHAILRRQEDFYPFLKDNREKIEKILTFRIPYYVGPLARGNSRFAWMTRKSEETITPWNFEEVVDKGASAQSFIERMTNFDKNLPNEKVLPKHSLLYEYFTVYNELTKVKYVTEGMRKPAFLSGEQKKAIVDLLFKTNRKVTVKQLKEDYFKKIECFDSVEISGVEDRFNASLGTYHDLLKIIKDKDFLDNEENEDILEDIVLTLTLFEDREMIEERLKTYAHLFDDKVMKQLKRRRYTGWGRLSRKLINGIRDKQSGKTILDFLKSDGFANRNFMQLIHDDSLTFKEDIQKAQVSGQGDSLHEHIANLAGSPAIKKGILQTVKVVDELVKVMGRHKPENIVIEMARENQTTQKGQKNSRERMKRIEEGIKELGSQILKEHPVENTQLQNEKLYLYYLQNGRDMYVDQELDINRLSDYDVDHIVPQSFLKDDSIDNKVLTRSDKARGKSDNVPSEEVVKKMKNYWRQLLNAKLITQRKFDNLTKAERGGLSELDKAGFIKRQLVETRQITKHVAQILDSRMNTKYDENDKLIREVKVITLKSKLVSDFRKDFQFYKVREINNYHHAHDAYLNAVVGTALIKKYPKLESEFVYGDYKVYDVRKMIAKSEQEIGKATAKYFFYSNIMNFFKTEITLANGEIRKRPLIETNGETGEIVWDKGRDFATVRKVLSMPQVNIVKKTEVQTGGFSKESILPKRNSDKLIARKKDWDPKKYGGFDSPTVAYSVLVVAKVEKGKSKKLKSVKELLGITIMERSSFEKNPIDFLEAKGYKEVKKDLIIKLPKYSLFELENGRKRMLASAGELQKGNELALPSKYVNFLYLASHYEKLKGSPEDNEQKQLFVEQHKHYLDEIIEQISEFSKRVILADANLDKVLSAYNKHRDKPIREQAENIIHLFTLTNLGAPAAFKYFDTTIDRKRYTSTKEVLDATLIHQSITGLYETRIDLSQLGGDGGGSSEAAAKGGGGGMDPLQLLQPLEAEIKGTKLKAHWNSGATITCVPQAFLEEEVPIKNIWIKTIHGEKEQPVYYLTFKIQGRKVEAEVISSPYDYILVSPSDIPWLMKKPLQLTTLVPLQEYEERLLKQTMLTGSYKEKLQSLFLKYDALWQHWENQVGHRRIKPHHIATGTVNPRPQKQYPINPKAKASIQTVINDLLKQGVLIQQNSIMNTPVYPVPKPDGKWRMVLDYREVNKTIPLIAAQNQHSAGILSSIFRGKYKTTLDLSNGFWAHSITPESYWLTAFTWLGQQYCWTRLPQGFLNSPALFNADVVDLLKEVPNVQVYVDDIYISHDDPREHLEQLEKVFSLLLNAGYVVSLKKSEIAQHEVEFLGFNITKEGRGLTETFKQKLLNITPPRDLKQLQSILGKLNFARNFIPNFSELVKPLYNIIATAPGKYITWTTDNSQQLQNIISMLNSAENLEERNPEVRLIMKVNTSPSAGYIRFYNEFAKRPIMYLNYVYTKAEVKFTNTEKLLTTIHKGLIKALDLGMGQEILVYSPIVSMTKIQKTPLPERKALPIRWITWMSYLEDPRIQFHYDKTLPELQQVPTVTDDIIAKIKHPSEFSMVFYTDGSAIKHPNVNKSHNAGMGIAQVQFKPEFTVINTWSIPLGDHTAQLAEVAAVEFACKKALKIDGPVLIVTDSFYVAESVNKELPYWQSNGFFNNKKKPLKHVSKWKSIADCIQLKPDIIIIHEKGHQPTASTFHTEGNNLADKLATQGSYVVNAGKRTADGSEFEKRTADGSEFESPKKKAKVE

SEQ ID NO: 675 - protein, 2176 aa, synthetic construct
MPAAKRVKLDGGDKKYSIGLDIGTNSVGWAVITDEYKVPSKKFKVLGNTDRHSIKKNLIGALLFDSGETAEATRLKRTARRRYTRRKNRICYLQEIFSNEMAKVDDSFFHRLEESFLVEEDKKHERHPIFGNIVDEVAYHEKYPTIYHLRKKLVDSTDKADLRLIYLALAHMIKFRGHFLIEGDLNPDNSDVDKLFIQLVQTYNQLFEENPINASGVDAKAILSARLSKSRRLENLIAQLPGEKKNGLFGNLIALSLGLTPNFKSNFDLAEDAKLQLSKDTYDDDLDNLLAQIGDQYADLFLAAKNLSDAILLSDILRVNTEITKAPLSASMIKRYDEHHQDLTLLKALVRQQLPEKYKEIFFDQSKNGYAGYIDGGASQEEFYKFIKPILEKMDGTEELLVKLNREDLLRKQRTFDNGSIPHQIHLGELHAILRRQEDFYPFLKDNREKIEKILTFRIPYYVGPLARGNSRFAWMTRKSEETITPWNFEEVVDKGASAQSFIERMTNFDKNLPNEKVLPKHSLLYEYFTVYNELTKVKYVTEGMRKPAFLSGEQKKAIVDLLFKTNRKVTVKQLKEDYFKKIECFDSVEISGVEDRFNASLGTYHDLLKIIKDKDFLDNEENEDILEDIVLTLTLFEDREMIEERLKTYAHLFDDKVMKQLKRRRYTGWGRLSRKLINGIRDKQSGKTILDFLKSDGFANRNFMQLIHDDSLTFKEDIQKAQVSGQGDSLHEHIANLAGSPAIKKGILQTVKVVDELVKVMGRHKPENIVIEMARENQTTQKGQKNSRERMKRIEEGIKELGSQILKEHPVENTQLQNEKLYLYYLQNGRDMYVDQELDINRLSDYDVDHIVPQSFLKDDSIDNKVLTRSDKARGKSDNVPSEEVVKKMKNYWRQLLNAKLITQRKFDNLTKAERGGLSELDKAGFIKRQLVETRQITKHVAQILDSRMNTKYDENDKLIREVKVITLKSKLVSDFRKDFQFYKVREINNYHHAHDAYLNAVVGTALIKKYPKLESEFVYGDYKVYDVRKMIAKSEQEIGKATAKYFFYSNIMNFFKTEITLANGEIRKRPLIETNGETGEIVWDKGRDFATVRKVLSMPQVNIVKKTEVQTGGFSKESILPKRNSDKLIARKKDWDPKKYGGFDSPTVAYSVLVVAKVEKGKSKKLKSVKELLGITIMERSSFEKNPIDFLEAKGYKEVKKDLIIKLPKYSLFELENGRKRMLASAGELQKGNELALPSKYVNFLYLASHYEKLKGSPEDNEQKQLFVEQHKHYLDEIIEQISEFSKRVILADANLDKVLSAYNKHRDKPIREQAENIIHLFTLTNLGAPAAFKYFDTTIDRKRYTSTKEVLDATLIHQSITGLYETRIDLSQLGGDGGGSSPAPEAAAKGGMDPLQLLQPLEAEIKGTKLKAHWNSGATITCVPQAFLEEEVPIKNIWIKTIHGEKEQPVYYLTFKIQGRKVEAEVISSPYDYILVSPSDIPWLMKKPLQLTTLVPLQEYEERLLKQTMLTGSYKEKLQSLFLKYDALWQHWENQVGHRRIKPHHIATGTVNPRPQKQYPINPKAKASIQTVINDLLKQGVLIQQNSIMNTPVYPVPKPDGKWRMVLDYREVNKTIPLIAAQNQHSAGILSSIFRGKYKTTLDLSNGFWAHSITPESYWLTAFTWLGQQYCWTRLPQGFLNSPALFNADVVDLLKEVPNVQVYVDDIYISHDDPREHLEQLEKVFSLLLNAGYVVSLKKSEIAQHEVEFLGFNITKEGRGLTETFKQKLLNITPPRDLKQLQSILGKLNFARNFIPNFSELVKPLYNIIATAPGKYITWTTDNSQQLQNIISMLNSAENLEERNPEVRLIMKVNTSPSAGYIRFYNEFAKRPIMYLNYVYTKAEVKFTNTEKLLTTIHKGLIKALDLGMGQEILVYSPIVSMTKIQKTPLPERKALPIRWITWMSYLEDPRIQFHYDKTLPELQQVPTVTDDIIAKIKHPSEFSMVFYTDGSAIKHPNVNKSHNAGMGIAQVQFKPEFTVINTWSIPLGDHTAQLAEVAAVEFACKKALKIDGPVLIVTDSFYVAESVNKELPYWQSNGFFNNKKKPLKHVSKWKSIADCIQLKPDIIIIHEKGHQPTASTFHTEGNNLADKLATQGSYVVNAGKRTADGSEFEKRTADGSEFESPKKKAKVE

SEQ ID NO: 676 - protein, 2171 aa, synthetic construct
MPAAKRVKLDGGDKKYSIGLDIGTNSVGWAVITDEYKVPSKKFKVLGNTDRHSIKKNLIGALLFDSGETAEATRLKRTARRRYTRRKNRICYLQEIFSNEMAKVDDSFFHRLEESFLVEEDKKHERHPIFGNIVDEVAYHEKYPTIYHLRKKLVDSTDKADLRLIYLALAHMIKFRGHFLIEGDLNPDNSDVDKLFIQLVQTYNQLFEENPINASGVDAKAILSARLSKSRRLENLIAQLPGEKKNGLFGNLIALSLGLTPNFKSNFDLAEDAKLQLSKDTYDDDLDNLLAQIGDQYADLFLAAKNLSDAILLSDILRVNTEITKAPLSASMIKRYDEHHQDLTLLKALVRQQLPEKYKEIFFDQSKNGYAGYIDGGASQEEFYKFIKPILEKMDGTEELLVKLNREDLLRKQRTFDNGSIPHQIHLGELHAILRRQEDFYPFLKDNREKIEKILTFRIPYYVGPLARGNSRFAWMTRKSEETITPWNFEEVVDKGASAQSFIERMTNFDKNLPNEKVLPKHSLLYEYFTVYNELTKVKYVTEGMRKPAFLSGEQKKAIVDLLFKTNRKVTVKQLKEDYFKKIECFDSVEISGVEDRFNASLGTYHDLLKIIKDKDFLDNEENEDILEDIVLTLTLFEDREMIEERLKTYAHLFDDKVMKQLKRRRYTGWGRLSRKLINGIRDKQSGKTILDFLKSDGFANRNFMQLIHDDSLTFKEDIQKAQVSGQGDSLHEHIANLAGSPAIKKGILQTVKVVDELVKVMGRHKPENIVIEMARENQTTQKGQKNSRERMKRIEEGIKELGSQILKEHPVENTQLQNEKLYLYYLQNGRDMYVDQELDINRLSDYDVDHIVPQSFLKDDSIDNKVLTRSDKARGKSDNVPSEEVVKKMKNYWRQLLNAKLITQRKFDNLTKAERGGLSELDKAGFIKRQLVETRQITKHVAQILDSRMNTKYDENDKLIREVKVITLKSKLVSDFRKDFQFYKVREINNYHHAHDAYLNAVVGTALIKKYPKLESEFVYGDYKVYDVRKMIAKSEQEIGKATAKYFFYSNIMNFFKTEITLANGEIRKRPLIETNGETGEIVWDKGRDFATVRKVLSMPQVNIVKKTEVQTGGFSKESILPKRNSDKLIARKKDWDPKKYGGFDSPTVAYSVLVVAKVEKGKSKKLKSVKELLGITIMERSSFEKNPIDFLEAKGYKEVKKDLIIKLPKYSLFELENGRKRMLASAGELQKGNELALPSKYVNFLYLASHYEKLKGSPEDNEQKQLFVEQHKHYLDEIIEQISEFSKRVILADANLDKVLSAYNKHRDKPIREQAENIIHLFTLTNLGAPAAFKYFDTTIDRKRYTSTKEVLDATLIHQSITGLYETRIDLSQLGGDGGPAPGGGGGMDPLQLLQPLEAEIKGTKLKAHWNSGATITCVPQAFLEEEVPIKNIWIKTIHGEKEQPVYYLTFKIQGRKVEAEVISSPYDYILVSPSDIPWLMKKPLQLTTLVPLQEYEERLLKQTMLTGSYKEKLQSLFLKYDALWQHWENQVGHRRIKPHHIATGTVNPRPQKQYPINPKAKASIQTVINDLLKQGVLIQQNSIMNTPVYPVPKPDGKWRMVLDYREVNKTIPLIAAQNQHSAGILSSIFRGKYKTTLDLSNGFWAHSITPESYWLTAFTWLGQQYCWTRLPQGFLNSPALFNADVVDLLKEVPNVQVYVDDIYISHDDPREHLEQLEKVFSLLLNAGYVVSLKKSEIAQHEVEFLGFNITKEGRGLTETFKQKLLNITPPRDLKQLQSILGKLNFARNFIPNFSELVKPLYNIIATAPGKYITWTTDNSQQLQNIISMLNSAENLEERNPEVRLIMKVNTSPSAGYIRFYNEFAKRPIMYLNYVYTKAEVKFTNTEKLLTTIHKGLIKALDLGMGQEILVYSPIVSMTKIQKTPLPERKALPIRWITWMSYLEDPRIQFHYDKTLPELQQVPTVTDDIIAKIKHPSEFSMVFYTDGSAIKHPNVNKSHNAGMGIAQVQFKPEFTVINTWSIPLGDHTAQLAEVAAVEFACKKALKIDGPVLIVTDSFYVAESVNKELPYWQSNGFFNNKKKPLKHVSKWKSIADCIQLKPDIIIIHEKGHQPTASTFHTEGNNLADKLATQGSYVVNAGKRTADGSEFEKRTADGSEFESPKKKAKVE

SEQ ID NO: 677 - protein, 2180 aa, synthetic construct
MPAAKRVKLDGGDKKYSIGLDIGTNSVGWAVITDEYKVPSKKFKVLGNTDRHSIKKNLIGALLFDSGETAEATRLKRTARRRYTRRKNRICYLQEIFSNEMAKVDDSFFHRLEESFLVEEDKKHERHPIFGNIVDEVAYHEKYPTIYHLRKKLVDSTDKADLRLIYLALAHMIKFRGHFLIEGDLNPDNSDVDKLFIQLVQTYNQLFEENPINASGVDAKAILSARLSKSRRLENLIAQLPGEKKNGLFGNLIALSLGLTPNFKSNFDLAEDAKLQLSKDTYDDDLDNLLAQIGDQYADLFLAAKNLSDAILLSDILRVNTEITKAPLSASMIKRYDEHHQDLTLLKALVRQQLPEKYKEIFFDQSKNGYAGYIDGGASQEEFYKFIKPILEKMDGTEELLVKLNREDLLRKQRTFDNGSIPHQIHLGELHAILRRQEDFYPFLKDNREKIEKILTFRIPYYVGPLARGNSRFAWMTRKSEETITPWNFEEVVDKGASAQSFIERMTNFDKNLPNEKVLPKHSLLYEYFTVYNELTKVKYVTEGMRKPAFLSGEQKKAIVDLLFKTNRKVTVKQLKEDYFKKIECFDSVEISGVEDRFNASLGTYHDLLKIIKDKDFLDNEENEDILEDIVLTLTLFEDREMIEERLKTYAHLFDDKVMKQLKRRRYTGWGRLSRKLINGIRDKQSGKTILDFLKSDGFANRNFMQLIHDDSLTFKEDIQKAQVSGQGDSLHEHIANLAGSPAIKKGILQTVKVVDELVKVMGRHKPENIVIEMARENQTTQKGQKNSRERMKRIEEGIKELGSQILKEHPVENTQLQNEKLYLYYLQNGRDMYVDQELDINRLSDYDVDHIVPQSFLKDDSIDNKVLTRSDKARGKSDNVPSEEVVKKMKNYWRQLLNAKLITQRKFDNLTKAERGGLSELDKAGFIKRQLVETRQITKHVAQILDSRMNTKYDENDKLIREVKVITLKSKLVSDFRKDFQFYKVREINNYHHAHDAYLNAVVGTALIKKYPKLESEFVYGDYKVYDVRKMIAKSEQEIGKATAKYFFYSNIMNFFKTEITLANGEIRKRPLIETNGETGEIVWDKGRDFATVRKVLSMPQVNIVKKTEVQTGGFSKESILPKRNSDKLIARKKDWDPKKYGGFDSPTVAYSVLVVAKVEKGKSKKLKSVKELLGITIMERSSFEKNPIDFLEAKGYKEVKKDLIIKLPKYSLFELENGRKRMLASAGELQKGNELALPSKYVNFLYLASHYEKLKGSPEDNEQKQLFVEQHKHYLDEIIEQISEFSKRVILADANLDKVLSAYNKHRDKPIREQAENIIHLFTLTNLGAPAAFKYFDTTIDRKRYTSTKEVLDATLIHQSITGLYETRIDLSQLGGDGGGSSGSSGSSGSSGSSGGMDPLQLLQPLEAEIKGTKLKAHWNSGATITCVPQAFLEEEVPIKNIWIKTIHGEKEQPVYYLTFKIQGRKVEAEVISSPYDYILVSPSDIPWLMKKPLQLTTLVPLQEYEERLLKQTMLTGSYKEKLQSLFLKYDALWQHWENQVGHRRIKPHHIATGTVNPRPQKQYPINPKAKASIQTVINDLLKQGVLIQQNSIMNTPVYPVPKPDGKWRMVLDYREVNKTIPLIAAQNQHSAGILSSIFRGKYKTTLDLSNGFWAHSITPESYWLTAFTWLGQQYCWTRLPQGFLNSPALFNADVVDLLKEVPNVQVYVDDIYISHDDPREHLEQLEKVFSLLLNAGYVVSLKKSEIAQHEVEFLGFNITKEGRGLTETFKQKLLNITPPRDLKQLQSILGKLNFARNFIPNFSELVKPLYNIIATAPGKYITWTTDNSQQLQNIISMLNSAENLEERNPEVRLIMKVNTSPSAGYIRFYNEFAKRPIMYLNYVYTKAEVKFTNTEKLLTTIHKGLIKALDLGMGQEILVYSPIVSMTKIQKTPLPERKALPIRWITWMSYLEDPRIQFHYDKTLPELQQVPTVTDDIIAKIKHPSEFSMVFYTDGSAIKHPNVNKSHNAGMGIAQVQFKPEFTVINTWSIPLGDHTAQLAEVAAVEFACKKALKIDGPVLIVTDSFYVAESVNKELPYWQSNGFFNNKKKPLKHVSKWKSIADCIQLKPDIIIIHEKGHQPTASTFHTEGNNLADKLATQGSYVVNAGKRTADGSEFEKRTADGSEFESPKKKAKVE

SEQ ID NO: 678 - protein, 2174 aa, synthetic construct
MPAAKRVKLDGGDKKYSIGLDIGTNSVGWAVITDEYKVPSKKFKVLGNTDRHSIKKNLIGALLFDSGETAEATRLKRTARRRYTRRKNRICYLQEIFSNEMAKVDDSFFHRLEESFLVEEDKKHERHPIFGNIVDEVAYHEKYPTIYHLRKKLVDSTDKADLRLIYLALAHMIKFRGHFLIEGDLNPDNSDVDKLFIQLVQTYNQLFEENPINASGVDAKAILSARLSKSRRLENLIAQLPGEKKNGLFGNLIALSLGLTPNFKSNFDLAEDAKLQLSKDTYDDDLDNLLAQIGDQYADLFLAAKNLSDAILLSDILRVNTEITKAPLSASMIKRYDEHHQDLTLLKALVRQQLPEKYKEIFFDQSKNGYAGYIDGGASQEEFYKFIKPILEKMDGTEELLVKLNREDLLRKQRTFDNGSIPHQIHLGELHAILRRQEDFYPFLKDNREKIEKILTFRIPYYVGPLARGNSRFAWMTRKSEETITPWNFEEVVDKGASAQSFIERMTNFDKNLPNEKVLPKHSLLYEYFTVYNELTKVKYVTEGMRKPAFLSGEQKKAIVDLLFKTNRKVTVKQLKEDYFKKIECFDSVEISGVEDRFNASLGTYHDLLKIIKDKDFLDNEENEDILEDIVLTLTLFEDREMIEERLKTYAHLFDDKVMKQLKRRRYTGWGRLSRKLINGIRDKQSGKTILDFLKSDGFANRNFMQLIHDDSLTFKEDIQKAQVSGQGDSLHEHIANLAGSPAIKKGILQTVKVVDELVKVMGRHKPENIVIEMARENQTTQKGQKNSRERMKRIEEGIKELGSQILKEHPVENTQLQNEKLYLYYLQNGRDMYVDQELDINRLSDYDVDHIVPQSFLKDDSIDNKVLTRSDKARGKSDNVPSEEVVKKMKNYWRQLLNAKLITQRKFDNLTKAERGGLSELDKAGFIKRQLVETRQITKHVAQILDSRMNTKYDENDKLIREVKVITLKSKLVSDFRKDFQFYKVREINNYHHAHDAYLNAVVGTALIKKYPKLESEFVYGDYKVYDVRKMIAKSEQEIGKATAKYFFYSNIMNFFKTEITLANGEIRKRPLIETNGETGEIVWDKGRDFATVRKVLSMPQVNIVKKTEVQTGGFSKESILPKRNSDKLIARKKDWDPKKYGGFDSPTVAYSVLVVAKVEKGKSKKLKSVKELLGITIMERSSFEKNPIDFLEAKGYKEVKKDLIIKLPKYSLFELENGRKRMLASAGELQKGNELALPSKYVNFLYLASHYEKLKGSPEDNEQKQLFVEQHKHYLDEIIEQISEFSKRVILADANLDKVLSAYNKHRDKPIREQAENIIHLFTLTNLGAPAAFKYFDTTIDRKRYTSTKEVLDATLIHQSITGLYETRIDLSQLGGDGGGGGPAPGGSGGMDPLQLLQPLEAEIKGTKLKAHWNSGATITCVPQAFLEEEVPIKNIWIKTIHGEKEQPVYYLTFKIQGRKVEAEVISSPYDYILVSPSDIPWLMKKPLQLTTLVPLQEYEERLLKQTMLTGSYKEKLQSLFLKYDALWQHWENQVGHRRIKPHHIATGTVNPRPQKQYPINPKAKASIQTVINDLLKQGVLIQQNSIMNTPVYPVPKPDGKWRMVLDYREVNKTIPLIAAQNQHSAGILSSIFRGKYKTTLDLSNGFWAHSITPESYWLTAFTWLGQQYCWTRLPQGFLNSPALFNADVVDLLKEVPNVQVYVDDIYISHDDPREHLEQLEKVFSLLLNAGYVVSLKKSEIAQHEVEFLGFNITKEGRGLTETFKQKLLNITPPRDLKQLQSILGKLNFARNFIPNFSELVKPLYNIIATAPGKYITWTTDNSQQLQNIISMLNSAENLEERNPEVRLIMKVNTSPSAGYIRFYNEFAKRPIMYLNYVYTKAEVKFTNTEKLLTTIHKGLIKALDLGMGQEILVYSPIVSMTKIQKTPLPERKALPIRWITWMSYLEDPRIQFHYDKTLPELQQVPTVTDDIIAKIKHPSEFSMVFYTDGSAIKHPNVNKSHNAGMGIAQVQFKPEFTVINTWSIPLGDHTAQLAEVAAVEFACKKALKIDGPVLIVTDSFYVAESVNKELPYWQSNGFFNNKKKPLKHVSKWKSIADCIQLKPDIIIIHEKGHQPTASTFHTEGNNLADKLATQGSYVVNAGKRTADGSEFEKRTADGSEFESPKKKAKVE

SEQ ID NO: 679 - protein, 2176 aa, synthetic construct
MPAAKRVKLDGGDKKYSIGLDIGTNSVGWAVITDEYKVPSKKFKVLGNTDRHSIKKNLIGALLFDSGETAEATRLKRTARRRYTRRKNRICYLQEIFSNEMAKVDDSFFHRLEESFLVEEDKKHERHPIFGNIVDEVAYHEKYPTIYHLRKKLVDSTDKADLRLIYLALAHMIKFRGHFLIEGDLNPDNSDVDKLFIQLVQTYNQLFEENPINASGVDAKAILSARLSKSRRLENLIAQLPGEKKNGLFGNLIALSLGLTPNFKSNFDLAEDAKLQLSKDTYDDDLDNLLAQIGDQYADLFLAAKNLSDAILLSDILRVNTEITKAPLSASMIKRYDEHHQDLTLLKALVRQQLPEKYKEIFFDQSKNGYAGYIDGGASQEEFYKFIKPILEKMDGTEELLVKLNREDLLRKQRTFDNGSIPHQIHLGELHAILRRQEDFYPFLKDNREKIEKILTFRIPYYVGPLARGNSRFAWMTRKSEETITPWNFEEVVDKGASAQSFIERMTNFDKNLPNEKVLPKHSLLYEYFTVYNELTKVKYVTEGMRKPAFLSGEQKKAIVDLLFKTNRKVTVKQLKEDYFKKIECFDSVEISGVEDRFNASLGTYHDLLKIIKDKDFLDNEENEDILEDIVLTLTLFEDREMIEERLKTYAHLFDDKVMKQLKRRRYTGWGRLSRKLINGIRDKQSGKTILDFLKSDGFANRNFMQLIHDDSLTFKEDIQKAQVSGQGDSLHEHIANLAGSPAIKKGILQTVKVVDELVKVMGRHKPENIVIEMARENQTTQKGQKNSRERMKRIEEGIKELGSQILKEHPVENTQLQNEKLYLYYLQNGRDMYVDQELDINRLSDYDVDHIVPQSFLKDDSIDNKVLTRSDKARGKSDNVPSEEVVKKMKNYWRQLLNAKLITQRKFDNLTKAERGGLSELDKAGFIKRQLVETRQITKHVAQILDSRMNTKYDENDKLIREVKVITLKSKLVSDFRKDFQFYKVREINNYHHAHDAYLNAVVGTALIKKYPKLESEFVYGDYKVYDVRKMIAKSEQEIGKATAKYFFYSNIMNFFKTEITLANGEIRKRPLIETNGETGEIVWDKGRDFATVRKVLSMPQVNIVKKTEVQTGGFSKESILPKRNSDKLIARKKDWDPKKYGGFDSPTVAYSVLVVAKVEKGKSKKLKSVKELLGITIMERSSFEKNPIDFLEAKGYKEVKKDLIIKLPKYSLFELENGRKRMLASAGELQKGNELALPSKYVNFLYLASHYEKLKGSPEDNEQKQLFVEQHKHYLDEIIEQISEFSKRVILADANLDKVLSAYNKHRDKPIREQAENIIHLFTLTNLGAPAAFKYFDTTIDRKRYTSTKEVLDATLIHQSITGLYETRIDLSQLGGDGGGGSGSSEAAAKGGMDPLQLLQPLEAEIKGTKLKAHWNSGATITCVPQAFLEEEVPIKNIWIKTIHGEKEQPVYYLTFKIQGRKVEAEVISSPYDYILVSPSDIPWLMKKPLQLTTLVPLQEYEERLLKQTMLTGSYKEKLQSLFLKYDALWQHWENQVGHRRIKPHHIATGTVNPRPQKQYPINPKAKASIQTVINDLLKQGVLIQQNSIMNTPVYPVPKPDGKWRMVLDYREVNKTIPLIAAQNQHSAGILSSIFRGKYKTTLDLSNGFWAHSITPESYWLTAFTWLGQQYCWTRLPQGFLNSPALFNADVVDLLKEVPNVQVYVDDIYISHDDPREHLEQLEKVFSLLLNAGYVVSLKKSEIAQHEVEFLGFNITKEGRGLTETFKQKLLNITPPRDLKQLQSILGKLNFARNFIPNFSELVKPLYNIIATAPGKYITWTTDNSQQLQNIISMLNSAENLEERNPEVRLIMKVNTSPSAGYIRFYNEFAKRPIMYLNYVYTKAEVKFTNTEKLLTTIHKGLIKALDLGMGQEILVYSPIVSMTKIQKTPLPERKALPIRWITWMSYLEDPRIQFHYDKTLPELQQVPTVTDDIIAKIKHPSEFSMVFYTDGSAIKHPNVNKSHNAGMGIAQVQFKPEFTVINTWSIPLGDHTAQLAEVAAVEFACKKALKIDGPVLIVTDSFYVAESVNKELPYWQSNGFFNNKKKPLKHVSKWKSIADCIQLKPDIIIIHEKGHQPTASTFHTEGNNLADKLATQGSYVVNAGKRTADGSEFEKRTADGSEFESPKKKAKVE

SEQ ID NO: 680 - protein, 2176 aa, synthetic construct
MPAAKRVKLDGGDKKYSIGLDIGTNSVGWAVITDEYKVPSKKFKVLGNTDRHSIKKNLIGALLFDSGETAEATRLKRTARRRYTRRKNRICYLQEIFSNEMAKVDDSFFHRLEESFLVEEDKKHERHPIFGNIVDEVAYHEKYPTIYHLRKKLVDSTDKADLRLIYLALAHMIKFRGHFLIEGDLNPDNSDVDKLFIQLVQTYNQLFEENPINASGVDAKAILSARLSKSRRLENLIAQLPGEKKNGLFGNLIALSLGLTPNFKSNFDLAEDAKLQLSKDTYDDDLDNLLAQIGDQYADLFLAAKNLSDAILLSDILRVNTEITKAPLSASMIKRYDEHHQDLTLLKALVRQQLPEKYKEIFFDQSKNGYAGYIDGGASQEEFYKFIKPILEKMDGTEELLVKLNREDLLRKQRTFDNGSIPHQIHLGELHAILRRQEDFYPFLKDNREKIEKILTFRIPYYVGPLARGNSRFAWMTRKSEETITPWNFEEVVDKGASAQSFIERMTNFDKNLPNEKVLPKHSLLYEYFTVYNELTKVKYVTEGMRKPAFLSGEQKKAIVDLLFKTNRKVTVKQLKEDYFKKIECFDSVEISGVEDRFNASLGTYHDLLKIIKDKDFLDNEENEDILEDIVLTLTLFEDREMIEERLKTYAHLFDDKVMKQLKRRRYTGWGRLSRKLINGIRDKQSGKTILDFLKSDGFANRNFMQLIHDDSLTFKEDIQKAQVSGQGDSLHEHIANLAGSPAIKKGILQTVKVVDELVKVMGRHKPENIVIEMARENQTTQKGQKNSRERMKRIEEGIKELGSQILKEHPVENTQLQNEKLYLYYLQNGRDMYVDQELDINRLSDYDVDHIVPQSFLKDDSIDNKVLTRSDKARGKSDNVPSEEVVKKMKNYWRQLLNAKLITQRKFDNLTKAERGGLSELDKAGFIKRQLVETRQITKHVAQILDSRMNTKYDENDKLIREVKVITLKSKLVSDFRKDFQFYKVREINNYHHAHDAYLNAVVGTALIKKYPKLESEFVYGDYKVYDVRKMIAKSEQEIGKATAKYFFYSNIMNFFKTEITLANGEIRKRPLIETNGETGEIVWDKGRDFATVRKVLSMPQVNIVKKTEVQTGGFSKESILPKRNSDKLIARKKDWDPKKYGGFDSPTVAYSVLVVAKVEKGKSKKLKSVKELLGITIMERSSFEKNPIDFLEAKGYKEVKKDLIIKLPKYSLFELENGRKRMLASAGELQKGNELALPSKYVNFLYLASHYEKLKGSPEDNEQKQLFVEQHKHYLDEIIEQISEFSKRVILADANLDKVLSAYNKHRDKPIREQAENIIHLFTLTNLGAPAAFKYFDTTIDRKRYTSTKEVLDATLIHQSITGLYETRIDLSQLGGDGGEAAAKGGSPAPGGMDPLQLLQPLEAEIKGTKLKAHWNSGATITCVPQAFLEEEVPIKNIWIKTIHGEKEQPVYYLTFKIQGRKVEAEVISSPYDYILVSPSDIPWLMKKPLQLTTLVPLQEYEERLLKQTMLTGSYKEKLQSLFLKYDALWQHWENQVGHRRIKPHHIATGTVNPRPQKQYPINPKAKASIQTVINDLLKQGVLIQQNSIMNTPVYPVPKPDGKWRMVLDYREVNKTIPLIAAQNQHSAGILSSIFRGKYKTTLDLSNGFWAHSITPESYWLTAFTWLGQQYCWTRLPQGFLNSPALFNADVVDLLKEVPNVQVYVDDIYISHDDPREHLEQLEKVFSLLLNAGYVVSLKKSEIAQHEVEFLGFNITKEGRGLTETFKQKLLNITPPRDLKQLQSILGKLNFARNFIPNFSELVKPLYNIIATAPGKYITWTTDNSQQLQNIISMLNSAENLEERNPEVRLIMKVNTSPSAGYIRFYNEFAKRPIMYLNYVYTKAEVKFTNTEKLLTTIHKGLIKALDLGMGQEILVYSPIVSMTKIQKTPLPERKALPIRWITWMSYLEDPRIQFHYDKTLPELQQVPTVTDDIIAKIKHPSEFSMVFYTDGSAIKHPNVNKSHNAGMGIAQVQFKPEFTVINTWSIPLGDHTAQLAEVAAVEFACKKALKIDGPVLIVTDSFYVAESVNKELPYWQSNGFFNNKKKPLKHVSKWKSIADCIQLKPDIIIIHEKGHQPTASTFHTEGNNLADKLATQGSYVVNAGKRTADGSEFEKRTADGSEFESPKKKAKVE

SEQ ID NO: 681 - protein, 2175 aa, synthetic construct
MPAAKRVKLDGGDKKYSIGLDIGTNSVGWAVITDEYKVPSKKFKVLGNTDRHSIKKNLIGALLFDSGETAEATRLKRTARRRYTRRKNRICYLQEIFSNEMAKVDDSFFHRLEESFLVEEDKKHERHPIFGNIVDEVAYHEKYPTIYHLRKKLVDSTDKADLRLIYLALAHMIKFRGHFLIEGDLNPDNSDVDKLFIQLVQTYNQLFEENPINASGVDAKAILSARLSKSRRLENLIAQLPGEKKNGLFGNLIALSLGLTPNFKSNFDLAEDAKLQLSKDTYDDDLDNLLAQIGDQYADLFLAAKNLSDAILLSDILRVNTEITKAPLSASMIKRYDEHHQDLTLLKALVRQQLPEKYKEIFFDQSKNGYAGYIDGGASQEEFYKFIKPILEKMDGTEELLVKLNREDLLRKQRTFDNGSIPHQIHLGELHAILRRQEDFYPFLKDNREKIEKILTFRIPYYVGPLARGNSRFAWMTRKSEETITPWNFEEVVDKGASAQSFIERMTNFDKNLPNEKVLPKHSLLYEYFTVYNELTKVKYVTEGMRKPAFLSGEQKKAIVDLLFKTNRKVTVKQLKEDYFKKIECFDSVEISGVEDRFNASLGTYHDLLKIIKDKDFLDNEENEDILEDIVLTLTLFEDREMIEERLKTYAHLFDDKVMKQLKRRRYTGWGRLSRKLINGIRDKQSGKTILDFLKSDGFANRNFMQLIHDDSLTFKEDIQKAQVSGQGDSLHEHIANLAGSPAIKKGILQTVKVVDELVKVMGRHKPENIVIEMARENQTTQKGQKNSRERMKRIEEGIKELGSQILKEHPVENTQLQNEKLYLYYLQNGRDMYVDQELDINRLSDYDVDHIVPQSFLKDDSIDNKVLTRSDKARGKSDNVPSEEVVKKMKNYWRQLLNAKLITQRKFDNLTKAERGGLSELDKAGFIKRQLVETRQITKHVAQILDSRMNTKYDENDKLIREVKVITLKSKLVSDFRKDFQFYKVREINNYHHAHDAYLNAVVGTALIKKYPKLESEFVYGDYKVYDVRKMIAKSEQEIGKATAKYFFYSNIMNFFKTEITLANGEIRKRPLIETNGETGEIVWDKGRDFATVRKVLSMPQVNIVKKTEVQTGGFSKESILPKRNSDKLIARKKDWDPKKYGGFDSPTVAYSVLVVAKVEKGKSKKLKSVKELLGITIMERSSFEKNPIDFLEAKGYKEVKKDLIIKLPKYSLFELENGRKRMLASAGELQKGNELALPSKYVNFLYLASHYEKLKGSPEDNEQKQLFVEQHKHYLDEIIEQISEFSKRVILADANLDKVLSAYNKHRDKPIREQAENIIHLFTLTNLGAPAAFKYFDTTIDRKRYTSTKEVLDATLIHQSITGLYETRIDLSQLGGDGGGGGGSGGGGSGGMDPLQLLQPLEAEIKGTKLKAHWNSGATITCVPQAFLEEEVPIKNIWIKTIHGEKEQPVYYLTFKIQGRKVEAEVISSPYDYILVSPSDIPWLMKKPLQLTTLVPLQEYEERLLKQTMLTGSYKEKLQSLFLKYDALWQHWENQVGHRRIKPHHIATGTVNPRPQKQYPINPKAKASIQTVINDLLKQGVLIQQNSIMNTPVYPVPKPDGKWRMVLDYREVNKTIPLIAAQNQHSAGILSSIFRGKYKTTLDLSNGFWAHSITPESYWLTAFTWLGQQYCWTRLPQGFLNSPALFNADVVDLLKEVPNVQVYVDDIYISHDDPREHLEQLEKVFSLLLNAGYVVSLKKSEIAQHEVEFLGFNITKEGRGLTETFKQKLLNITPPRDLKQLQSILGKLNFARNFIPNFSELVKPLYNIIATAPGKYITWTTDNSQQLQNIISMLNSAENLEERNPEVRLIMKVNTSPSAGYIRFYNEFAKRPIMYLNYVYTKAEVKFTNTEKLLTTIHKGLIKALDLGMGQEILVYSPIVSMTKIQKTPLPERKALPIRWITWMSYLEDPRIQFHYDKTLPELQQVPTVTDDIIAKIKHPSEFSMVFYTDGSAIKHPNVNKSHNAGMGIAQVQFKPEFTVINTWSIPLGDHTAQLAEVAAVEFACKKALKIDGPVLIVTDSFYVAESVNKELPYWQSNGFFNNKKKPLKHVSKWKSIADCIQLKPDIIIIHEKGHQPTASTFHTEGNNLADKLATQGSYVVNAGKRTADGSEFEKRTADGSEFESPKKKAKVE

SEQ ID NO: 682 - protein, 2171 aa, synthetic construct
MPAAKRVKLDGGDKKYSIGLDIGTNSVGWAVITDEYKVPSKKFKVLGNTDRHSIKKNLIGALLFDSGETAEATRLKRTARRRYTRRKNRICYLQEIFSNEMAKVDDSFFHRLEESFLVEEDKKHERHPIFGNIVDEVAYHEKYPTIYHLRKKLVDSTDKADLRLIYLALAHMIKFRGHFLIEGDLNPDNSDVDKLFIQLVQTYNQLFEENPINASGVDAKAILSARLSKSRRLENLIAQLPGEKKNGLFGNLIALSLGLTPNFKSNFDLAEDAKLQLSKDTYDDDLDNLLAQIGDQYADLFLAAKNLSDAILLSDILRVNTEITKAPLSASMIKRYDEHHQDLTLLKALVRQQLPEKYKEIFFDQSKNGYAGYIDGGASQEEFYKFIKPILEKMDGTEELLVKLNREDLLRKQRTFDNGSIPHQIHLGELHAILRRQEDFYPFLKDNREKIEKILTFRIPYYVGPLARGNSRFAWMTRKSEETITPWNFEEVVDKGASAQSFIERMTNFDKNLPNEKVLPKHSLLYEYFTVYNELTKVKYVTEGMRKPAFLSGEQKKAIVDLLFKTNRKVTVKQLKEDYFKKIECFDSVEISGVEDRFNASLGTYHDLLKIIKDKDFLDNEENEDILEDIVLTLTLFEDREMIEERLKTYAHLFDDKVMKQLKRRRYTGWGRLSRKLINGIRDKQSGKTILDFLKSDGFANRNFMQLIHDDSLTFKEDIQKAQVSGQGDSLHEHIANLAGSPAIKKGILQTVKVVDELVKVMGRHKPENIVIEMARENQTTQKGQKNSRERMKRIEEGIKELGSQILKEHPVENTQLQNEKLYLYYLQNGRDMYVDQELDINRLSDYDVDHIVPQSFLKDDSIDNKVLTRSDKARGKSDNVPSEEVVKKMKNYWRQLLNAKLITQRKFDNLTKAERGGLSELDKAGFIKRQLVETRQITKHVAQILDSRMNTKYDENDKLIREVKVITLKSKLVSDFRKDFQFYKVREINNYHHAHDAYLNAVVGTALIKKYPKLESEFVYGDYKVYDVRKMIAKSEQEIGKATAKYFFYSNIMNFFKTEITLANGEIRKRPLIETNGETGEIVWDKGRDFATVRKVLSMPQVNIVKKTEVQTGGFSKESILPKRNSDKLIARKKDWDPKKYGGFDSPTVAYSVLVVAKVEKGKSKKLKSVKELLGITIMERSSFEKNPIDFLEAKGYKEVKKDLIIKLPKYSLFELENGRKRMLASAGELQKGNELALPSKYVNFLYLASHYEKLKGSPEDNEQKQLFVEQHKHYLDEIIEQISEFSKRVILADANLDKVLSAYNKHRDKPIREQAENIIHLFTLTNLGAPAAFKYFDTTIDRKRYTSTKEVLDATLIHQSITGLYETRIDLSQLGGDGGGGSGGSGGMDPLQLLQPLEAEIKGTKLKAHWNSGATITCVPQAFLEEEVPIKNIWIKTIHGEKEQPVYYLTFKIQGRKVEAEVISSPYDYILVSPSDIPWLMKKPLQLTTLVPLQEYEERLLKQTMLTGSYKEKLQSLFLKYDALWQHWENQVGHRRIKPHHIATGTVNPRPQKQYPINPKAKASIQTVINDLLKQGVLIQQNSIMNTPVYPVPKPDGKWRMVLDYREVNKTIPLIAAQNQHSAGILSSIFRGKYKTTLDLSNGFWAHSITPESYWLTAFTWLGQQYCWTRLPQGFLNSPALFNADVVDLLKEVPNVQVYVDDIYISHDDPREHLEQLEKVFSLLLNAGYVVSLKKSEIAQHEVEFLGFNITKEGRGLTETFKQKLLNITPPRDLKQLQSILGKLNFARNFIPNFSELVKPLYNIIATAPGKYITWTTDNSQQLQNIISMLNSAENLEERNPEVRLIMKVNTSPSAGYIRFYNEFAKRPIMYLNYVYTKAEVKFTNTEKLLTTIHKGLIKALDLGMGQEILVYSPIVSMTKIQKTPLPERKALPIRWITWMSYLEDPRIQFHYDKTLPELQQVPTVTDDIIAKIKHPSEFSMVFYTDGSAIKHPNVNKSHNAGMGIAQVQFKPEFTVINTWSIPLGDHTAQLAEVAAVEFACKKALKIDGPVLIVTDSFYVAESVNKELPYWQSNGFFNNKKKPLKHVSKWKSIADCIQLKPDIIIIHEKGHQPTASTFHTEGNNLADKLATQGSYVVNAGKRTADGSEFEKRTADGSEFESPKKKAKVE

SEQ ID NO: 683 - protein, 2174 aa, synthetic construct
MPAAKRVKLDGGDKKYSIGLDIGTNSVGWAVITDEYKVPSKKFKVLGNTDRHSIKKNLIGALLFDSGETAEATRLKRTARRRYTRRKNRICYLQEIFSNEMAKVDDSFFHRLEESFLVEEDKKHERHPIFGNIVDEVAYHEKYPTIYHLRKKLVDSTDKADLRLIYLALAHMIKFRGHFLIEGDLNPDNSDVDKLFIQLVQTYNQLFEENPINASGVDAKAILSARLSKSRRLENLIAQLPGEKKNGLFGNLIALSLGLTPNFKSNFDLAEDAKLQLSKDTYDDDLDNLLAQIGDQYADLFLAAKNLSDAILLSDILRVNTEITKAPLSASMIKRYDEHHQDLTLLKALVRQQLPEKYKEIFFDQSKNGYAGYIDGGASQEEFYKFIKPILEKMDGTEELLVKLNREDLLRKQRTFDNGSIPHQIHLGELHAILRRQEDFYPFLKDNREKIEKILTFRIPYYVGPLARGNSRFAWMTRKSEETITPWNFEEVVDKGASAQSFIERMTNFDKNLPNEKVLPKHSLLYEYFTVYNELTKVKYVTEGMRKPAFLSGEQKKAIVDLLFKTNRKVTVKQLKEDYFKKIECFDSVEISGVEDRFNASLGTYHDLLKIIKDKDFLDNEENEDILEDIVLTLTLFEDREMIEERLKTYAHLFDDKVMKQLKRRRYTGWGRLSRKLINGIRDKQSGKTILDFLKSDGFANRNFMQLIHDDSLTFKEDIQKAQVSGQGDSLHEHIANLAGSPAIKKGILQTVKVVDELVKVMGRHKPENIVIEMARENQTTQKGQKNSRERMKRIEEGIKELGSQILKEHPVENTQLQNEKLYLYYLQNGRDMYVDQELDINRLSDYDVDHIVPQSFLKDDSIDNKVLTRSDKARGKSDNVPSEEVVKKMKNYWRQLLNAKLITQRKFDNLTKAERGGLSELDKAGFIKRQLVETRQITKHVAQILDSRMNTKYDENDKLIREVKVITLKSKLVSDFRKDFQFYKVREINNYHHAHDAYLNAVVGTALIKKYPKLESEFVYGDYKVYDVRKMIAKSEQEIGKATAKYFFYSNIMNFFKTEITLANGEIRKRPLIETNGETGEIVWDKGRDFATVRKVLSMPQVNIVKKTEVQTGGFSKESILPKRNSDKLIARKKDWDPKKYGGFDSPTVAYSVLVVAKVEKGKSKKLKSVKELLGITIMERSSFEKNPIDFLEAKGYKEVKKDLIIKLPKYSLFELENGRKRMLASAGELQKGNELALPSKYVNFLYLASHYEKLKGSPEDNEQKQLFVEQHKHYLDEIIEQISEFSKRVILADANLDKVLSAYNKHRDKPIREQAENIIHLFTLTNLGAPAAFKYFDTTIDRKRYTSTKEVLDATLIHQSITGLYETRIDLSQLGGDGGGSSGGSPAPGGMDPLQLLQPLEAEIKGTKLKAHWNSGATITCVPQAFLEEEVPIKNIWIKTIHGEKEQPVYYLTFKIQGRKVEAEVISSPYDYILVSPSDIPWLMKKPLQLTTLVPLQEYEERLLKQTMLTGSYKEKLQSLFLKYDALWQHWENQVGHRRIKPHHIATGTVNPRPQKQYPINPKAKASIQTVINDLLKQGVLIQQNSIMNTPVYPVPKPDGKWRMVLDYREVNKTIPLIAAQNQHSAGILSSIFRGKYKTTLDLSNGFWAHSITPESYWLTAFTWLGQQYCWTRLPQGFLNSPALFNADVVDLLKEVPNVQVYVDDIYISHDDPREHLEQLEKVFSLLLNAGYVVSLKKSEIAQHEVEFLGFNITKEGRGLTETFKQKLLNITPPRDLKQLQSILGKLNFARNFIPNFSELVKPLYNIIATAPGKYITWTTDNSQQLQNIISMLNSAENLEERNPEVRLIMKVNTSPSAGYIRFYNEFAKRPIMYLNYVYTKAEVKFTNTEKLLTTIHKGLIKALDLGMGQEILVYSPIVSMTKIQKTPLPERKALPIRWITWMSYLEDPRIQFHYDKTLPELQQVPTVTDDIIAKIKHPSEFSMVFYTDGSAIKHPNVNKSHNAGMGIAQVQFKPEFTVINTWSIPLGDHTAQLAEVAAVEFACKKALKIDGPVLIVTDSFYVAESVNKELPYWQSNGFFNNKKKPLKHVSKWKSIADCIQLKPDIIIIHEKGHQPTASTFHTEGNNLADKLATQGSYVVNAGKRTADGSEFEKRTADGSEFESPKKKAKVE

SEQ ID NO: 684 - protein, 2176 aa, synthetic construct
MPAAKRVKLDGGDKKYSIGLDIGTNSVGWAVITDEYKVPSKKFKVLGNTDRHSIKKNLIGALLFDSGETAEATRLKRTARRRYTRRKNRICYLQEIFSNEMAKVDDSFFHRLEESFLVEEDKKHERHPIFGNIVDEVAYHEKYPTIYHLRKKLVDSTDKADLRLIYLALAHMIKFRGHFLIEGDLNPDNSDVDKLFIQLVQTYNQLFEENPINASGVDAKAILSARLSKSRRLENLIAQLPGEKKNGLFGNLIALSLGLTPNFKSNFDLAEDAKLQLSKDTYDDDLDNLLAQIGDQYADLFLAAKNLSDAILLSDILRVNTEITKAPLSASMIKRYDEHHQDLTLLKALVRQQLPEKYKEIFFDQSKNGYAGYIDGGASQEEFYKFIKPILEKMDGTEELLVKLNREDLLRKQRTFDNGSIPHQIHLGELHAILRRQEDFYPFLKDNREKIEKILTFRIPYYVGPLARGNSRFAWMTRKSEETITPWNFEEVVDKGASAQSFIERMTNFDKNLPNEKVLPKHSLLYEYFTVYNELTKVKYVTEGMRKPAFLSGEQKKAIVDLLFKTNRKVTVKQLKEDYFKKIECFDSVEISGVEDRFNASLGTYHDLLKIIKDKDFLDNEENEDILEDIVLTLTLFEDREMIEERLKTYAHLFDDKVMKQLKRRRYTGWGRLSRKLINGIRDKQSGKTILDFLKSDGFANRNFMQLIHDDSLTFKEDIQKAQVSGQGDSLHEHIANLAGSPAIKKGILQTVKVVDELVKVMGRHKPENIVIEMARENQTTQKGQKNSRERMKRIEEGIKELGSQILKEHPVENTQLQNEKLYLYYLQNGRDMYVDQELDINRLSDYDVDHIVPQSFLKDDSIDNKVLTRSDKARGKSDNVPSEEVVKKMKNYWRQLLNAKLITQRKFDNLTKAERGGLSELDKAGFIKRQLVETRQITKHVAQILDSRMNTKYDENDKLIREVKVITLKSKLVSDFRKDFQFYKVREINNYHHAHDAYLNAVVGTALIKKYPKLESEFVYGDYKVYDVRKMIAKSEQEIGKATAKYFFYSNIMNFFKTEITLANGEIRKRPLIETNGETGEIVWDKGRDFATVRKVLSMPQVNIVKKTEVQTGGFSKESILPKRNSDKLIARKKDWDPKKYGGFDSPTVAYSVLVVAKVEKGKSKKLKSVKELLGITIMERSSFEKNPIDFLEAKGYKEVKKDLIIKLPKYSLFELENGRKRMLASAGELQKGNELALPSKYVNFLYLASHYEKLKGSPEDNEQKQLFVEQHKHYLDEIIEQISEFSKRVILADANLDKVLSAYNKHRDKPIREQAENIIHLFTLTNLGAPAAFKYFDTTIDRKRYTSTKEVLDATLIHQSITGLYETRIDLSQLGGDGGGGSEAAAKGSSGGMDPLQLLQPLEAEIKGTKLKAHWNSGATITCVPQAFLEEEVPIKNIWIKTIHGEKEQPVYYLTFKIQGRKVEAEVISSPYDYILVSPSDIPWLMKKPLQLTTLVPLQEYEERLLKQTMLTGSYKEKLQSLFLKYDALWQHWENQVGHRRIKPHHIATGTVNPRPQKQYPINPKAKASIQTVINDLLKQGVLIQQNSIMNTPVYPVPKPDGKWRMVLDYREVNKTIPLIAAQNQHSAGILSSIFRGKYKTTLDLSNGFWAHSITPESYWLTAFTWLGQQYCWTRLPQGFLNSPALFNADVVDLLKEVPNVQVYVDDIYISHDDPREHLEQLEKVFSLLLNAGYVVSLKKSEIAQHEVEFLGFNITKEGRGLTETFKQKLLNITPPRDLKQLQSILGKLNFARNFIPNFSELVKPLYNIIATAPGKYITWTTDNSQQLQNIISMLNSAENLEERNPEVRLIMKVNTSPSAGYIRFYNEFAKRPIMYLNYVYTKAEVKFTNTEKLLTTIHKGLIKALDLGMGQEILVYSPIVSMTKIQKTPLPERKALPIRWITWMSYLEDPRIQFHYDKTLPELQQVPTVTDDIIAKIKHPSEFSMVFYTDGSAIKHPNVNKSHNAGMGIAQVQFKPEFTVINTWSIPLGDHTAQLAEVAAVEFACKKALKIDGPVLIVTDSFYVAESVNKELPYWQSNGFFNNKKKPLKHVSKWKSIADCIQLKPDIIIIHEKGHQPTASTFHTEGNNLADKLATQGSYVVNAGKRTADGSEFEKRTADGSEFESPKKKAKVE

SEQ ID NO: 685 - protein, 2176 aa, synthetic construct
MPAAKRVKLDGGDKKYSIGLDIGTNSVGWAVITDEYKVPSKKFKVLGNTDRHSIKKNLIGALLFDSGETAEATRLKRTARRRYTRRKNRICYLQEIFSNEMAKVDDSFFHRLEESFLVEEDKKHERHPIFGNIVDEVAYHEKYPTIYHLRKKLVDSTDKADLRLIYLALAHMIKFRGHFLIEGDLNPDNSDVDKLFIQLVQTYNQLFEENPINASGVDAKAILSARLSKSRRLENLIAQLPGEKKNGLFGNLIALSLGLTPNFKSNFDLAEDAKLQLSKDTYDDDLDNLLAQIGDQYADLFLAAKNLSDAILLSDILRVNTEITKAPLSASMIKRYDEHHQDLTLLKALVRQQLPEKYKEIFFDQSKNGYAGYIDGGASQEEFYKFIKPILEKMDGTEELLVKLNREDLLRKQRTFDNGSIPHQIHLGELHAILRRQEDFYPFLKDNREKIEKILTFRIPYYVGPLARGNSRFAWMTRKSEETITPWNFEEVVDKGASAQSFIERMTNFDKNLPNEKVLPKHSLLYEYFTVYNELTKVKYVTEGMRKPAFLSGEQKKAIVDLLFKTNRKVTVKQLKEDYFKKIECFDSVEISGVEDRFNASLGTYHDLLKIIKDKDFLDNEENEDILEDIVLTLTLFEDREMIEERLKTYAHLFDDKVMKQLKRRRYTGWGRLSRKLINGIRDKQSGKTILDFLKSDGFANRNFMQLIHDDSLTFKEDIQKAQVSGQGDSLHEHIANLAGSPAIKKGILQTVKVVDELVKVMGRHKPENIVIEMARENQTTQKGQKNSRERMKRIEEGIKELGSQILKEHPVENTQLQNEKLYLYYLQNGRDMYVDQELDINRLSDYDVDHIVPQSFLKDDSIDNKVLTRSDKARGKSDNVPSEEVVKKMKNYWRQLLNAKLITQRKFDNLTKAERGGLSELDKAGFIKRQLVETRQITKHVAQILDSRMNTKYDENDKLIREVKVITLKSKLVSDFRKDFQFYKVREINNYHHAHDAYLNAVVGTALIKKYPKLESEFVYGDYKVYDVRKMIAKSEQEIGKATAKYFFYSNIMNFFKTEITLANGEIRKRPLIETNGETGEIVWDKGRDFATVRKVLSMPQVNIVKKTEVQTGGFSKESILPKRNSDKLIARKKDWDPKKYGGFDSPTVAYSVLVVAKVEKGKSKKLKSVKELLGITIMERSSFEKNPIDFLEAKGYKEVKKDLIIKLPKYSLFELENGRKRMLASAGELQKGNELALPSKYVNFLYLASHYEKLKGSPEDNEQKQLFVEQHKHYLDEIIEQISEFSKRVILADANLDKVLSAYNKHRDKPIREQAENIIHLFTLTNLGAPAAFKYFDTTIDRKRYTSTKEVLDATLIHQSITGLYETRIDLSQLGGDGGGGGEAAAKGSSGGMDPLQLLQPLEAEIKGTKLKAHWNSGATITCVPQAFLEEEVPIKNIWIKTIHGEKEQPVYYLTFKIQGRKVEAEVISSPYDYILVSPSDIPWLMKKPLQLTTLVPLQEYEERLLKQTMLTGSYKEKLQSLFLKYDALWQHWENQVGHRRIKPHHIATGTVNPRPQKQYPINPKAKASIQTVINDLLKQGVLIQQNSIMNTPVYPVPKPDGKWRMVLDYREVNKTIPLIAAQNQHSAGILSSIFRGKYKTTLDLSNGFWAHSITPESYWLTAFTWLGQQYCWTRLPQGFLNSPALFNADVVDLLKEVPNVQVYVDDIYISHDDPREHLEQLEKVFSLLLNAGYVVSLKKSEIAQHEVEFLGFNITKEGRGLTETFKQKLLNITPPRDLKQLQSILGKLNFARNFIPNFSELVKPLYNIIATAPGKYITWTTDNSQQLQNIISMLNSAENLEERNPEVRLIMKVNTSPSAGYIRFYNEFAKRPIMYLNYVYTKAEVKFTNTEKLLTTIHKGLIKALDLGMGQEILVYSPIVSMTKIQKTPLPERKALPIRWITWMSYLEDPRIQFHYDKTLPELQQVPTVTDDIIAKIKHPSEFSMVFYTDGSAIKHPNVNKSHNAGMGIAQVQFKPEFTVINTWSIPLGDHTAQLAEVAAVEFACKKALKIDGPVLIVTDSFYVAESVNKELPYWQSNGFFNNKKKPLKHVSKWKSIADCIQLKPDIIIIHEKGHQPTASTFHTEGNNLADKLATQGSYVVNAGKRTADGSEFEKRTADGSEFESPKKKAKVE

SEQ ID NO: 686 - protein, 2176 aa, synthetic construct
MPAAKRVKLDGGDKKYSIGLDIGTNSVGWAVITDEYKVPSKKFKVLGNTDRHSIKKNLIGALLFDSGETAEATRLKRTARRRYTRRKNRICYLQEIFSNEMAKVDDSFFHRLEESFLVEEDKKHERHPIFGNIVDEVAYHEKYPTIYHLRKKLVDSTDKADLRLIYLALAHMIKFRGHFLIEGDLNPDNSDVDKLFIQLVQTYNQLFEENPINASGVDAKAILSARLSKSRRLENLIAQLPGEKKNGLFGNLIALSLGLTPNFKSNFDLAEDAKLQLSKDTYDDDLDNLLAQIGDQYADLFLAAKNLSDAILLSDILRVNTEITKAPLSASMIKRYDEHHQDLTLLKALVRQQLPEKYKEIFFDQSKNGYAGYIDGGASQEEFYKFIKPILEKMDGTEELLVKLNREDLLRKQRTFDNGSIPHQIHLGELHAILRRQEDFYPFLKDNREKIEKILTFRIPYYVGPLARGNSRFAWMTRKSEETITPWNFEEVVDKGASAQSFIERMTNFDKNLPNEKVLPKHSLLYEYFTVYNELTKVKYVTEGMRKPAFLSGEQKKAIVDLLFKTNRKVTVKQLKEDYFKKIECFDSVEISGVEDRFNASLGTYHDLLKIIKDKDFLDNEENEDILEDIVLTLTLFEDREMIEERLKTYAHLFDDKVMKQLKRRRYTGWGRLSRKLINGIRDKQSGKTILDFLKSDGFANRNFMQLIHDDSLTFKEDIQKAQVSGQGDSLHEHIANLAGSPAIKKGILQTVKVVDELVKVMGRHKPENIVIEMARENQTTQKGQKNSRERMKRIEEGIKELGSQILKEHPVENTQLQNEKLYLYYLQNGRDMYVDQELDINRLSDYDVDHIVPQSFLKDDSIDNKVLTRSDKARGKSDNVPSEEVVKKMKNYWRQLLNAKLITQRKFDNLTKAERGGLSELDKAGFIKRQLVETRQITKHVAQILDSRMNTKYDENDKLIREVKVITLKSKLVSDFRKDFQFYKVREINNYHHAHDAYLNAVVGTALIKKYPKLESEFVYGDYKVYDVRKMIAKSEQEIGKATAKYFFYSNIMNFFKTEITLANGEIRKRPLIETNGETGEIVWDKGRDFATVRKVLSMPQVNIVKKTEVQTGGFSKESILPKRNSDKLIARKKDWDPKKYGGFDSPTVAYSVLVVAKVEKGKSKKLKSVKELLGITIMERSSFEKNPIDFLEAKGYKEVKKDLIIKLPKYSLFELENGRKRMLASAGELQKGNELALPSKYVNFLYLASHYEKLKGSPEDNEQKQLFVEQHKHYLDEIIEQISEFSKRVILADANLDKVLSAYNKHRDKPIREQAENIIHLFTLTNLGAPAAFKYFDTTIDRKRYTSTKEVLDATLIHQSITGLYETRIDLSQLGGDGGEAAAKPAPGSSGGMDPLQLLQPLEAEIKGTKLKAHWNSGATITCVPQAFLEEEVPIKNIWIKTIHGEKEQPVYYLTFKIQGRKVEAEVISSPYDYILVSPSDIPWLMKKPLQLTTLVPLQEYEERLLKQTMLTGSYKEKLQSLFLKYDALWQHWENQVGHRRIKPHHIATGTVNPRPQKQYPINPKAKASIQTVINDLLKQGVLIQQNSIMNTPVYPVPKPDGKWRMVLDYREVNKTIPLIAAQNQHSAGILSSIFRGKYKTTLDLSNGFWAHSITPESYWLTAFTWLGQQYCWTRLPQGFLNSPALFNADVVDLLKEVPNVQVYVDDIYISHDDPREHLEQLEKVFSLLLNAGYVVSLKKSEIAQHEVEFLGFNITKEGRGLTETFKQKLLNITPPRDLKQLQSILGKLNFARNFIPNFSELVKPLYNIIATAPGKYITWTTDNSQQLQNIISMLNSAENLEERNPEVRLIMKVNTSPSAGYIRFYNEFAKRPIMYLNYVYTKAEVKFTNTEKLLTTIHKGLIKALDLGMGQEILVYSPIVSMTKIQKTPLPERKALPIRWITWMSYLEDPRIQFHYDKTLPELQQVPTVTDDIIAKIKHPSEFSMVFYTDGSAIKHPNVNKSHNAGMGIAQVQFKPEFTVINTWSIPLGDHTAQLAEVAAVEFACKKALKIDGPVLIVTDSFYVAESVNKELPYWQSNGFFNNKKKPLKHVSKWKSIADCIQLKPDIIIIHEKGHQPTASTFHTEGNNLADKLATQGSYVVNAGKRTADGSEFEKRTADGSEFESPKKKAKVE

SEQ ID NO: 687 - protein, 2174 aa, synthetic construct
MPAAKRVKLDGGDKKYSIGLDIGTNSVGWAVITDEYKVPSKKFKVLGNTDRHSIKKNLIGALLFDSGETAEATRLKRTARRRYTRRKNRICYLQEIFSNEMAKVDDSFFHRLEESFLVEEDKKHERHPIFGNIVDEVAYHEKYPTIYHLRKKLVDSTDKADLRLIYLALAHMIKFRGHFLIEGDLNPDNSDVDKLFIQLVQTYNQLFEENPINASGVDAKAILSARLSKSRRLENLIAQLPGEKKNGLFGNLIALSLGLTPNFKSNFDLAEDAKLQLSKDTYDDDLDNLLAQIGDQYADLFLAAKNLSDAILLSDILRVNTEITKAPLSASMIKRYDEHHQDLTLLKALVRQQLPEKYKEIFFDQSKNGYAGYIDGGASQEEFYKFIKPILEKMDGTEELLVKLNREDLLRKQRTFDNGSIPHQIHLGELHAILRRQEDFYPFLKDNREKIEKILTFRIPYYVGPLARGNSRFAWMTRKSEETITPWNFEEVVDKGASAQSFIERMTNFDKNLPNEKVLPKHSLLYEYFTVYNELTKVKYVTEGMRKPAFLSGEQKKAIVDLLFKTNRKVTVKQLKEDYFKKIECFDSVEISGVEDRFNASLGTYHDLLKIIKDKDFLDNEENEDILEDIVLTLTLFEDREMIEERLKTYAHLFDDKVMKQLKRRRYTGWGRLSRKLINGIRDKQSGKTILDFLKSDGFANRNFMQLIHDDSLTFKEDIQKAQVSGQGDSLHEHIANLAGSPAIKKGILQTVKVVDELVKVMGRHKPENIVIEMARENQTTQKGQKNSRERMKRIEEGIKELGSQILKEHPVENTQLQNEKLYLYYLQNGRDMYVDQELDINRLSDYDVDHIVPQSFLKDDSIDNKVLTRSDKARGKSDNVPSEEVVKKMKNYWRQLLNAKLITQRKFDNLTKAERGGLSELDKAGFIKRQLVETRQITKHVAQILDSRMNTKYDENDKLIREVKVITLKSKLVSDFRKDFQFYKVREINNYHHAHDAYLNAVVGTALIKKYPKLESEFVYGDYKVYDVRKMIAKSEQEIGKATAKYFFYSNIMNFFKTEITLANGEIRKRPLIETNGETGEIVWDKGRDFATVRKVLSMPQVNIVKKTEVQTGGFSKESILPKRNSDKLIARKKDWDPKKYGGFDSPTVAYSVLVVAKVEKGKSKKLKSVKELLGITIMERSSFEKNPIDFLEAKGYKEVKKDLIIKLPKYSLFELENGRKRMLASAGELQKGNELALPSKYVNFLYLASHYEKLKGSPEDNEQKQLFVEQHKHYLDEIIEQISEFSKRVILADANLDKVLSAYNKHRDKPIREQAENIIHLFTLTNLGAPAAFKYFDTTIDRKRYTSTKEVLDATLIHQSITGLYETRIDLSQLGGDGGGGGPAPGSSGGMDPLQLLQPLEAEIKGTKLKAHWNSGATITCVPQAFLEEEVPIKNIWIKTIHGEKEQPVYYLTFKIQGRKVEAEVISSPYDYILVSPSDIPWLMKKPLQLTTLVPLQEYEERLLKQTMLTGSYKEKLQSLFLKYDALWQHWENQVGHRRIKPHHIATGTVNPRPQKQYPINPKAKASIQTVINDLLKQGVLIQQNSIMNTPVYPVPKPDGKWRMVLDYREVNKTIPLIAAQNQHSAGILSSIFRGKYKTTLDLSNGFWAHSITPESYWLTAFTWLGQQYCWTRLPQGFLNSPALFNADVVDLLKEVPNVQVYVDDIYISHDDPREHLEQLEKVFSLLLNAGYVVSLKKSEIAQHEVEFLGFNITKEGRGLTETFKQKLLNITPPRDLKQLQSILGKLNFARNFIPNFSELVKPLYNIIATAPGKYITWTTDNSQQLQNIISMLNSAENLEERNPEVRLIMKVNTSPSAGYIRFYNEFAKRPIMYLNYVYTKAEVKFTNTEKLLTTIHKGLIKALDLGMGQEILVYSPIVSMTKIQKTPLPERKALPIRWITWMSYLEDPRIQFHYDKTLPELQQVPTVTDDIIAKIKHPSEFSMVFYTDGSAIKHPNVNKSHNAGMGIAQVQFKPEFTVINTWSIPLGDHTAQLAEVAAVEFACKKALKIDGPVLIVTDSFYVAESVNKELPYWQSNGFFNNKKKPLKHVSKWKSIADCIQLKPDIIIIHEKGHQPTASTFHTEGNNLADKLATQGSYVVNAGKRTADGSEFEKRTADGSEFESPKKKAKVE

SEQ ID NO: 688 - protein, 2173 aa, synthetic construct
MPAAKRVKLDGGDKKYSIGLDIGTNSVGWAVITDEYKVPSKKFKVLGNTDRHSIKKNLIGALLFDSGETAEATRLKRTARRRYTRRKNRICYLQEIFSNEMAKVDDSFFHRLEESFLVEEDKKHERHPIFGNIVDEVAYHEKYPTIYHLRKKLVDSTDKADLRLIYLALAHMIKFRGHFLIEGDLNPDNSDVDKLFIQLVQTYNQLFEENPINASGVDAKAILSARLSKSRRLENLIAQLPGEKKNGLFGNLIALSLGLTPNFKSNFDLAEDAKLQLSKDTYDDDLDNLLAQIGDQYADLFLAAKNLSDAILLSDILRVNTEITKAPLSASMIKRYDEHHQDLTLLKALVRQQLPEKYKEIFFDQSKNGYAGYIDGGASQEEFYKFIKPILEKMDGTEELLVKLNREDLLRKQRTFDNGSIPHQIHLGELHAILRRQEDFYPFLKDNREKIEKILTFRIPYYVGPLARGNSRFAWMTRKSEETITPWNFEEVVDKGASAQSFIERMTNFDKNLPNEKVLPKHSLLYEYFTVYNELTKVKYVTEGMRKPAFLSGEQKKAIVDLLFKTNRKVTVKQLKEDYFKKIECFDSVEISGVEDRFNASLGTYHDLLKIIKDKDFLDNEENEDILEDIVLTLTLFEDREMIEERLKTYAHLFDDKVMKQLKRRRYTGWGRLSRKLINGIRDKQSGKTILDFLKSDGFANRNFMQLIHDDSLTFKEDIQKAQVSGQGDSLHEHIANLAGSPAIKKGILQTVKVVDELVKVMGRHKPENIVIEMARENQTTQKGQKNSRERMKRIEEGIKELGSQILKEHPVENTQLQNEKLYLYYLQNGRDMYVDQELDINRLSDYDVDHIVPQSFLKDDSIDNKVLTRSDKARGKSDNVPSEEVVKKMKNYWRQLLNAKLITQRKFDNLTKAERGGLSELDKAGFIKRQLVETRQITKHVAQILDSRMNTKYDENDKLIREVKVITLKSKLVSDFRKDFQFYKVREINNYHHAHDAYLNAVVGTALIKKYPKLESEFVYGDYKVYDVRKMIAKSEQEIGKATAKYFFYSNIMNFFKTEITLANGEIRKRPLIETNGETGEIVWDKGRDFATVRKVLSMPQVNIVKKTEVQTGGFSKESILPKRNSDKLIARKKDWDPKKYGGFDSPTVAYSVLVVAKVEKGKSKKLKSVKELLGITIMERSSFEKNPIDFLEAKGYKEVKKDLIIKLPKYSLFELENGRKRMLASAGELQKGNELALPSKYVNFLYLASHYEKLKGSPEDNEQKQLFVEQHKHYLDEIIEQISEFSKRVILADANLDKVLSAYNKHRDKPIREQAENIIHLFTLTNLGAPAAFKYFDTTIDRKRYTSTKEVLDATLIHQSITGLYETRIDLSQLGGDGGEAAAKGSSGGMDPLQLLQPLEAEIKGTKLKAHWNSGATITCVPQAFLEEEVPIKNIWIKTIHGEKEQPVYYLTFKIQGRKVEAEVISSPYDYILVSPSDIPWLMKKPLQLTTLVPLQEYEERLLKQTMLTGSYKEKLQSLFLKYDALWQHWENQVGHRRIKPHHIATGTVNPRPQKQYPINPKAKASIQTVINDLLKQGVLIQQNSIMNTPVYPVPKPDGKWRMVLDYREVNKTIPLIAAQNQHSAGILSSIFRGKYKTTLDLSNGFWAHSITPESYWLTAFTWLGQQYCWTRLPQGFLNSPALFNADVVDLLKEVPNVQVYVDDIYISHDDPREHLEQLEKVFSLLLNAGYVVSLKKSEIAQHEVEFLGFNITKEGRGLTETFKQKLLNITPPRDLKQLQSILGKLNFARNFIPNFSELVKPLYNIIATAPGKYITWTTDNSQQLQNIISMLNSAENLEERNPEVRLIMKVNTSPSAGYIRFYNEFAKRPIMYLNYVYTKAEVKFTNTEKLLTTIHKGLIKALDLGMGQEILVYSPIVSMTKIQKTPLPERKALPIRWITWMSYLEDPRIQFHYDKTLPELQQVPTVTDDIIAKIKHPSEFSMVFYTDGSAIKHPNVNKSHNAGMGIAQVQFKPEFTVINTWSIPLGDHTAQLAEVAAVEFACKKALKIDGPVLIVTDSFYVAESVNKELPYWQSNGFFNNKKKPLKHVSKWKSIADCIQLKPDIIIIHEKGHQPTASTFHTEGNNLADKLATQGSYVVNAGKRTADGSEFEKRTADGSEFESPKKKAKVE

SEQ ID NO: 689 - protein, 2176 aa, synthetic construct
MPAAKRVKLDGGDKKYSIGLDIGTNSVGWAVITDEYKVPSKKFKVLGNTDRHSIKKNLIGALLFDSGETAEATRLKRTARRRYTRRKNRICYLQEIFSNEMAKVDDSFFHRLEESFLVEEDKKHERHPIFGNIVDEVAYHEKYPTIYHLRKKLVDSTDKADLRLIYLALAHMIKFRGHFLIEGDLNPDNSDVDKLFIQLVQTYNQLFEENPINASGVDAKAILSARLSKSRRLENLIAQLPGEKKNGLFGNLIALSLGLTPNFKSNFDLAEDAKLQLSKDTYDDDLDNLLAQIGDQYADLFLAAKNLSDAILLSDILRVNTEITKAPLSASMIKRYDEHHQDLTLLKALVRQQLPEKYKEIFFDQSKNGYAGYIDGGASQEEFYKFIKPILEKMDGTEELLVKLNREDLLRKQRTFDNGSIPHQIHLGELHAILRRQEDFYPFLKDNREKIEKILTFRIPYYVGPLARGNSRFAWMTRKSEETITPWNFEEVVDKGASAQSFIERMTNFDKNLPNEKVLPKHSLLYEYFTVYNELTKVKYVTEGMRKPAFLSGEQKKAIVDLLFKTNRKVTVKQLKEDYFKKIECFDSVEISGVEDRFNASLGTYHDLLKIIKDKDFLDNEENEDILEDIVLTLTLFEDREMIEERLKTYAHLFDDKVMKQLKRRRYTGWGRLSRKLINGIRDKQSGKTILDFLKSDGFANRNFMQLIHDDSLTFKEDIQKAQVSGQGDSLHEHIANLAGSPAIKKGILQTVKVVDELVKVMGRHKPENIVIEMARENQTTQKGQKNSRERMKRIEEGIKELGSQILKEHPVENTQLQNEKLYLYYLQNGRDMYVDQELDINRLSDYDVDHIVPQSFLKDDSIDNKVLTRSDKARGKSDNVPSEEVVKKMKNYWRQLLNAKLITQRKFDNLTKAERGGLSELDKAGFIKRQLVETRQITKHVAQILDSRMNTKYDENDKLIREVKVITLKSKLVSDFRKDFQFYKVREINNYHHAHDAYLNAVVGTALIKKYPKLESEFVYGDYKVYDVRKMIAKSEQEIGKATAKYFFYSNIMNFFKTEITLANGEIRKRPLIETNGETGEIVWDKGRDFATVRKVLSMPQVNIVKKTEVQTGGFSKESILPKRNSDKLIARKKDWDPKKYGGFDSPTVAYSVLVVAKVEKGKSKKLKSVKELLGITIMERSSFEKNPIDFLEAKGYKEVKKDLIIKLPKYSLFELENGRKRMLASAGELQKGNELALPSKYVNFLYLASHYEKLKGSPEDNEQKQLFVEQHKHYLDEIIEQISEFSKRVILADANLDKVLSAYNKHRDKPIREQAENIIHLFTLTNLGAPAAFKYFDTTIDRKRYTSTKEVLDATLIHQSITGLYETRIDLSQLGGDGGEAAAKPAPGGSGGMNPLQLLQPLPAEVKGTKLLAHWNSGATITCIPESFLEDEQPIKQTLIKTIHGEKQQNVYYLTFKVKGRKVEAEVIASPYEYILLSPTDVPWLTQQPLQLTILVPLQEYQDRILNKTALPEEQKQQLKALFTKYDNLWQHWENQVGHRKIRPHNIATGDYPPRPQKQYPINPKAKPSIQIVIDDLLKQGVLTPQNSTMNTPVYPVPKPDGRWRMVLDYREVNKTIPLTAAQNQHSAGILATIVRQKYKTTLDLANGFWAHPITPDSYWLTAFTWQGKQYCWTRLPQGFLNSPALFTADAVDLLKEVPNVQVYVDDIYLSHDNPHEHIQQLEKVFQILLQAGYVVSLKKSEIGQRTVEFLGFNITKEGRGLTDTFKTKLLNVTPPKDLKQLQSILGLLNFARNFIPNFAELVQTLYNLIASSKGKYIEWTEDNTKQLNKVIEALNTASNLEERLPDQRLVIKVNTSPSAGYVRYYNESGKKPIMYLNYVFSKAELKFSMLEKLLTTMHKALIKAMDLAMGQEILVYSPIVSMTKIQKTPLPERKALPIRWITWMTYLEDPRIQFHYDKTLPELKHIPDVYTSSIPPLKHPSQYEGVFCTDGSAIKSPDPTKSNNAGMGIVHAIYNPEYKILNQWSIPLGHHTAQMAEIAAVEFACKKALKVPGPVLVITDSFYVAESANKELPYWKSNGFVNNKKEPLKHISKWKSIAECLSIKPDITIQHEKGHQPINTSIHTEGNALADKLATQGSYVVNAGKRTADGSEFEKRTADGSEFESPKKKAKVE

SEQ ID NO: 690 - protein, 2176 aa, synthetic construct
MPAAKRVKLDGGDKKYSIGLDIGTNSVGWAVITDEYKVPSKKFKVLGNTDRHSIKKNLIGALLFDSGETAEATRLKRTARRRYTRRKNRICYLQEIFSNEMAKVDDSFFHRLEESFLVEEDKKHERHPIFGNIVDEVAYHEKYPTIYHLRKKLVDSTDKADLRLIYLALAHMIKFRGHFLIEGDLNPDNSDVDKLFIQLVQTYNQLFEENPINASGVDAKAILSARLSKSRRLENLIAQLPGEKKNGLFGNLIALSLGLTPNFKSNFDLAEDAKLQLSKDTYDDDLDNLLAQIGDQYADLFLAAKNLSDAILLSDILRVNTEITKAPLSASMIKRYDEHHQDLTLLKALVRQQLPEKYKEIFFDQSKNGYAGYIDGGASQEEFYKFIKPILEKMDGTEELLVKLNREDLLRKQRTFDNGSIPHQIHLGELHAILRRQEDFYPFLKDNREKIEKILTFRIPYYVGPLARGNSRFAWMTRKSEETITPWNFEEVVDKGASAQSFIERMTNFDKNLPNEKVLPKHSLLYEYFTVYNELTKVKYVTEGMRKPAFLSGEQKKAIVDLLFKTNRKVTVKQLKEDYFKKIECFDSVEISGVEDRFNASLGTYHDLLKIIKDKDFLDNEENEDILEDIVLTLTLFEDREMIEERLKTYAHLFDDKVMKQLKRRRYTGWGRLSRKLINGIRDKQSGKTILDFLKSDGFANRNFMQLIHDDSLTFKEDIQKAQVSGQGDSLHEHIANLAGSPAIKKGILQTVKVVDELVKVMGRHKPENIVIEMARENQTTQKGQKNSRERMKRIEEGIKELGSQILKEHPVENTQLQNEKLYLYYLQNGRDMYVDQELDINRLSDYDVDHIVPQSFLKDDSIDNKVLTRSDKARGKSDNVPSEEVVKKMKNYWRQLLNAKLITQRKFDNLTKAERGGLSELDKAGFIKRQLVETRQITKHVAQILDSRMNTKYDENDKLIREVKVITLKSKLVSDFRKDFQFYKVREINNYHHAHDAYLNAVVGTALIKKYPKLESEFVYGDYKVYDVRKMIAKSEQEIGKATAKYFFYSNIMNFFKTEITLANGEIRKRPLIETNGETGEIVWDKGRDFATVRKVLSMPQVNIVKKTEVQTGGFSKESILPKRNSDKLIARKKDWDPKKYGGFDSPTVAYSVLVVAKVEKGKSKKLKSVKELLGITIMERSSFEKNPIDFLEAKGYKEVKKDLIIKLPKYSLFELENGRKRMLASAGELQKGNELALPSKYVNFLYLASHYEKLKGSPEDNEQKQLFVEQHKHYLDEIIEQISEFSKRVILADANLDKVLSAYNKHRDKPIREQAENIIHLFTLTNLGAPAAFKYFDTTIDRKRYTSTKEVLDATLIHQSITGLYETRIDLSQLGGDGGGGSEAAAKPAPGGMNPLQLLQPLPAEVKGTKLLAHWNSGATITCIPESFLEDEQPIKQTLIKTIHGEKQQNVYYLTFKVKGRKVEAEVIASPYEYILLSPTDVPWLTQQPLQLTILVPLQEYQDRILNKTALPEEQKQQLKALFTKYDNLWQHWENQVGHRKIRPHNIATGDYPPRPQKQYPINPKAKPSIQIVIDDLLKQGVLTPQNSTMNTPVYPVPKPDGRWRMVLDYREVNKTIPLTAAQNQHSAGILATIVRQKYKTTLDLANGFWAHPITPDSYWLTAFTWQGKQYCWTRLPQGFLNSPALFTADAVDLLKEVPNVQVYVDDIYLSHDNPHEHIQQLEKVFQILLQAGYVVSLKKSEIGQRTVEFLGFNITKEGRGLTDTFKTKLLNVTPPKDLKQLQSILGLLNFARNFIPNFAELVQTLYNLIASSKGKYIEWTEDNTKQLNKVIEALNTASNLEERLPDQRLVIKVNTSPSAGYVRYYNESGKKPIMYLNYVFSKAELKFSMLEKLLTTMHKALIKAMDLAMGQEILVYSPIVSMTKIQKTPLPERKALPIRWITWMTYLEDPRIQFHYDKTLPELKHIPDVYTSSIPPLKHPSQYEGVFCTDGSAIKSPDPTKSNNAGMGIVHAIYNPEYKILNQWSIPLGHHTAQMAEIAAVEFACKKALKVPGPVLVITDSFYVAESANKELPYWKSNGFVNNKKEPLKHISKWKSIAECLSIKPDITIQHEKGHQPINTSIHTEGNALADKLATQGSYVVNAGKRTADGSEFEKRTADGSEFESPKKKAKVE

SEQ ID NO: 691 - protein, 2173 aa, synthetic construct
MPAAKRVKLDGGDKKYSIGLDIGTNSVGWAVITDEYKVPSKKFKVLGNTDRHSIKKNLIGALLFDSGETAEATRLKRTARRRYTRRKNRICYLQEIFSNEMAKVDDSFFHRLEESFLVEEDKKHERHPIFGNIVDEVAYHEKYPTIYHLRKKLVDSTDKADLRLIYLALAHMIKFRGHFLIEGDLNPDNSDVDKLFIQLVQTYNQLFEENPINASGVDAKAILSARLSKSRRLENLIAQLPGEKKNGLFGNLIALSLGLTPNFKSNFDLAEDAKLQLSKDTYDDDLDNLLAQIGDQYADLFLAAKNLSDAILLSDILRVNTEITKAPLSASMIKRYDEHHQDLTLLKALVRQQLPEKYKEIFFDQSKNGYAGYIDGGASQEEFYKFIKPILEKMDGTEELLVKLNREDLLRKQRTFDNGSIPHQIHLGELHAILRRQEDFYPFLKDNREKIEKILTFRIPYYVGPLARGNSRFAWMTRKSEETITPWNFEEVVDKGASAQSFIERMTNFDKNLPNEKVLPKHSLLYEYFTVYNELTKVKYVTEGMRKPAFLSGEQKKAIVDLLFKTNRKVTVKQLKEDYFKKIECFDSVEISGVEDRFNASLGTYHDLLKIIKDKDFLDNEENEDILEDIVLTLTLFEDREMIEERLKTYAHLFDDKVMKQLKRRRYTGWGRLSRKLINGIRDKQSGKTILDFLKSDGFANRNFMQLIHDDSLTFKEDIQKAQVSGQGDSLHEHIANLAGSPAIKKGILQTVKVVDELVKVMGRHKPENIVIEMARENQTTQKGQKNSRERMKRIEEGIKELGSQILKEHPVENTQLQNEKLYLYYLQNGRDMYVDQELDINRLSDYDVDHIVPQSFLKDDSIDNKVLTRSDKARGKSDNVPSEEVVKKMKNYWRQLLNAKLITQRKFDNLTKAERGGLSELDKAGFIKRQLVETRQITKHVAQILDSRMNTKYDENDKLIREVKVITLKSKLVSDFRKDFQFYKVREINNYHHAHDAYLNAVVGTALIKKYPKLESEFVYGDYKVYDVRKMIAKSEQEIGKATAKYFFYSNIMNFFKTEITLANGEIRKRPLIETNGETGEIVWDKGRDFATVRKVLSMPQVNIVKKTEVQTGGFSKESILPKRNSDKLIARKKDWDPKKYGGFDSPTVAYSVLVVAKVEKGKSKKLKSVKELLGITIMERSSFEKNPIDFLEAKGYKEVKKDLIIKLPKYSLFELENGRKRMLASAGELQKGNELALPSKYVNFLYLASHYEKLKGSPEDNEQKQLFVEQHKHYLDEIIEQISEFSKRVILADANLDKVLSAYNKHRDKPIREQAENIIHLFTLTNLGAPAAFKYFDTTIDRKRYTSTKEVLDATLIHQSITGLYETRIDLSQLGGDGGGSSEAAAKGGMNPLQLLQPLPAEVKGTKLLAHWNSGATITCIPESFLEDEQPIKQTLIKTIHGEKQQNVYYLTFKVKGRKVEAEVIASPYEYILLSPTDVPWLTQQPLQLTILVPLQEYQDRILNKTALPEEQKQQLKALFTKYDNLWQHWENQVGHRKIRPHNIATGDYPPRPQKQYPINPKAKPSIQIVIDDLLKQGVLTPQNSTMNTPVYPVPKPDGRWRMVLDYREVNKTIPLTAAQNQHSAGILATIVRQKYKTTLDLANGFWAHPITPDSYWLTAFTWQGKQYCWTRLPQGFLNSPALFTADAVDLLKEVPNVQVYVDDIYLSHDNPHEHIQQLEKVFQILLQAGYVVSLKKSEIGQRTVEFLGFNITKEGRGLTDTFKTKLLNVTPPKDLKQLQSILGLLNFARNFIPNFAELVQTLYNLIASSKGKYIEWTEDNTKQLNKVIEALNTASNLEERLPDQRLVIKVNTSPSAGYVRYYNESGKKPIMYLNYVFSKAELKFSMLEKLLTTMHKALIKAMDLAMGQEILVYSPIVSMTKIQKTPLPERKALPIRWITWMTYLEDPRIQFHYDKTLPELKHIPDVYTSSIPPLKHPSQYEGVFCTDGSAIKSPDPTKSNNAGMGIVHAIYNPEYKILNQWSIPLGHHTAQMAEIAAVEFACKKALKVPGPVLVITDSFYVAESANKELPYWKSNGFVNNKKEPLKHISKWKSIAECLSIKPDITIQHEKGHQPINTSIHTEGNALADKLATQGSYVVNAGKRTADGSEFEKRTADGSEFESPKKKAKVE

SEQ ID NO: 692 - protein, 2180 aa, synthetic construct
MPAAKRVKLDGGDKKYSIGLDIGTNSVGWAVITDEYKVPSKKFKVLGNTDRHSIKKNLIGALLFDSGETAEATRLKRTARRRYTRRKNRICYLQEIFSNEMAKVDDSFFHRLEESFLVEEDKKHERHPIFGNIVDEVAYHEKYPTIYHLRKKLVDSTDKADLRLIYLALAHMIKFRGHFLIEGDLNPDNSDVDKLFIQLVQTYNQLFEENPINASGVDAKAILSARLSKSRRLENLIAQLPGEKKNGLFGNLIALSLGLTPNFKSNFDLAEDAKLQLSKDTYDDDLDNLLAQIGDQYADLFLAAKNLSDAILLSDILRVNTEITKAPLSASMIKRYDEHHQDLTLLKALVRQQLPEKYKEIFFDQSKNGYAGYIDGGASQEEFYKFIKPILEKMDGTEELLVKLNREDLLRKQRTFDNGSIPHQIHLGELHAILRRQEDFYPFLKDNREKIEKILTFRIPYYVGPLARGNSRFAWMTRKSEETITPWNFEEVVDKGASAQSFIERMTNFDKNLPNEKVLPKHSLLYEYFTVYNELTKVKYVTEGMRKPAFLSGEQKKAIVDLLFKTNRKVTVKQLKEDYFKKIECFDSVEISGVEDRFNASLGTYHDLLKIIKDKDFLDNEENEDILEDIVLTLTLFEDREMIEERLKTYAHLFDDKVMKQLKRRRYTGWGRLSRKLINGIRDKQSGKTILDFLKSDGFANRNFMQLIHDDSLTFKEDIQKAQVSGQGDSLHEHIANLAGSPAIKKGILQTVKVVDELVKVMGRHKPENIVIEMARENQTTQKGQKNSRERMKRIEEGIKELGSQILKEHPVENTQLQNEKLYLYYLQNGRDMYVDQELDINRLSDYDVDHIVPQSFLKDDSIDNKVLTRSDKARGKSDNVPSEEVVKKMKNYWRQLLNAKLITQRKFDNLTKAERGGLSELDKAGFIKRQLVETRQITKHVAQILDSRMNTKYDENDKLIREVKVITLKSKLVSDFRKDFQFYKVREINNYHHAHDAYLNAVVGTALIKKYPKLESEFVYGDYKVYDVRKMIAKSEQEIGKATAKYFFYSNIMNFFKTEITLANGEIRKRPLIETNGETGEIVWDKGRDFATVRKVLSMPQVNIVKKTEVQTGGFSKESILPKRNSDKLIARKKDWDPKKYGGFDSPTVAYSVLVVAKVEKGKSKKLKSVKELLGITIMERSSFEKNPIDFLEAKGYKEVKKDLIIKLPKYSLFELENGRKRMLASAGELQKGNELALPSKYVNFLYLASHYEKLKGSPEDNEQKQLFVEQHKHYLDEIIEQISEFSKRVILADANLDKVLSAYNKHRDKPIREQAENIIHLFTLTNLGAPAAFKYFDTTIDRKRYTSTKEVLDATLIHQSITGLYETRIDLSQLGGDGGEAAAKGGGGSEAAAKGGMNPLQLLQPLPAEVKGTKLLAHWNSGATITCIPESFLEDEQPIKQTLIKTIHGEKQQNVYYLTFKVKGRKVEAEVIASPYEYILLSPTDVPWLTQQPLQLTILVPLQEYQDRILNKTALPEEQKQQLKALFTKYDNLWQHWENQVGHRKIRPHNIATGDYPPRPQKQYPINPKAKPSIQIVIDDLLKQGVLTPQNSTMNTPVYPVPKPDGRWRMVLDYREVNKTIPLTAAQNQHSAGILATIVRQKYKTTLDLANGFWAHPITPDSYWLTAFTWQGKQYCWTRLPQGFLNSPALFTADAVDLLKEVPNVQVYVDDIYLSHDNPHEHIQQLEKVFQILLQAGYVVSLKKSEIGQRTVEFLGFNITKEGRGLTDTFKTKLLNVTPPKDLKQLQSILGLLNFARNFIPNFAELVQTLYNLIASSKGKYIEWTEDNTKQLNKVIEALNTASNLEERLPDQRLVIKVNTSPSAGYVRYYNESGKKPIMYLNYVFSKAELKFSMLEKLLTTMHKALIKAMDLAMGQEILVYSPIVSMTKIQKTPLPERKALPIRWITWMTYLEDPRIQFHYDKTLPELKHIPDVYTSSIPPLKHPSQYEGVFCTDGSAIKSPDPTKSNNAGMGIVHAIYNPEYKILNQWSIPLGHHTAQMAEIAAVEFACKKALKVPGPVLVITDSFYVAESANKELPYWKSNGFVNNKKEPLKHISKWKSIAECLSIKPDITIQHEKGHQPINTSIHTEGNALADKLATQGSYVVNAGKRTADGSEFEKRTADGSEFESPKKKAKVE

SEQ ID NO: 693 - protein, 2170 aa, synthetic construct
MPAAKRVKLDGGDKKYSIGLDIGTNSVGWAVITDEYKVPSKKFKVLGNTDRHSIKKNLIGALLFDSGETAEATRLKRTARRRYTRRKNRICYLQEIFSNEMAKVDDSFFHRLEESFLVEEDKKHERHPIFGNIVDEVAYHEKYPTIYHLRKKLVDSTDKADLRLIYLALAHMIKFRGHFLIEGDLNPDNSDVDKLFIQLVQTYNQLFEENPINASGVDAKAILSARLSKSRRLENLIAQLPGEKKNGLFGNLIALSLGLTPNFKSNFDLAEDAKLQLSKDTYDDDLDNLLAQIGDQYADLFLAAKNLSDAILLSDILRVNTEITKAPLSASMIKRYDEHHQDLTLLKALVRQQLPEKYKEIFFDQSKNGYAGYIDGGASQEEFYKFIKPILEKMDGTEELLVKLNREDLLRKQRTFDNGSIPHQIHLGELHAILRRQEDFYPFLKDNREKIEKILTFRIPYYVGPLARGNSRFAWMTRKSEETITPWNFEEVVDKGASAQSFIERMTNFDKNLPNEKVLPKHSLLYEYFTVYNELTKVKYVTEGMRKPAFLSGEQKKAIVDLLFKTNRKVTVKQLKEDYFKKIECFDSVEISGVEDRFNASLGTYHDLLKIIKDKDFLDNEENEDILEDIVLTLTLFEDREMIEERLKTYAHLFDDKVMKQLKRRRYTGWGRLSRKLINGIRDKQSGKTILDFLKSDGFANRNFMQLIHDDSLTFKEDIQKAQVSGQGDSLHEHIANLAGSPAIKKGILQTVKVVDELVKVMGRHKPENIVIEMARENQTTQKGQKNSRERMKRIEEGIKELGSQILKEHPVENTQLQNEKLYLYYLQNGRDMYVDQELDINRLSDYDVDHIVPQSFLKDDSIDNKVLTRSDKARGKSDNVPSEEVVKKMKNYWRQLLNAKLITQRKFDNLTKAERGGLSELDKAGFIKRQLVETRQITKHVAQILDSRMNTKYDENDKLIREVKVITLKSKLVSDFRKDFQFYKVREINNYHHAHDAYLNAVVGTALIKKYPKLESEFVYGDYKVYDVRKMIAKSEQEIGKATAKYFFYSNIMNFFKTEITLANGEIRKRPLIETNGETGEIVWDKGRDFATVRKVLSMPQVNIVKKTEVQTGGFSKESILPKRNSDKLIARKKDWDPKKYGGFDSPTVAYSVLVVAKVEKGKSKKLKSVKELLGITIMERSSFEKNPIDFLEAKGYKEVKKDLIIKLPKYSLFELENGRKRMLASAGELQKGNELALPSKYVNFLYLASHYEKLKGSPEDNEQKQLFVEQHKHYLDEIIEQISEFSKRVILADANLDKVLSAYNKHRDKPIREQAENIIHLFTLTNLGAPAAFKYFDTTIDRKRYTSTKEVLDATLIHQSITGLYETRIDLSQLGGDGGPAPAPGGMNPLQLLQPLPAEVKGTKLLAHWNSGATITCIPESFLEDEQPIKQTLIKTIHGEKQQNVYYLTFKVKGRKVEAEVIASPYEYILLSPTDVPWLTQQPLQLTILVPLQEYQDRILNKTALPEEQKQQLKALFTKYDNLWQHWENQVGHRKIRPHNIATGDYPPRPQKQYPINPKAKPSIQIVIDDLLKQGVLTPQNSTMNTPVYPVPKPDGRWRMVLDYREVNKTIPLTAAQNQHSAGILATIVRQKYKTTLDLANGFWAHPITPDSYWLTAFTWQGKQYCWTRLPQGFLNSPALFTADAVDLLKEVPNVQVYVDDIYLSHDNPHEHIQQLEKVFQILLQAGYVVSLKKSEIGQRTVEFLGFNITKEGRGLTDTFKTKLLNVTPPKDLKQLQSILGLLNFARNFIPNFAELVQTLYNLIASSKGKYIEWTEDNTKQLNKVIEALNTASNLEERLPDQRLVIKVNTSPSAGYVRYYNESGKKPIMYLNYVFSKAELKFSMLEKLLTTMHKALIKAMDLAMGQEILVYSPIVSMTKIQKTPLPERKALPIRWITWMTYLEDPRIQFHYDKTLPELKHIPDVYTSSIPPLKHPSQYEGVFCTDGSAIKSPDPTKSNNAGMGIVHAIYNPEYKILNQWSIPLGHHTAQMAEIAAVEFACKKALKVPGPVLVITDSFYVAESANKELPYWKSNGFVNNKKEPLKHISKWKSIAECLSIKPDITIQHEKGHQPINTSIHTEGNALADKLATQGSYVVNAGKRTADGSEFEKRTADGSEFESPKKKAKVE

SEQ ID NO: 694 - protein, 2185 aa, synthetic construct
MPAAKRVKLDGGDKKYSIGLDIGTNSVGWAVITDEYKVPSKKFKVLGNTDRHSIKKNLIGALLFDSGETAEATRLKRTARRRYTRRKNRICYLQEIFSNEMAKVDDSFFHRLEESFLVEEDKKHERHPIFGNIVDEVAYHEKYPTIYHLRKKLVDSTDKADLRLIYLALAHMIKFRGHFLIEGDLNPDNSDVDKLFIQLVQTYNQLFEENPINASGVDAKAILSARLSKSRRLENLIAQLPGEKKNGLFGNLIALSLGLTPNFKSNFDLAEDAKLQLSKDTYDDDLDNLLAQIGDQYADLFLAAKNLSDAILLSDILRVNTEITKAPLSASMIKRYDEHHQDLTLLKALVRQQLPEKYKEIFFDQSKNGYAGYIDGGASQEEFYKFIKPILEKMDGTEELLVKLNREDLLRKQRTFDNGSIPHQIHLGELHAILRRQEDFYPFLKDNREKIEKILTFRIPYYVGPLARGNSRFAWMTRKSEETITPWNFEEVVDKGASAQSFIERMTNFDKNLPNEKVLPKHSLLYEYFTVYNELTKVKYVTEGMRKPAFLSGEQKKAIVDLLFKTNRKVTVKQLKEDYFKKIECFDSVEISGVEDRFNASLGTYHDLLKIIKDKDFLDNEENEDILEDIVLTLTLFEDREMIEERLKTYAHLFDDKVMKQLKRRRYTGWGRLSRKLINGIRDKQSGKTILDFLKSDGFANRNFMQLIHDDSLTFKEDIQKAQVSGQGDSLHEHIANLAGSPAIKKGILQTVKVVDELVKVMGRHKPENIVIEMARENQTTQKGQKNSRERMKRIEEGIKELGSQILKEHPVENTQLQNEKLYLYYLQNGRDMYVDQELDINRLSDYDVDHIVPQSFLKDDSIDNKVLTRSDKARGKSDNVPSEEVVKKMKNYWRQLLNAKLITQRKFDNLTKAERGGLSELDKAGFIKRQLVETRQITKHVAQILDSRMNTKYDENDKLIREVKVITLKSKLVSDFRKDFQFYKVREINNYHHAHDAYLNAVVGTALIKKYPKLESEFVYGDYKVYDVRKMIAKSEQEIGKATAKYFFYSNIMNFFKTEITLANGEIRKRPLIETNGETGEIVWDKGRDFATVRKVLSMPQVNIVKKTEVQTGGFSKESILPKRNSDKLIARKKDWDPKKYGGFDSPTVAYSVLVVAKVEKGKSKKLKSVKELLGITIMERSSFEKNPIDFLEAKGYKEVKKDLIIKLPKYSLFELENGRKRMLASAGELQKGNELALPSKYVNFLYLASHYEKLKGSPEDNEQKQLFVEQHKHYLDEIIEQISEFSKRVILADANLDKVLSAYNKHRDKPIREQAENIIHLFTLTNLGAPAAFKYFDTTIDRKRYTSTKEVLDATLIHQSITGLYETRIDLSQLGGDGGEAAAKEAAAKEAAAKEAAAKGGMNPLQLLQPLPAEVKGTKLLAHWNSGATITCIPESFLEDEQPIKQTLIKTIHGEKQQNVYYLTFKVKGRKVEAEVIASPYEYILLSPTDVPWLTQQPLQLTILVPLQEYQDRILNKTALPEEQKQQLKALFTKYDNLWQHWENQVGHRKIRPHNIATGDYPPRPQKQYPINPKAKPSIQIVIDDLLKQGVLTPQNSTMNTPVYPVPKPDGRWRMVLDYREVNKTIPLTAAQNQHSAGILATIVRQKYKTTLDLANGFWAHPITPDSYWLTAFTWQGKQYCWTRLPQGFLNSPALFTADAVDLLKEVPNVQVYVDDIYLSHDNPHEHIQQLEKVFQILLQAGYVVSLKKSEIGQRTVEFLGFNITKEGRGLTDTFKTKLLNVTPPKDLKQLQSILGLLNFARNFIPNFAELVQTLYNLIASSKGKYIEWTEDNTKQLNKVIEALNTASNLEERLPDQRLVIKVNTSPSAGYVRYYNESGKKPIMYLNYVFSKAELKFSMLEKLLTTMHKALIKAMDLAMGQEILVYSPIVSMTKIQKTPLPERKALPIRWITWMTYLEDPRIQFHYDKTLPELKHIPDVYTSSIPPLKHPSQYEGVFCTDGSAIKSPDPTKSNNAGMGIVHAIYNPEYKILNQWSIPLGHHTAQMAEIAAVEFACKKALKVPGPVLVITDSFYVAESANKELPYWKSNGFVNNKKEPLKHISKWKSIAECLSIKPDITIQHEKGHQPINTSIHTEGNALADKLATQGSYVVNAGKRTADGSEFEKRTADGSEFESPKKKAKVE

SEQ ID NO: 695 - protein, 2081 aa, synthetic construct
MPAAKRVKLDGGDKKYSIGLDIGTNSVGWAVITDEYKVPSKKFKVLGNTDRHSIKKNLIGALLFDSGETAEATRLKRTARRRYTRRKNRICYLQEIFSNEMAKVDDSFFHRLEESFLVEEDKKHERHPIFGNIVDEVAYHEKYPTIYHLRKKLVDSTDKADLRLIYLALAHMIKFRGHFLIEGDLNPDNSDVDKLFIQLVQTYNQLFEENPINASGVDAKAILSARLSKSRRLENLIAQLPGEKKNGLFGNLIALSLGLTPNFKSNFDLAEDAKLQLSKDTYDDDLDNLLAQIGDQYADLFLAAKNLSDAILLSDILRVNTEITKAPLSASMIKRYDEHHQDLTLLKALVRQQLPEKYKEIFFDQSKNGYAGYIDGGASQEEFYKFIKPILEKMDGTEELLVKLNREDLLRKQRTFDNGSIPHQIHLGELHAILRRQEDFYPFLKDNREKIEKILTFRIPYYVGPLARGNSRFAWMTRKSEETITPWNFEEVVDKGASAQSFIERMTNFDKNLPNEKVLPKHSLLYEYFTVYNELTKVKYVTEGMRKPAFLSGEQKKAIVDLLFKTNRKVTVKQLKEDYFKKIECFDSVEISGVEDRFNASLGTYHDLLKIIKDKDFLDNEENEDILEDIVLTLTLFEDREMIEERLKTYAHLFDDKVMKQLKRRRYTGWGRLSRKLINGIRDKQSGKTILDFLKSDGFANRNFMQLIHDDSLTFKEDIQKAQVSGQGDSLHEHIANLAGSPAIKKGILQTVKVVDELVKVMGRHKPENIVIEMARENQTTQKGQKNSRERMKRIEEGIKELGSQILKEHPVENTQLQNEKLYLYYLQNGRDMYVDQELDINRLSDYDVDHIVPQSFLKDDSIDNKVLTRSDKARGKSDNVPSEEVVKKMKNYWRQLLNAKLITQRKFDNLTKAERGGLSELDKAGFIKRQLVETRQITKHVAQILDSRMNTKYDENDKLIREVKVITLKSKLVSDFRKDFQFYKVREINNYHHAHDAYLNAVVGTALIKKYPKLESEFVYGDYKVYDVRKMIAKSEQEIGKATAKYFFYSNIMNFFKTEITLANGEIRKRPLIETNGETGEIVWDKGRDFATVRKVLSMPQVNIVKKTEVQTGGFSKESILPKRNSDKLIARKKDWDPKKYGGFDSPTVAYSVLVVAKVEKGKSKKLKSVKELLGITIMERSSFEKNPIDFLEAKGYKEVKKDLIIKLPKYSLFELENGRKRMLASAGELQKGNELALPSKYVNFLYLASHYEKLKGSPEDNEQKQLFVEQHKHYLDEIIEQISEFSKRVILADANLDKVLSAYNKHRDKPIREQAENIIHLFTLTNLGAPAAFKYFDTTIDRKRYTSTKEVLDATLIHQSITGLYETRIDLSQLGGDGGPAPAPGGVPWLTQQPLQLTILVPLQEYQDRILNKTALPEEQKQQLKALFTKYDNLWQHWENQVGHRKIRPHNIATGDYPPRPQKQYPINPKAKPSIQIVIDDLLKQGVLTPQNSTMNTPVYPVPKPDGRWRMVLDYREVNKTIPLTAAQNQHSAGILATIVRQKYKTTLDLANGFWAHPITPDSYWLTAFTWQGKQYCWTRLPQGFLNSPALFTADAVDLLKEVPNVQVYVDDIYLSHDNPHEHIQQLEKVFQILLQAGYVVSLKKSEIGQRTVEFLGFNITKEGRGLTDTFKTKLLNVTPPKDLKQLQSILGLLNFARNFIPNFAELVQTLYNLIASSKGKYIEWTEDNTKQLNKVIEALNTASNLEERLPDQRLVIKVNTSPSAGYVRYYNESGKKPIMYLNYVFSKAELKFSMLEKLLTTMHKALIKAMDLAMGQEILVYSPIVSMTKIQKTPLPERKALPIRWITWMTYLEDPRIQFHYDKTLPELKHIPDVYTSSIPPLKHPSQYEGVFCTDGSAIKSPDPTKSNNAGMGIVHAIYNPEYKILNQWSIPLGHHTAQMAEIAAVEFACKKALKVPGPVLVITDSFYVAESANKELPYWKSNGFVNNKKEPLKHISKWKSIAECLSIKPDITIQHEKGHQPINTSIHTEGNALADKLATQGSYVVNAGKRTADGSEFEKRTADGSEFESPKKKAKVE

SEQ ID NO: 696 - protein, 2087 aa, synthetic construct
MPAAKRVKLDGGDKKYSIGLDIGTNSVGWAVITDEYKVPSKKFKVLGNTDRHSIKKNLIGALLFDSGETAEATRLKRTARRRYTRRKNRICYLQEIFSNEMAKVDDSFFHRLEESFLVEEDKKHERHPIFGNIVDEVAYHEKYPTIYHLRKKLVDSTDKADLRLIYLALAHMIKFRGHFLIEGDLNPDNSDVDKLFIQLVQTYNQLFEENPINASGVDAKAILSARLSKSRRLENLIAQLPGEKKNGLFGNLIALSLGLTPNFKSNFDLAEDAKLQLSKDTYDDDLDNLLAQIGDQYADLFLAAKNLSDAILLSDILRVNTEITKAPLSASMIKRYDEHHQDLTLLKALVRQQLPEKYKEIFFDQSKNGYAGYIDGGASQEEFYKFIKPILEKMDGTEELLVKLNREDLLRKQRTFDNGSIPHQIHLGELHAILRRQEDFYPFLKDNREKIEKILTFRIPYYVGPLARGNSRFAWMTRKSEETITPWNFEEVVDKGASAQSFIERMTNFDKNLPNEKVLPKHSLLYEYFTVYNELTKVKYVTEGMRKPAFLSGEQKKAIVDLLFKTNRKVTVKQLKEDYFKKIECFDSVEISGVEDRFNASLGTYHDLLKIIKDKDFLDNEENEDILEDIVLTLTLFEDREMIEERLKTYAHLFDDKVMKQLKRRRYTGWGRLSRKLINGIRDKQSGKTILDFLKSDGFANRNFMQLIHDDSLTFKEDIQKAQVSGQGDSLHEHIANLAGSPAIKKGILQTVKVVDELVKVMGRHKPENIVIEMARENQTTQKGQKNSRERMKRIEEGIKELGSQILKEHPVENTQLQNEKLYLYYLQNGRDMYVDQELDINRLSDYDVDHIVPQSFLKDDSIDNKVLTRSDKARGKSDNVPSEEVVKKMKNYWRQLLNAKLITQRKFDNLTKAERGGLSELDKAGFIKRQLVETRQITKHVAQILDSRMNTKYDENDKLIREVKVITLKSKLVSDFRKDFQFYKVREINNYHHAHDAYLNAVVGTALIKKYPKLESEFVYGDYKVYDVRKMIAKSEQEIGKATAKYFFYSNIMNFFKTEITLANGEIRKRPLIETNGETGEIVWDKGRDFATVRKVLSMPQVNIVKKTEVQTGGFSKESILPKRNSDKLIARKKDWDPKKYGGFDSPTVAYSVLVVAKVEKGKSKKLKSVKELLGITIMERSSFEKNPIDFLEAKGYKEVKKDLIIKLPKYSLFELENGRKRMLASAGELQKGNELALPSKYVNFLYLASHYEKLKGSPEDNEQKQLFVEQHKHYLDEIIEQISEFSKRVILADANLDKVLSAYNKHRDKPIREQAENIIHLFTLTNLGAPAAFKYFDTTIDRKRYTSTKEVLDATLIHQSITGLYETRIDLSQLGGDGGPAPGGGEAAAKGGVPWLTQQPLQLTILVPLQEYQDRILNKTALPEEQKQQLKALFTKYDNLWQHWENQVGHRKIRPHNIATGDYPPRPQKQYPINPKAKPSIQIVIDDLLKQGVLTPQNSTMNTPVYPVPKPDGRWRMVLDYREVNKTIPLTAAQNQHSAGILATIVRQKYKTTLDLANGFWAHPITPDSYWLTAFTWQGKQYCWTRLPQGFLNSPALFTADAVDLLKEVPNVQVYVDDIYLSHDNPHEHIQQLEKVFQILLQAGYVVSLKKSEIGQRTVEFLGFNITKEGRGLTDTFKTKLLNVTPPKDLKQLQSILGLLNFARNFIPNFAELVQTLYNLIASSKGKYIEWTEDNTKQLNKVIEALNTASNLEERLPDQRLVIKVNTSPSAGYVRYYNESGKKPIMYLNYVFSKAELKFSMLEKLLTTMHKALIKAMDLAMGQEILVYSPIVSMTKIQKTPLPERKALPIRWITWMTYLEDPRIQFHYDKTLPELKHIPDVYTSSIPPLKHPSQYEGVFCTDGSAIKSPDPTKSNNAGMGIVHAIYNPEYKILNQWSIPLGHHTAQMAEIAAVEFACKKALKVPGPVLVITDSFYVAESANKELPYWKSNGFVNNKKEPLKHISKWKSIAECLSIKPDITIQHEKGHQPINTSIHTEGNALADKLATQGSYVVNAGKRTADGSEFEKRTADGSEFESPKKKAKVE

SEQ ID NO: 697 - protein, 2087 aa, synthetic construct
MPAAKRVKLDGGDKKYSIGLDIGTNSVGWAVITDEYKVPSKKFKVLGNTDRHSIKKNLIGALLFDSGETAEATRLKRTARRRYTRRKNRICYLQEIFSNEMAKVDDSFFHRLEESFLVEEDKKHERHPIFGNIVDEVAYHEKYPTIYHLRKKLVDSTDKADLRLIYLALAHMIKFRGHFLIEGDLNPDNSDVDKLFIQLVQTYNQLFEENPINASGVDAKAILSARLSKSRRLENLIAQLPGEKKNGLFGNLIALSLGLTPNFKSNFDLAEDAKLQLSKDTYDDDLDNLLAQIGDQYADLFLAAKNLSDAILLSDILRVNTEITKAPLSASMIKRYDEHHQDLTLLKALVRQQLPEKYKEIFFDQSKNGYAGYIDGGASQEEFYKFIKPILEKMDGTEELLVKLNREDLLRKQRTFDNGSIPHQIHLGELHAILRRQEDFYPFLKDNREKIEKILTFRIPYYVGPLARGNSRFAWMTRKSEETITPWNFEEVVDKGASAQSFIERMTNFDKNLPNEKVLPKHSLLYEYFTVYNELTKVKYVTEGMRKPAFLSGEQKKAIVDLLFKTNRKVTVKQLKEDYFKKIECFDSVEISGVEDRFNASLGTYHDLLKIIKDKDFLDNEENEDILEDIVLTLTLFEDREMIEERLKTYAHLFDDKVMKQLKRRRYTGWGRLSRKLINGIRDKQSGKTILDFLKSDGFANRNFMQLIHDDSLTFKEDIQKAQVSGQGDSLHEHIANLAGSPAIKKGILQTVKVVDELVKVMGRHKPENIVIEMARENQTTQKGQKNSRERMKRIEEGIKELGSQILKEHPVENTQLQNEKLYLYYLQNGRDMYVDQELDINRLSDYDVDHIVPQSFLKDDSIDNKVLTRSDKARGKSDNVPSEEVVKKMKNYWRQLLNAKLITQRKFDNLTKAERGGLSELDKAGFIKRQLVETRQITKHVAQILDSRMNTKYDENDKLIREVKVITLKSKLVSDFRKDFQFYKVREINNYHHAHDAYLNAVVGTALIKKYPKLESEFVYGDYKVYDVRKMIAKSEQEIGKATAKYFFYSNIMNFFKTEITLANGEIRKRPLIETNGETGEIVWDKGRDFATVRKVLSMPQVNIVKKTEVQTGGFSKESILPKRNSDKLIARKKDWDPKKYGGFDSPTVAYSVLVVAKVEKGKSKKLKSVKELLGITIMERSSFEKNPIDFLEAKGYKEVKKDLIIKLPKYSLFELENGRKRMLASAGELQKGNELALPSKYVNFLYLASHYEKLKGSPEDNEQKQLFVEQHKHYLDEIIEQISEFSKRVILADANLDKVLSAYNKHRDKPIREQAENIIHLFTLTNLGAPAAFKYFDTTIDRKRYTSTKEVLDATLIHQSITGLYETRIDLSQLGGDGGGGGEAAAKGGSGGVPWLTQQPLQLTILVPLQEYQDRILNKTALPEEQKQQLKALFTKYDNLWQHWENQVGHRKIRPHNIATGDYPPRPQKQYPINPKAKPSIQIVIDDLLKQGVLTPQNSTMNTPVYPVPKPDGRWRMVLDYREVNKTIPLTAAQNQHSAGILATIVRQKYKTTLDLANGFWAHPITPDSYWLTAFTWQGKQYCWTRLPQGFLNSPALFTADAVDLLKEVPNVQVYVDDIYLSHDNPHEHIQQLEKVFQILLQAGYVVSLKKSEIGQRTVEFLGFNITKEGRGLTDTFKTKLLNVTPPKDLKQLQSILGLLNFARNFIPNFAELVQTLYNLIASSKGKYIEWTEDNTKQLNKVIEALNTASNLEERLPDQRLVIKVNTSPSAGYVRYYNESGKKPIMYLNYVFSKAELKFSMLEKLLTTMHKALIKAMDLAMGQEILVYSPIVSMTKIQKTPLPERKALPIRWITWMTYLEDPRIQFHYDKTLPELKHIPDVYTSSIPPLKHPSQYEGVFCTDGSAIKSPDPTKSNNAGMGIVHAIYNPEYKILNQWSIPLGHHTAQMAEIAAVEFACKKALKVPGPVLVITDSFYVAESANKELPYWKSNGFVNNKKEPLKHISKWKSIAECLSIKPDITIQHEKGHQPINTSIHTEGNALADKLATQGSYVVNAGKRTADGSEFEKRTADGSEFESPKKKAKVE

SEQ ID NO: 698 - protein, 2087 aa, synthetic construct
MPAAKRVKLDGGDKKYSIGLDIGTNSVGWAVITDEYKVPSKKFKVLGNTDRHSIKKNLIGALLFDSGETAEATRLKRTARRRYTRRKNRICYLQEIFSNEMAKVDDSFFHRLEESFLVEEDKKHERHPIFGNIVDEVAYHEKYPTIYHLRKKLVDSTDKADLRLIYLALAHMIKFRGHFLIEGDLNPDNSDVDKLFIQLVQTYNQLFEENPINASGVDAKAILSARLSKSRRLENLIAQLPGEKKNGLFGNLIALSLGLTPNFKSNFDLAEDAKLQLSKDTYDDDLDNLLAQIGDQYADLFLAAKNLSDAILLSDILRVNTEITKAPLSASMIKRYDEHHQDLTLLKALVRQQLPEKYKEIFFDQSKNGYAGYIDGGASQEEFYKFIKPILEKMDGTEELLVKLNREDLLRKQRTFDNGSIPHQIHLGELHAILRRQEDFYPFLKDNREKIEKILTFRIPYYVGPLARGNSRFAWMTRKSEETITPWNFEEVVDKGASAQSFIERMTNFDKNLPNEKVLPKHSLLYEYFTVYNELTKVKYVTEGMRKPAFLSGEQKKAIVDLLFKTNRKVTVKQLKEDYFKKIECFDSVEISGVEDRFNASLGTYHDLLKIIKDKDFLDNEENEDILEDIVLTLTLFEDREMIEERLKTYAHLFDDKVMKQLKRRRYTGWGRLSRKLINGIRDKQSGKTILDFLKSDGFANRNFMQLIHDDSLTFKEDIQKAQVSGQGDSLHEHIANLAGSPAIKKGILQTVKVVDELVKVMGRHKPENIVIEMARENQTTQKGQKNSRERMKRIEEGIKELGSQILKEHPVENTQLQNEKLYLYYLQNGRDMYVDQELDINRLSDYDVDHIVPQSFLKDDSIDNKVLTRSDKARGKSDNVPSEEVVKKMKNYWRQLLNAKLITQRKFDNLTKAERGGLSELDKAGFIKRQLVETRQITKHVAQILDSRMNTKYDENDKLIREVKVITLKSKLVSDFRKDFQFYKVREINNYHHAHDAYLNAVVGTALIKKYPKLESEFVYGDYKVYDVRKMIAKSEQEIGKATAKYFFYSNIMNFFKTEITLANGEIRKRPLIETNGETGEIVWDKGRDFATVRKVLSMPQVNIVKKTEVQTGGFSKESILPKRNSDKLIARKKDWDPKKYGGFDSPTVAYSVLVVAKVEKGKSKKLKSVKELLGITIMERSSFEKNPIDFLEAKGYKEVKKDLIIKLPKYSLFELENGRKRMLASAGELQKGNELALPSKYVNFLYLASHYEKLKGSPEDNEQKQLFVEQHKHYLDEIIEQISEFSKRVILADANLDKVLSAYNKHRDKPIREQAENIIHLFTLTNLGAPAAFKYFDTTIDRKRYTSTKEVLDATLIHQSITGLYETRIDLSQLGGDGGGGGEAAAKGSSGGVPWLTQQPLQLTILVPLQEYQDRILNKTALPEEQKQQLKALFTKYDNLWQHWENQVGHRKIRPHNIATGDYPPRPQKQYPINPKAKPSIQIVIDDLLKQGVLTPQNSTMNTPVYPVPKPDGRWRMVLDYREVNKTIPLTAAQNQHSAGILATIVRQKYKTTLDLANGFWAHPITPDSYWLTAFTWQGKQYCWTRLPQGFLNSPALFTADAVDLLKEVPNVQVYVDDIYLSHDNPHEHIQQLEKVFQILLQAGYVVSLKKSEIGQRTVEFLGFNITKEGRGLTDTFKTKLLNVTPPKDLKQLQSILGLLNFARNFIPNFAELVQTLYNLIASSKGKYIEWTEDNTKQLNKVIEALNTASNLEERLPDQRLVIKVNTSPSAGYVRYYNESGKKPIMYLNYVFSKAELKFSMLEKLLTTMHKALIKAMDLAMGQEILVYSPIVSMTKIQKTPLPERKALPIRWITWMTYLEDPRIQFHYDKTLPELKHIPDVYTSSIPPLKHPSQYEGVFCTDGSAIKSPDPTKSNNAGMGIVHAIYNPEYKILNQWSIPLGHHTAQMAEIAAVEFACKKALKVPGPVLVITDSFYVAESANKELPYWKSNGFVNNKKEPLKHISKWKSIAECLSIKPDITIQHEKGHQPINTSIHTEGNALADKLATQGSYVVNAGKRTADGSEFEKRTADGSEFESPKKKAKVE

SEQ ID NO: 699 - protein, 2087 aa, synthetic construct
MPAAKRVKLDGGDKKYSIGLDIGTNSVGWAVITDEYKVPSKKFKVLGNTDRHSIKKNLIGALLFDSGETAEATRLKRTARRRYTRRKNRICYLQEIFSNEMAKVDDSFFHRLEESFLVEEDKKHERHPIFGNIVDEVAYHEKYPTIYHLRKKLVDSTDKADLRLIYLALAHMIKFRGHFLIEGDLNPDNSDVDKLFIQLVQTYNQLFEENPINASGVDAKAILSARLSKSRRLENLIAQLPGEKKNGLFGNLIALSLGLTPNFKSNFDLAEDAKLQLSKDTYDDDLDNLLAQIGDQYADLFLAAKNLSDAILLSDILRVNTEITKAPLSASMIKRYDEHHQDLTLLKALVRQQLPEKYKEIFFDQSKNGYAGYIDGGASQEEFYKFIKPILEKMDGTEELLVKLNREDLLRKQRTFDNGSIPHQIHLGELHAILRRQEDFYPFLKDNREKIEKILTFRIPYYVGPLARGNSRFAWMTRKSEETITPWNFEEVVDKGASAQSFIERMTNFDKNLPNEKVLPKHSLLYEYFTVYNELTKVKYVTEGMRKPAFLSGEQKKAIVDLLFKTNRKVTVKQLKEDYFKKIECFDSVEISGVEDRFNASLGTYHDLLKIIKDKDFLDNEENEDILEDIVLTLTLFEDREMIEERLKTYAHLFDDKVMKQLKRRRYTGWGRLSRKLINGIRDKQSGKTILDFLKSDGFANRNFMQLIHDDSLTFKEDIQKAQVSGQGDSLHEHIANLAGSPAIKKGILQTVKVVDELVKVMGRHKPENIVIEMARENQTTQKGQKNSRERMKRIEEGIKELGSQILKEHPVENTQLQNEKLYLYYLQNGRDMYVDQELDINRLSDYDVDHIVPQSFLKDDSIDNKVLTRSDKARGKSDNVPSEEVVKKMKNYWRQLLNAKLITQRKFDNLTKAERGGLSELDKAGFIKRQLVETRQITKHVAQILDSRMNTKYDENDKLIREVKVITLKSKLVSDFRKDFQFYKVREINNYHHAHDAYLNAVVGTALIKKYPKLESEFVYGDYKVYDVRKMIAKSEQEIGKATAKYFFYSNIMNFFKTEITLANGEIRKRPLIETNGETGEIVWDKGRDFATVRKVLSMPQVNIVKKTEVQTGGFSKESILPKRNSDKLIARKKDWDPKKYGGFDSPTVAYSVLVVAKVEKGKSKKLKSVKELLGITIMERSSFEKNPIDFLEAKGYKEVKKDLIIKLPKYSLFELENGRKRMLASAGELQKGNELALPSKYVNFLYLASHYEKLKGSPEDNEQKQLFVEQHKHYLDEIIEQISEFSKRVILADANLDKVLSAYNKHRDKPIREQAENIIHLFTLTNLGAPAAFKYFDTTIDRKRYTSTKEVLDATLIHQSITGLYETRIDLSQLGGDGGGSSGGGEAAAKGGVPWLTQQPLQLTILVPLQEYQDRILNKTALPEEQKQQLKALFTKYDNLWQHWENQVGHRKIRPHNIATGDYPPRPQKQYPINPKAKPSIQIVIDDLLKQGVLTPQNSTMNTPVYPVPKPDGRWRMVLDYREVNKTIPLTAAQNQHSAGILATIVRQKYKTTLDLANGFWAHPITPDSYWLTAFTWQGKQYCWTRLPQGFLNSPALFTADAVDLLKEVPNVQVYVDDIYLSHDNPHEHIQQLEKVFQILLQAGYVVSLKKSEIGQRTVEFLGFNITKEGRGLTDTFKTKLLNVTPPKDLKQLQSILGLLNFARNFIPNFAELVQTLYNLIASSKGKYIEWTEDNTKQLNKVIEALNTASNLEERLPDQRLVIKVNTSPSAGYVRYYNESGKKPIMYLNYVFSKAELKFSMLEKLLTTMHKALIKAMDLAMGQEILVYSPIVSMTKIQKTPLPERKALPIRWITWMTYLEDPRIQFHYDKTLPELKHIPDVYTSSIPPLKHPSQYEGVFCTDGSAIKSPDPTKSNNAGMGIVHAIYNPEYKILNQWSIPLGHHTAQMAEIAAVEFACKKALKVPGPVLVITDSFYVAESANKELPYWKSNGFVNNKKEPLKHISKWKSIAECLSIKPDITIQHEKGHQPINTSIHTEGNALADKLATQGSYVVNAGKRTADGSEFEKRTADGSEFESPKKKAKVE

SEQ ID NO: 700 - protein, 2094 aa, synthetic construct
MPAAKRVKLDGGDKKYSIGLDIGTNSVGWAVITDEYKVPSKKFKVLGNTDRHSIKKNLIGALLFDSGETAEATRLKRTARRRYTRRKNRICYLQEIFSNEMAKVDDSFFHRLEESFLVEEDKKHERHPIFGNIVDEVAYHEKYPTIYHLRKKLVDSTDKADLRLIYLALAHMIKFRGHFLIEGDLNPDNSDVDKLFIQLVQTYNQLFEENPINASGVDAKAILSARLSKSRRLENLIAQLPGEKKNGLFGNLIALSLGLTPNFKSNFDLAEDAKLQLSKDTYDDDLDNLLAQIGDQYADLFLAAKNLSDAILLSDILRVNTEITKAPLSASMIKRYDEHHQDLTLLKALVRQQLPEKYKEIFFDQSKNGYAGYIDGGASQEEFYKFIKPILEKMDGTEELLVKLNREDLLRKQRTFDNGSIPHQIHLGELHAILRRQEDFYPFLKDNREKIEKILTFRIPYYVGPLARGNSRFAWMTRKSEETITPWNFEEVVDKGASAQSFIERMTNFDKNLPNEKVLPKHSLLYEYFTVYNELTKVKYVTEGMRKPAFLSGEQKKAIVDLLFKTNRKVTVKQLKEDYFKKIECFDSVEISGVEDRFNASLGTYHDLLKIIKDKDFLDNEENEDILEDIVLTLTLFEDREMIEERLKTYAHLFDDKVMKQLKRRRYTGWGRLSRKLINGIRDKQSGKTILDFLKSDGFANRNFMQLIHDDSLTFKEDIQKAQVSGQGDSLHEHIANLAGSPAIKKGILQTVKVVDELVKVMGRHKPENIVIEMARENQTTQKGQKNSRERMKRIEEGIKELGSQILKEHPVENTQLQNEKLYLYYLQNGRDMYVDQELDINRLSDYDVDHIVPQSFLKDDSIDNKVLTRSDKARGKSDNVPSEEVVKKMKNYWRQLLNAKLITQRKFDNLTKAERGGLSELDKAGFIKRQLVETRQITKHVAQILDSRMNTKYDENDKLIREVKVITLKSKLVSDFRKDFQFYKVREINNYHHAHDAYLNAVVGTALIKKYPKLESEFVYGDYKVYDVRKMIAKSEQEIGKATAKYFFYSNIMNFFKTEITLANGEIRKRPLIETNGETGEIVWDKGRDFATVRKVLSMPQVNIVKKTEVQTGGFSKESILPKRNSDKLIARKKDWDPKKYGGFDSPTVAYSVLVVAKVEKGKSKKLKSVKELLGITIMERSSFEKNPIDFLEAKGYKEVKKDLIIKLPKYSLFELENGRKRMLASAGELQKGNELALPSKYVNFLYLASHYEKLKGSPEDNEQKQLFVEQHKHYLDEIIEQISEFSKRVILADANLDKVLSAYNKHRDKPIREQAENIIHLFTLTNLGAPAAFKYFDTTIDRKRYTSTKEVLDATLIHQSITGLYETRIDLSQLGGDGGGGSGGSGGSGGSGGSGGSGGVPWLTQQPLQLTILVPLQEYQDRILNKTALPEEQKQQLKALFTKYDNLWQHWENQVGHRKIRPHNIATGDYPPRPQKQYPINPKAKPSIQIVIDDLLKQGVLTPQNSTMNTPVYPVPKPDGRWRMVLDYREVNKTIPLTAAQNQHSAGILATIVRQKYKTTLDLANGFWAHPITPDSYWLTAFTWQGKQYCWTRLPQGFLNSPALFNADAVDLLKEVPNVQVYVDDIYLSHDNPHEHIQQLEKVFQILLQAGYVVSLKKSEIGQRTVEFLGFNITKEGRGLTDTFKTKLLNVTPPKDLKQLQSILGLLNFARNFIPNFAELVQTLYNLIASSPGKYIEWTEDNTKQLNKVIEALNTASNLEERLPDQRLVIKVNTSPSAGYVRYYNESGKKPIMYLNYVFSKAELKFSMLEKLLTTMHKALIKAMDLAMGQEILVYSPIVSMTKIQKTPLPERKALPIRWITWMTYLEDPRIQFHYDKTLPELKHIPDVYTSSIPPLKHPSQYEGVFCTDGSAIKSPDPTKSNNAGMGIVHAIYNPEYKILNQWSIPLGHHTAQMAEIAAVEFACKKALKVPGPVLVITDSFYVAESANKELPYWKSNGFVNNKKEPLKHISKWKSIAECLSIKPDITIQHEKGHQPINTSIHTEGNALADKLATQGSYVVNAGKRTADGSEFEKRTADGSEFESPKKKAKVE

SEQ ID NO: 701 - protein, 2091 aa, synthetic construct
MPAAKRVKLDGGDKKYSIGLDIGTNSVGWAVITDEYKVPSKKFKVLGNTDRHSIKKNLIGALLFDSGETAEATRLKRTARRRYTRRKNRICYLQEIFSNEMAKVDDSFFHRLEESFLVEEDKKHERHPIFGNIVDEVAYHEKYPTIYHLRKKLVDSTDKADLRLIYLALAHMIKFRGHFLIEGDLNPDNSDVDKLFIQLVQTYNQLFEENPINASGVDAKAILSARLSKSRRLENLIAQLPGEKKNGLFGNLIALSLGLTPNFKSNFDLAEDAKLQLSKDTYDDDLDNLLAQIGDQYADLFLAAKNLSDAILLSDILRVNTEITKAPLSASMIKRYDEHHQDLTLLKALVRQQLPEKYKEIFFDQSKNGYAGYIDGGASQEEFYKFIKPILEKMDGTEELLVKLNREDLLRKQRTFDNGSIPHQIHLGELHAILRRQEDFYPFLKDNREKIEKILTFRIPYYVGPLARGNSRFAWMTRKSEETITPWNFEEVVDKGASAQSFIERMTNFDKNLPNEKVLPKHSLLYEYFTVYNELTKVKYVTEGMRKPAFLSGEQKKAIVDLLFKTNRKVTVKQLKEDYFKKIECFDSVEISGVEDRFNASLGTYHDLLKIIKDKDFLDNEENEDILEDIVLTLTLFEDREMIEERLKTYAHLFDDKVMKQLKRRRYTGWGRLSRKLINGIRDKQSGKTILDFLKSDGFANRNFMQLIHDDSLTFKEDIQKAQVSGQGDSLHEHIANLAGSPAIKKGILQTVKVVDELVKVMGRHKPENIVIEMARENQTTQKGQKNSRERMKRIEEGIKELGSQILKEHPVENTQLQNEKLYLYYLQNGRDMYVDQELDINRLSDYDVDHIVPQSFLKDDSIDNKVLTRSDKARGKSDNVPSEEVVKKMKNYWRQLLNAKLITQRKFDNLTKAERGGLSELDKAGFIKRQLVETRQITKHVAQILDSRMNTKYDENDKLIREVKVITLKSKLVSDFRKDFQFYKVREINNYHHAHDAYLNAVVGTALIKKYPKLESEFVYGDYKVYDVRKMIAKSEQEIGKATAKYFFYSNIMNFFKTEITLANGEIRKRPLIETNGETGEIVWDKGRDFATVRKVLSMPQVNIVKKTEVQTGGFSKESILPKRNSDKLIARKKDWDPKKYGGFDSPTVAYSVLVVAKVEKGKSKKLKSVKELLGITIMERSSFEKNPIDFLEAKGYKEVKKDLIIKLPKYSLFELENGRKRMLASAGELQKGNELALPSKYVNFLYLASHYEKLKGSPEDNEQKQLFVEQHKHYLDEIIEQISEFSKRVILADANLDKVLSAYNKHRDKPIREQAENIIHLFTLTNLGAPAAFKYFDTTIDRKRYTSTKEVLDATLIHQSITGLYETRIDLSQLGGDGGEAAAKGGGGSEAAAKGGVPWLTQQPLQLTILVPLQEYQDRILNKTALPEEQKQQLKALFTKYDNLWQHWENQVGHRKIRPHNIATGDYPPRPQKQYPINPKAKPSIQIVIDDLLKQGVLTPQNSTMNTPVYPVPKPDGRWRMVLDYREVNKTIPLTAAQNQHSAGILATIVRQKYKTTLDLANGFWAHPITPDSYWLTAFTWQGKQYCWTRLPQGFLNSPALFNADAVDLLKEVPNVQVYVDDIYLSHDNPHEHIQQLEKVFQILLQAGYVVSLKKSEIGQRTVEFLGFNITKEGRGLTDTFKTKLLNVTPPKDLKQLQSILGLLNFARNFIPNFAELVQTLYNLIASSPGKYIEWTEDNTKQLNKVIEALNTASNLEERLPDQRLVIKVNTSPSAGYVRYYNESGKKPIMYLNYVFSKAELKFSMLEKLLTTMHKALIKAMDLAMGQEILVYSPIVSMTKIQKTPLPERKALPIRWITWMTYLEDPRIQFHYDKTLPELKHIPDVYTSSIPPLKHPSQYEGVFCTDGSAIKSPDPTKSNNAGMGIVHAIYNPEYKILNQWSIPLGHHTAQMAEIAAVEFACKKALKVPGPVLVITDSFYVAESANKELPYWKSNGFVNNKKEPLKHISKWKSIAECLSIKPDITIQHEKGHQPINTSIHTEGNALADKLATQGSYVVNAGKRTADGSEFEKRTADGSEFESPKKKAKVE

SEQ ID NO: 702 - protein, 2091 aa, synthetic construct
MPAAKRVKLDGGDKKYSIGLDIGTNSVGWAVITDEYKVPSKKFKVLGNTDRHSIKKNLIGALLFDSGETAEATRLKRTARRRYTRRKNRICYLQEIFSNEMAKVDDSFFHRLEESFLVEEDKKHERHPIFGNIVDEVAYHEKYPTIYHLRKKLVDSTDKADLRLIYLALAHMIKFRGHFLIEGDLNPDNSDVDKLFIQLVQTYNQLFEENPINASGVDAKAILSARLSKSRRLENLIAQLPGEKKNGLFGNLIALSLGLTPNFKSNFDLAEDAKLQLSKDTYDDDLDNLLAQIGDQYADLFLAAKNLSDAILLSDILRVNTEITKAPLSASMIKRYDEHHQDLTLLKALVRQQLPEKYKEIFFDQSKNGYAGYIDGGASQEEFYKFIKPILEKMDGTEELLVKLNREDLLRKQRTFDNGSIPHQIHLGELHAILRRQEDFYPFLKDNREKIEKILTFRIPYYVGPLARGNSRFAWMTRKSEETITPWNFEEVVDKGASAQSFIERMTNFDKNLPNEKVLPKHSLLYEYFTVYNELTKVKYVTEGMRKPAFLSGEQKKAIVDLLFKTNRKVTVKQLKEDYFKKIECFDSVEISGVEDRFNASLGTYHDLLKIIKDKDFLDNEENEDILEDIVLTLTLFEDREMIEERLKTYAHLFDDKVMKQLKRRRYTGWGRLSRKLINGIRDKQSGKTILDFLKSDGFANRNFMQLIHDDSLTFKEDIQKAQVSGQGDSLHEHIANLAGSPAIKKGILQTVKVVDELVKVMGRHKPENIVIEMARENQTTQKGQKNSRERMKRIEEGIKELGSQILKEHPVENTQLQNEKLYLYYLQNGRDMYVDQELDINRLSDYDVDHIVPQSFLKDDSIDNKVLTRSDKARGKSDNVPSEEVVKKMKNYWRQLLNAKLITQRKFDNLTKAERGGLSELDKAGFIKRQLVETRQITKHVAQILDSRMNTKYDENDKLIREVKVITLKSKLVSDFRKDFQFYKVREINNYHHAHDAYLNAVVGTALIKKYPKLESEFVYGDYKVYDVRKMIAKSEQEIGKATAKYFFYSNIMNFFKTEITLANGEIRKRPLIETNGETGEIVWDKGRDFATVRKVLSMPQVNIVKKTEVQTGGFSKESILPKRNSDKLIARKKDWDPKKYGGFDSPTVAYSVLVVAKVEKGKSKKLKSVKELLGITIMERSSFEKNPIDFLEAKGYKEVKKDLIIKLPKYSLFELENGRKRMLASAGELQKGNELALPSKYVNFLYLASHYEKLKGSPEDNEQKQLFVEQHKHYLDEIIEQISEFSKRVILADANLDKVLSAYNKHRDKPIREQAENIIHLFTLTNLGAPAAFKYFDTTIDRKRYTSTKEVLDATLIHQSITGLYETRIDLSQLGGDGGGGSGGSGGSGGSGGSGGVPWLTQQPLQLTILVPLQEYQDRILNKTALPEEQKQQLKALFTKYDNLWQHWENQVGHRKIRPHNIATGDYPPRPQKQYPINPKAKPSIQIVIDDLLKQGVLTPQNSTMNTPVYPVPKPDGRWRMVLDYREVNKTIPLTAAQNQHSAGILATIVRQKYKTTLDLANGFWAHPITPDSYWLTAFTWQGKQYCWTRLPQGFLNSPALFNADAVDLLKEVPNVQVYVDDIYLSHDNPHEHIQQLEKVFQILLQAGYVVSLKKSEIGQRTVEFLGFNITKEGRGLTDTFKTKLLNVTPPKDLKQLQSILGLLNFARNFIPNFAELVQTLYNLIASSPGKYIEWTEDNTKQLNKVIEALNTASNLEERLPDQRLVIKVNTSPSAGYVRYYNESGKKPIMYLNYVFSKAELKFSMLEKLLTTMHKALIKAMDLAMGQEILVYSPIVSMTKIQKTPLPERKALPIRWITWMTYLEDPRIQFHYDKTLPELKHIPDVYTSSIPPLKHPSQYEGVFCTDGSAIKSPDPTKSNNAGMGIVHAIYNPEYKILNQWSIPLGHHTAQMAEIAAVEFACKKALKVPGPVLVITDSFYVAESANKELPYWKSNGFVNNKKEPLKHISKWKSIAECLSIKPDITIQHEKGHQPINTSIHTEGNALADKLATQGSYVVNAGKRTADGSEFEKRTADGSEFESPKKKAKVE

SEQ ID NO: 703 - protein, 2082 aa, synthetic construct
MPAAKRVKLDGGDKKYSIGLDIGTNSVGWAVITDEYKVPSKKFKVLGNTDRHSIKKNLIGALLFDSGETAEATRLKRTARRRYTRRKNRICYLQEIFSNEMAKVDDSFFHRLEESFLVEEDKKHERHPIFGNIVDEVAYHEKYPTIYHLRKKLVDSTDKADLRLIYLALAHMIKFRGHFLIEGDLNPDNSDVDKLFIQLVQTYNQLFEENPINASGVDAKAILSARLSKSRRLENLIAQLPGEKKNGLFGNLIALSLGLTPNFKSNFDLAEDAKLQLSKDTYDDDLDNLLAQIGDQYADLFLAAKNLSDAILLSDILRVNTEITKAPLSASMIKRYDEHHQDLTLLKALVRQQLPEKYKEIFFDQSKNGYAGYIDGGASQEEFYKFIKPILEKMDGTEELLVKLNREDLLRKQRTFDNGSIPHQIHLGELHAILRRQEDFYPFLKDNREKIEKILTFRIPYYVGPLARGNSRFAWMTRKSEETITPWNFEEVVDKGASAQSFIERMTNFDKNLPNEKVLPKHSLLYEYFTVYNELTKVKYVTEGMRKPAFLSGEQKKAIVDLLFKTNRKVTVKQLKEDYFKKIECFDSVEISGVEDRFNASLGTYHDLLKIIKDKDFLDNEENEDILEDIVLTLTLFEDREMIEERLKTYAHLFDDKVMKQLKRRRYTGWGRLSRKLINGIRDKQSGKTILDFLKSDGFANRNFMQLIHDDSLTFKEDIQKAQVSGQGDSLHEHIANLAGSPAIKKGILQTVKVVDELVKVMGRHKPENIVIEMARENQTTQKGQKNSRERMKRIEEGIKELGSQILKEHPVENTQLQNEKLYLYYLQNGRDMYVDQELDINRLSDYDVDHIVPQSFLKDDSIDNKVLTRSDKARGKSDNVPSEEVVKKMKNYWRQLLNAKLITQRKFDNLTKAERGGLSELDKAGFIKRQLVETRQITKHVAQILDSRMNTKYDENDKLIREVKVITLKSKLVSDFRKDFQFYKVREINNYHHAHDAYLNAVVGTALIKKYPKLESEFVYGDYKVYDVRKMIAKSEQEIGKATAKYFFYSNIMNFFKTEITLANGEIRKRPLIETNGETGEIVWDKGRDFATVRKVLSMPQVNIVKKTEVQTGGFSKESILPKRNSDKLIARKKDWDPKKYGGFDSPTVAYSVLVVAKVEKGKSKKLKSVKELLGITIMERSSFEKNPIDFLEAKGYKEVKKDLIIKLPKYSLFELENGRKRMLASAGELQKGNELALPSKYVNFLYLASHYEKLKGSPEDNEQKQLFVEQHKHYLDEIIEQISEFSKRVILADANLDKVLSAYNKHRDKPIREQAENIIHLFTLTNLGAPAAFKYFDTTIDRKRYTSTKEVLDATLIHQSITGLYETRIDLSQLGGDGGGSSGGSGGVPWLTQQPLQLTILVPLQEYQDRILNKTALPEEQKQQLKALFTKYDNLWQHWENQVGHRKIRPHNIATGDYPPRPQKQYPINPKAKPSIQIVIDDLLKQGVLTPQNSTMNTPVYPVPKPDGRWRMVLDYREVNKTIPLTAAQNQHSAGILATIVRQKYKTTLDLANGFWAHPITPDSYWLTAFTWQGKQYCWTRLPQGFLNSPALFNADAVDLLKEVPNVQVYVDDIYLSHDNPHEHIQQLEKVFQILLQAGYVVSLKKSEIGQRTVEFLGFNITKEGRGLTDTFKTKLLNVTPPKDLKQLQSILGLLNFARNFIPNFAELVQTLYNLIASSPGKYIEWTEDNTKQLNKVIEALNTASNLEERLPDQRLVIKVNTSPSAGYVRYYNESGKKPIMYLNYVFSKAELKFSMLEKLLTTMHKALIKAMDLAMGQEILVYSPIVSMTKIQKTPLPERKALPIRWITWMTYLEDPRIQFHYDKTLPELKHIPDVYTSSIPPLKHPSQYEGVFCTDGSAIKSPDPTKSNNAGMGIVHAIYNPEYKILNQWSIPLGHHTAQMAEIAAVEFACKKALKVPGPVLVITDSFYVAESANKELPYWKSNGFVNNKKEPLKHISKWKSIAECLSIKPDITIQHEKGHQPINTSIHTEGNALADKLATQGSYVVNAGKRTADGSEFEKRTADGSEFESPKKKAKVE

SEQ ID NO: 704 - protein, 2092 aa, synthetic construct
MPAAKRVKLDGGDKKYSIGLDIGTNSVGWAVITDEYKVPSKKFKVLGNTDRHSIKKNLIGALLFDSGETAEATRLKRTARRRYTRRKNRICYLQEIFSNEMAKVDDSFFHRLEESFLVEEDKKHERHPIFGNIVDEVAYHEKYPTIYHLRKKLVDSTDKADLRLIYLALAHMIKFRGHFLIEGDLNPDNSDVDKLFIQLVQTYNQLFEENPINASGVDAKAILSARLSKSRRLENLIAQLPGEKKNGLFGNLIALSLGLTPNFKSNFDLAEDAKLQLSKDTYDDDLDNLLAQIGDQYADLFLAAKNLSDAILLSDILRVNTEITKAPLSASMIKRYDEHHQDLTLLKALVRQQLPEKYKEIFFDQSKNGYAGYIDGGASQEEFYKFIKPILEKMDGTEELLVKLNREDLLRKQRTFDNGSIPHQIHLGELHAILRRQEDFYPFLKDNREKIEKILTFRIPYYVGPLARGNSRFAWMTRKSEETITPWNFEEVVDKGASAQSFIERMTNFDKNLPNEKVLPKHSLLYEYFTVYNELTKVKYVTEGMRKPAFLSGEQKKAIVDLLFKTNRKVTVKQLKEDYFKKIECFDSVEISGVEDRFNASLGTYHDLLKIIKDKDFLDNEENEDILEDIVLTLTLFEDREMIEERLKTYAHLFDDKVMKQLKRRRYTGWGRLSRKLINGIRDKQSGKTILDFLKSDGFANRNFMQLIHDDSLTFKEDIQKAQVSGQGDSLHEHIANLAGSPAIKKGILQTVKVVDELVKVMGRHKPENIVIEMARENQTTQKGQKNSRERMKRIEEGIKELGSQILKEHPVENTQLQNEKLYLYYLQNGRDMYVDQELDINRLSDYDVDHIVPQSFLKDDSIDNKVLTRSDKARGKSDNVPSEEVVKKMKNYWRQLLNAKLITQRKFDNLTKAERGGLSELDKAGFIKRQLVETRQITKHVAQILDSRMNTKYDENDKLIREVKVITLKSKLVSDFRKDFQFYKVREINNYHHAHDAYLNAVVGTALIKKYPKLESEFVYGDYKVYDVRKMIAKSEQEIGKATAKYFFYSNIMNFFKTEITLANGEIRKRPLIETNGETGEIVWDKGRDFATVRKVLSMPQVNIVKKTEVQTGGFSKESILPKRNSDKLIARKKDWDPKKYGGFDSPTVAYSVLVVAKVEKGKSKKLKSVKELLGITIMERSSFEKNPIDFLEAKGYKEVKKDLIIKLPKYSLFELENGRKRMLASAGELQKGNELALPSKYVNFLYLASHYEKLKGSPEDNEQKQLFVEQHKHYLDEIIEQISEFSKRVILADANLDKVLSAYNKHRDKPIREQAENIIHLFTLTNLGAPAAFKYFDTTIDRKRYTSTKEVLDATLIHQSITGLYETRIDLSQLGGDGGSGSETPGTSESATPESGGVPWLTQQPLQLTILVPLQEYQDRILNKTALPEEQKQQLKALFTKYDNLWQHWENQVGHRKIRPHNIATGDYPPRPQKQYPINPKAKPSIQIVIDDLLKQGVLTPQNSTMNTPVYPVPKPDGRWRMVLDYREVNKTIPLTAAQNQHSAGILATIVRQKYKTTLDLANGFWAHPITPDSYWLTAFTWQGKQYCWTRLPQGFLNSPALFNADAVDLLKEVPNVQVYVDDIYLSHDNPHEHIQQLEKVFQILLQAGYVVSLKKSEIGQRTVEFLGFNITKEGRGLTDTFKTKLLNVTPPKDLKQLQSILGKLNFARNFIPNFAELVQTLYNLIASSPGKYIEWTEDNTKQLNKVIEALNTASNLEERLPDQRLVIKVNTSPSAGYVRYYNESGKKPIMYLNYVFSKAELKFSMLEKLLTTMHKALIKAMDLAMGQEILVYSPIVSMTKIQKTPLPERKALPIRWITWMTYLEDPRIQFHYDKTLPELKHIPDVYTSSIPPLKHPSQYEGVFCTDGSAIKSPDPTKSNNAGMGIVHAIYNPEYKILNQWSIPLGHHTAQMAEIAAVEFACKKALKVPGPVLVITDSFYVAESANKELPYWKSNGFVNNKKEPLKHISKWKSIAECLSIKPDITIQHEKGHQPINTSIHTEGNALADKLATQGSYVVNAGKRTADGSEFEKRTADGSEFESPKKKAKVE

SEQ ID NO: 705 - protein, 2087 aa, synthetic construct
MPAAKRVKLDGGDKKYSIGLDIGTNSVGWAVITDEYKVPSKKFKVLGNTDRHSIKKNLIGALLFDSGETAEATRLKRTARRRYTRRKNRICYLQEIFSNEMAKVDDSFFHRLEESFLVEEDKKHERHPIFGNIVDEVAYHEKYPTIYHLRKKLVDSTDKADLRLIYLALAHMIKFRGHFLIEGDLNPDNSDVDKLFIQLVQTYNQLFEENPINASGVDAKAILSARLSKSRRLENLIAQLPGEKKNGLFGNLIALSLGLTPNFKSNFDLAEDAKLQLSKDTYDDDLDNLLAQIGDQYADLFLAAKNLSDAILLSDILRVNTEITKAPLSASMIKRYDEHHQDLTLLKALVRQQLPEKYKEIFFDQSKNGYAGYIDGGASQEEFYKFIKPILEKMDGTEELLVKLNREDLLRKQRTFDNGSIPHQIHLGELHAILRRQEDFYPFLKDNREKIEKILTFRIPYYVGPLARGNSRFAWMTRKSEETITPWNFEEVVDKGASAQSFIERMTNFDKNLPNEKVLPKHSLLYEYFTVYNELTKVKYVTEGMRKPAFLSGEQKKAIVDLLFKTNRKVTVKQLKEDYFKKIECFDSVEISGVEDRFNASLGTYHDLLKIIKDKDFLDNEENEDILEDIVLTLTLFEDREMIEERLKTYAHLFDDKVMKQLKRRRYTGWGRLSRKLINGIRDKQSGKTILDFLKSDGFANRNFMQLIHDDSLTFKEDIQKAQVSGQGDSLHEHIANLAGSPAIKKGILQTVKVVDELVKVMGRHKPENIVIEMARENQTTQKGQKNSRERMKRIEEGIKELGSQILKEHPVENTQLQNEKLYLYYLQNGRDMYVDQELDINRLSDYDVDHIVPQSFLKDDSIDNKVLTRSDKARGKSDNVPSEEVVKKMKNYWRQLLNAKLITQRKFDNLTKAERGGLSELDKAGFIKRQLVETRQITKHVAQILDSRMNTKYDENDKLIREVKVITLKSKLVSDFRKDFQFYKVREINNYHHAHDAYLNAVVGTALIKKYPKLESEFVYGDYKVYDVRKMIAKSEQEIGKATAKYFFYSNIMNFFKTEITLANGEIRKRPLIETNGETGEIVWDKGRDFATVRKVLSMPQVNIVKKTEVQTGGFSKESILPKRNSDKLIARKKDWDPKKYGGFDSPTVAYSVLVVAKVEKGKSKKLKSVKELLGITIMERSSFEKNPIDFLEAKGYKEVKKDLIIKLPKYSLFELENGRKRMLASAGELQKGNELALPSKYVNFLYLASHYEKLKGSPEDNEQKQLFVEQHKHYLDEIIEQISEFSKRVILADANLDKVLSAYNKHRDKPIREQAENIIHLFTLTNLGAPAAFKYFDTTIDRKRYTSTKEVLDATLIHQSITGLYETRIDLSQLGGDGGPAPAPAPAPAPGGVPWLTQQPLQLTILVPLQEYQDRILNKTALPEEQKQQLKALFTKYDNLWQHWENQVGHRKIRPHNIATGDYPPRPQKQYPINPKAKPSIQIVIDDLLKQGVLTPQNSTMNTPVYPVPKPDGRWRMVLDYREVNKTIPLTAAQNQHSAGILATIVRQKYKTTLDLANGFWAHPITPDSYWLTAFTWQGKQYCWTRLPQGFLNSPALFNADAVDLLKEVPNVQVYVDDIYLSHDNPHEHIQQLEKVFQILLQAGYVVSLKKSEIGQRTVEFLGFNITKEGRGLTDTFKTKLLNVTPPKDLKQLQSILGKLNFARNFIPNFAELVQTLYNLIASSPGKYIEWTEDNTKQLNKVIEALNTASNLEERLPDQRLVIKVNTSPSAGYVRYYNESGKKPIMYLNYVFSKAELKFSMLEKLLTTMHKALIKAMDLAMGQEILVYSPIVSMTKIQKTPLPERKALPIRWITWMTYLEDPRIQFHYDKTLPELKHIPDVYTSSIPPLKHPSQYEGVFCTDGSAIKSPDPTKSNNAGMGIVHAIYNPEYKILNQWSIPLGHHTAQMAEIAAVEFACKKALKVPGPVLVITDSFYVAESANKELPYWKSNGFVNNKKEPLKHISKWKSIAECLSIKPDITIQHEKGHQPINTSIHTEGNALADKLATQGSYVVNAGKRTADGSEFEKRTADGSEFESPKKKAKVE

SEQ ID NO: 706 - protein, 2085 aa, synthetic construct
MPAAKRVKLDGGDKKYSIGLDIGTNSVGWAVITDEYKVPSKKFKVLGNTDRHSIKKNLIGALLFDSGETAEATRLKRTARRRYTRRKNRICYLQEIFSNEMAKVDDSFFHRLEESFLVEEDKKHERHPIFGNIVDEVAYHEKYPTIYHLRKKLVDSTDKADLRLIYLALAHMIKFRGHFLIEGDLNPDNSDVDKLFIQLVQTYNQLFEENPINASGVDAKAILSARLSKSRRLENLIAQLPGEKKNGLFGNLIALSLGLTPNFKSNFDLAEDAKLQLSKDTYDDDLDNLLAQIGDQYADLFLAAKNLSDAILLSDILRVNTEITKAPLSASMIKRYDEHHQDLTLLKALVRQQLPEKYKEIFFDQSKNGYAGYIDGGASQEEFYKFIKPILEKMDGTEELLVKLNREDLLRKQRTFDNGSIPHQIHLGELHAILRRQEDFYPFLKDNREKIEKILTFRIPYYVGPLARGNSRFAWMTRKSEETITPWNFEEVVDKGASAQSFIERMTNFDKNLPNEKVLPKHSLLYEYFTVYNELTKVKYVTEGMRKPAFLSGEQKKAIVDLLFKTNRKVTVKQLKEDYFKKIECFDSVEISGVEDRFNASLGTYHDLLKIIKDKDFLDNEENEDILEDIVLTLTLFEDREMIEERLKTYAHLFDDKVMKQLKRRRYTGWGRLSRKLINGIRDKQSGKTILDFLKSDGFANRNFMQLIHDDSLTFKEDIQKAQVSGQGDSLHEHIANLAGSPAIKKGILQTVKVVDELVKVMGRHKPENIVIEMARENQTTQKGQKNSRERMKRIEEGIKELGSQILKEHPVENTQLQNEKLYLYYLQNGRDMYVDQELDINRLSDYDVDHIVPQSFLKDDSIDNKVLTRSDKARGKSDNVPSEEVVKKMKNYWRQLLNAKLITQRKFDNLTKAERGGLSELDKAGFIKRQLVETRQITKHVAQILDSRMNTKYDENDKLIREVKVITLKSKLVSDFRKDFQFYKVREINNYHHAHDAYLNAVVGTALIKKYPKLESEFVYGDYKVYDVRKMIAKSEQEIGKATAKYFFYSNIMNFFKTEITLANGEIRKRPLIETNGETGEIVWDKGRDFATVRKVLSMPQVNIVKKTEVQTGGFSKESILPKRNSDKLIARKKDWDPKKYGGFDSPTVAYSVLVVAKVEKGKSKKLKSVKELLGITIMERSSFEKNPIDFLEAKGYKEVKKDLIIKLPKYSLFELENGRKRMLASAGELQKGNELALPSKYVNFLYLASHYEKLKGSPEDNEQKQLFVEQHKHYLDEIIEQISEFSKRVILADANLDKVLSAYNKHRDKPIREQAENIIHLFTLTNLGAPAAFKYFDTTIDRKRYTSTKEVLDATLIHQSITGLYETRIDLSQLGGDGGPAPGGGGSSGGVPWLTQQPLQLTILVPLQEYQDRILNKTALPEEQKQQLKALFTKYDNLWQHWENQVGHRKIRPHNIATGDYPPRPQKQYPINPKAKPSIQIVIDDLLKQGVLTPQNSTMNTPVYPVPKPDGRWRMVLDYREVNKTIPLTAAQNQHSAGILATIVRQKYKTTLDLANGFWAHPITPDSYWLTAFTWQGKQYCWTRLPQGFLNSPALFNADAVDLLKEVPNVQVYVDDIYLSHDNPHEHIQQLEKVFQILLQAGYVVSLKKSEIGQRTVEFLGFNITKEGRGLTDTFKTKLLNVTPPKDLKQLQSILGKLNFARNFIPNFAELVQTLYNLIASSPGKYIEWTEDNTKQLNKVIEALNTASNLEERLPDQRLVIKVNTSPSAGYVRYYNESGKKPIMYLNYVFSKAELKFSMLEKLLTTMHKALIKAMDLAMGQEILVYSPIVSMTKIQKTPLPERKALPIRWITWMTYLEDPRIQFHYDKTLPELKHIPDVYTSSIPPLKHPSQYEGVFCTDGSAIKSPDPTKSNNAGMGIVHAIYNPEYKILNQWSIPLGHHTAQMAEIAAVEFACKKALKVPGPVLVITDSFYVAESANKELPYWKSNGFVNNKKEPLKHISKWKSIAECLSIKPDITIQHEKGHQPINTSIHTEGNALADKLATQGSYVVNAGKRTADGSEFEKRTADGSEFESPKKKAKVE

SEQ ID NO: 707 - protein, 2168 aa, synthetic construct
MPAAKRVKLDGGDKKYSIGLDIGTNSVGWAVITDEYKVPSKKFKVLGNTDRHSIKKNLIGALLFDSGETAEATRLKRTARRRYTRRKNRICYLQEIFSNEMAKVDDSFFHRLEESFLVEEDKKHERHPIFGNIVDEVAYHEKYPTIYHLRKKLVDSTDKADLRLIYLALAHMIKFRGHFLIEGDLNPDNSDVDKLFIQLVQTYNQLFEENPINASGVDAKAILSARLSKSRRLENLIAQLPGEKKNGLFGNLIALSLGLTPNFKSNFDLAEDAKLQLSKDTYDDDLDNLLAQIGDQYADLFLAAKNLSDAILLSDILRVNTEITKAPLSASMIKRYDEHHQDLTLLKALVRQQLPEKYKEIFFDQSKNGYAGYIDGGASQEEFYKFIKPILEKMDGTEELLVKLNREDLLRKQRTFDNGSIPHQIHLGELHAILRRQEDFYPFLKDNREKIEKILTFRIPYYVGPLARGNSRFAWMTRKSEETITPWNFEEVVDKGASAQSFIERMTNFDKNLPNEKVLPKHSLLYEYFTVYNELTKVKYVTEGMRKPAFLSGEQKKAIVDLLFKTNRKVTVKQLKEDYFKKIECFDSVEISGVEDRFNASLGTYHDLLKIIKDKDFLDNEENEDILEDIVLTLTLFEDREMIEERLKTYAHLFDDKVMKQLKRRRYTGWGRLSRKLINGIRDKQSGKTILDFLKSDGFANRNFMQLIHDDSLTFKEDIQKAQVSGQGDSLHEHIANLAGSPAIKKGILQTVKVVDELVKVMGRHKPENIVIEMARENQTTQKGQKNSRERMKRIEEGIKELGSQILKEHPVENTQLQNEKLYLYYLQNGRDMYVDQELDINRLSDYDVDHIVPQSFLKDDSIDNKVLTRSDKARGKSDNVPSEEVVKKMKNYWRQLLNAKLITQRKFDNLTKAERGGLSELDKAGFIKRQLVETRQITKHVAQILDSRMNTKYDENDKLIREVKVITLKSKLVSDFRKDFQFYKVREINNYHHAHDAYLNAVVGTALIKKYPKLESEFVYGDYKVYDVRKMIAKSEQEIGKATAKYFFYSNIMNFFKTEITLANGEIRKRPLIETNGETGEIVWDKGRDFATVRKVLSMPQVNIVKKTEVQTGGFSKESILPKRNSDKLIARKKDWDPKKYGGFDSPTVAYSVLVVAKVEKGKSKKLKSVKELLGITIMERSSFEKNPIDFLEAKGYKEVKKDLIIKLPKYSLFELENGRKRMLASAGELQKGNELALPSKYVNFLYLASHYEKLKGSPEDNEQKQLFVEQHKHYLDEIIEQISEFSKRVILADANLDKVLSAYNKHRDKPIREQAENIIHLFTLTNLGAPAAFKYFDTTIDRKRYTSTKEVLDATLIHQSITGLYETRIDLSQLGGDGGGSSGGMNPLQLLQPLPAEVKGTKLLAHWNSGATITCIPESFLEDEQPIKQTLIKTIHGEKQQNVYYLTFKVKGRKVEAEVIASPYEYILLSPTDVPWLTQQPLQLTILVPLQEYQDRILNKTALPEEQKQQLKALFTKYDNLWQHWENQVGHRKIRPHNIATGDYPPRPQKQYPINPKAKPSIQIVIDDLLKQGVLTPQNSTMNTPVYPVPKPDGRWRMVLDYREVNKTIPLTAAQNQHSAGILATIVRQKYKTTLDLANGFWAHPITPDSYWLTAFTWQGKQYCWTRLPQGFLNSPALFNADAVDLLKEVPNVQVYVDDIYLSHDNPHEHIQQLEKVFQILLQAGYVVSLKKSEIGQRTVEFLGFNITKEGRGLTDTFKTKLLNVTPPKDLKQLQSILGLLNFARNFIPNFAELVQTLYNLIASSPGKYIEWTEDNTKQLNKVIEALNTASNLEERLPDQRLVIKVNTSPSAGYVRYYNESGKKPIMYLNYVFSKAELKFSMLEKLLTTMHKALIKAMDLAMGQEILVYSPIVSMTKIQKTPLPERKALPIRWITWMTYLEDPRIQFHYDKTLPELKHIPDVYTSSIPPLKHPSQYEGVFCTDGSAIKSPDPTKSNNAGMGIVHAIYNPEYKILNQWSIPLGHHTAQMAEIAAVEFACKKALKVPGPVLVITDSFYVAESANKELPYWKSNGFVNNKKEPLKHISKWKSIAECLSIKPDITIQHEKGHQPINTSIHTEGNALADKLATQGSYVVNAGKRTADGSEFEKRTADGSEFESPKKKAKVE

SEQ ID NO: 708 - protein, 2174 aa, synthetic construct
MPAAKRVKLDGGDKKYSIGLDIGTNSVGWAVITDEYKVPSKKFKVLGNTDRHSIKKNLIGALLFDSGETAEATRLKRTARRRYTRRKNRICYLQEIFSNEMAKVDDSFFHRLEESFLVEEDKKHERHPIFGNIVDEVAYHEKYPTIYHLRKKLVDSTDKADLRLIYLALAHMIKFRGHFLIEGDLNPDNSDVDKLFIQLVQTYNQLFEENPINASGVDAKAILSARLSKSRRLENLIAQLPGEKKNGLFGNLIALSLGLTPNFKSNFDLAEDAKLQLSKDTYDDDLDNLLAQIGDQYADLFLAAKNLSDAILLSDILRVNTEITKAPLSASMIKRYDEHHQDLTLLKALVRQQLPEKYKEIFFDQSKNGYAGYIDGGASQEEFYKFIKPILEKMDGTEELLVKLNREDLLRKQRTFDNGSIPHQIHLGELHAILRRQEDFYPFLKDNREKIEKILTFRIPYYVGPLARGNSRFAWMTRKSEETITPWNFEEVVDKGASAQSFIERMTNFDKNLPNEKVLPKHSLLYEYFTVYNELTKVKYVTEGMRKPAFLSGEQKKAIVDLLFKTNRKVTVKQLKEDYFKKIECFDSVEISGVEDRFNASLGTYHDLLKIIKDKDFLDNEENEDILEDIVLTLTLFEDREMIEERLKTYAHLFDDKVMKQLKRRRYTGWGRLSRKLINGIRDKQSGKTILDFLKSDGFANRNFMQLIHDDSLTFKEDIQKAQVSGQGDSLHEHIANLAGSPAIKKGILQTVKVVDELVKVMGRHKPENIVIEMARENQTTQKGQKNSRERMKRIEEGIKELGSQILKEHPVENTQLQNEKLYLYYLQNGRDMYVDQELDINRLSDYDVDHIVPQSFLKDDSIDNKVLTRSDKARGKSDNVPSEEVVKKMKNYWRQLLNAKLITQRKFDNLTKAERGGLSELDKAGFIKRQLVETRQITKHVAQILDSRMNTKYDENDKLIREVKVITLKSKLVSDFRKDFQFYKVREINNYHHAHDAYLNAVVGTALIKKYPKLESEFVYGDYKVYDVRKMIAKSEQEIGKATAKYFFYSNIMNFFKTEITLANGEIRKRPLIETNGETGEIVWDKGRDFATVRKVLSMPQVNIVKKTEVQTGGFSKESILPKRNSDKLIARKKDWDPKKYGGFDSPTVAYSVLVVAKVEKGKSKKLKSVKELLGITIMERSSFEKNPIDFLEAKGYKEVKKDLIIKLPKYSLFELENGRKRMLASAGELQKGNELALPSKYVNFLYLASHYEKLKGSPEDNEQKQLFVEQHKHYLDEIIEQISEFSKRVILADANLDKVLSAYNKHRDKPIREQAENIIHLFTLTNLGAPAAFKYFDTTIDRKRYTSTKEVLDATLIHQSITGLYETRIDLSQLGGDGGGGGPAPGSSGGMNPLQLLQPLPAEVKGTKLLAHWNSGATITCIPESFLEDEQPIKQTLIKTIHGEKQQNVYYLTFKVKGRKVEAEVIASPYEYILLSPTDVPWLTQQPLQLTILVPLQEYQDRILNKTALPEEQKQQLKALFTKYDNLWQHWENQVGHRKIRPHNIATGDYPPRPQKQYPINPKAKPSIQIVIDDLLKQGVLTPQNSTMNTPVYPVPKPDGRWRMVLDYREVNKTIPLTAAQNQHSAGILATIVRQKYKTTLDLANGFWAHPITPDSYWLTAFTWQGKQYCWTRLPQGFLNSPALFNADAVDLLKEVPNVQVYVDDIYLSHDNPHEHIQQLEKVFQILLQAGYVVSLKKSEIGQRTVEFLGFNITKEGRGLTDTFKTKLLNVTPPKDLKQLQSILGLLNFARNFIPNFAELVQTLYNLIASSPGKYIEWTEDNTKQLNKVIEALNTASNLEERLPDQRLVIKVNTSPSAGYVRYYNESGKKPIMYLNYVFSKAELKFSMLEKLLTTMHKALIKAMDLAMGQEILVYSPIVSMTKIQKTPLPERKALPIRWITWMTYLEDPRIQFHYDKTLPELKHIPDVYTSSIPPLKHPSQYEGVFCTDGSAIKSPDPTKSNNAGMGIVHAIYNPEYKILNQWSIPLGHHTAQMAEIAAVEFACKKALKVPGPVLVITDSFYVAESANKELPYWKSNGFVNNKKEPLKHISKWKSIAECLSIKPDITIQHEKGHQPINTSIHTEGNALADKLATQGSYVVNAGKRTADGSEFEKRTADGSEFESPKKKAKVE

SEQ ID NO: 709 - protein, 2176 aa, synthetic construct
MPAAKRVKLDGGDKKYSIGLDIGTNSVGWAVITDEYKVPSKKFKVLGNTDRHSIKKNLIGALLFDSGETAEATRLKRTARRRYTRRKNRICYLQEIFSNEMAKVDDSFFHRLEESFLVEEDKKHERHPIFGNIVDEVAYHEKYPTIYHLRKKLVDSTDKADLRLIYLALAHMIKFRGHFLIEGDLNPDNSDVDKLFIQLVQTYNQLFEENPINASGVDAKAILSARLSKSRRLENLIAQLPGEKKNGLFGNLIALSLGLTPNFKSNFDLAEDAKLQLSKDTYDDDLDNLLAQIGDQYADLFLAAKNLSDAILLSDILRVNTEITKAPLSASMIKRYDEHHQDLTLLKALVRQQLPEKYKEIFFDQSKNGYAGYIDGGASQEEFYKFIKPILEKMDGTEELLVKLNREDLLRKQRTFDNGSIPHQIHLGELHAILRRQEDFYPFLKDNREKIEKILTFRIPYYVGPLARGNSRFAWMTRKSEETITPWNFEEVVDKGASAQSFIERMTNFDKNLPNEKVLPKHSLLYEYFTVYNELTKVKYVTEGMRKPAFLSGEQKKAIVDLLFKTNRKVTVKQLKEDYFKKIECFDSVEISGVEDRFNASLGTYHDLLKIIKDKDFLDNEENEDILEDIVLTLTLFEDREMIEERLKTYAHLFDDKVMKQLKRRRYTGWGRLSRKLINGIRDKQSGKTILDFLKSDGFANRNFMQLIHDDSLTFKEDIQKAQVSGQGDSLHEHIANLAGSPAIKKGILQTVKVVDELVKVMGRHKPENIVIEMARENQTTQKGQKNSRERMKRIEEGIKELGSQILKEHPVENTQLQNEKLYLYYLQNGRDMYVDQELDINRLSDYDVDHIVPQSFLKDDSIDNKVLTRSDKARGKSDNVPSEEVVKKMKNYWRQLLNAKLITQRKFDNLTKAERGGLSELDKAGFIKRQLVETRQITKHVAQILDSRMNTKYDENDKLIREVKVITLKSKLVSDFRKDFQFYKVREINNYHHAHDAYLNAVVGTALIKKYPKLESEFVYGDYKVYDVRKMIAKSEQEIGKATAKYFFYSNIMNFFKTEITLANGEIRKRPLIETNGETGEIVWDKGRDFATVRKVLSMPQVNIVKKTEVQTGGFSKESILPKRNSDKLIARKKDWDPKKYGGFDSPTVAYSVLVVAKVEKGKSKKLKSVKELLGITIMERSSFEKNPIDFLEAKGYKEVKKDLIIKLPKYSLFELENGRKRMLASAGELQKGNELALPSKYVNFLYLASHYEKLKGSPEDNEQKQLFVEQHKHYLDEIIEQISEFSKRVILADANLDKVLSAYNKHRDKPIREQAENIIHLFTLTNLGAPAAFKYFDTTIDRKRYTSTKEVLDATLIHQSITGLYETRIDLSQLGGDGGPAPEAAAKGSSGGMNPLQLLQPLPAEVKGTKLLAHWNSGATITCIPESFLEDEQPIKQTLIKTIHGEKQQNVYYLTFKVKGRKVEAEVIASPYEYILLSPTDVPWLTQQPLQLTILVPLQEYQDRILNKTALPEEQKQQLKALFTKYDNLWQHWENQVGHRKIRPHNIATGDYPPRPQKQYPINPKAKPSIQIVIDDLLKQGVLTPQNSTMNTPVYPVPKPDGRWRMVLDYREVNKTIPLTAAQNQHSAGILATIVRQKYKTTLDLANGFWAHPITPDSYWLTAFTWQGKQYCWTRLPQGFLNSPALFNADAVDLLKEVPNVQVYVDDIYLSHDNPHEHIQQLEKVFQILLQAGYVVSLKKSEIGQRTVEFLGFNITKEGRGLTDTFKTKLLNVTPPKDLKQLQSILGLLNFARNFIPNFAELVQTLYNLIASSPGKYIEWTEDNTKQLNKVIEALNTASNLEERLPDQRLVIKVNTSPSAGYVRYYNESGKKPIMYLNYVFSKAELKFSMLEKLLTTMHKALIKAMDLAMGQEILVYSPIVSMTKIQKTPLPERKALPIRWITWMTYLEDPRIQFHYDKTLPELKHIPDVYTSSIPPLKHPSQYEGVFCTDGSAIKSPDPTKSNNAGMGIVHAIYNPEYKILNQWSIPLGHHTAQMAEIAAVEFACKKALKVPGPVLVITDSFYVAESANKELPYWKSNGFVNNKKEPLKHISKWKSIAECLSIKPDITIQHEKGHQPINTSIHTEGNALADKLATQGSYVVNAGKRTADGSEFEKRTADGSEFESPKKKAKVE

SEQ ID NO: 710 - protein, 2171 aa, synthetic construct
MPAAKRVKLDGGDKKYSIGLDIGTNSVGWAVITDEYKVPSKKFKVLGNTDRHSIKKNLIGALLFDSGETAEATRLKRTARRRYTRRKNRICYLQEIFSNEMAKVDDSFFHRLEESFLVEEDKKHERHPIFGNIVDEVAYHEKYPTIYHLRKKLVDSTDKADLRLIYLALAHMIKFRGHFLIEGDLNPDNSDVDKLFIQLVQTYNQLFEENPINASGVDAKAILSARLSKSRRLENLIAQLPGEKKNGLFGNLIALSLGLTPNFKSNFDLAEDAKLQLSKDTYDDDLDNLLAQIGDQYADLFLAAKNLSDAILLSDILRVNTEITKAPLSASMIKRYDEHHQDLTLLKALVRQQLPEKYKEIFFDQSKNGYAGYIDGGASQEEFYKFIKPILEKMDGTEELLVKLNREDLLRKQRTFDNGSIPHQIHLGELHAILRRQEDFYPFLKDNREKIEKILTFRIPYYVGPLARGNSRFAWMTRKSEETITPWNFEEVVDKGASAQSFIERMTNFDKNLPNEKVLPKHSLLYEYFTVYNELTKVKYVTEGMRKPAFLSGEQKKAIVDLLFKTNRKVTVKQLKEDYFKKIECFDSVEISGVEDRFNASLGTYHDLLKIIKDKDFLDNEENEDILEDIVLTLTLFEDREMIEERLKTYAHLFDDKVMKQLKRRRYTGWGRLSRKLINGIRDKQSGKTILDFLKSDGFANRNFMQLIHDDSLTFKEDIQKAQVSGQGDSLHEHIANLAGSPAIKKGILQTVKVVDELVKVMGRHKPENIVIEMARENQTTQKGQKNSRERMKRIEEGIKELGSQILKEHPVENTQLQNEKLYLYYLQNGRDMYVDQELDINRLSDYDVDHIVPQSFLKDDSIDNKVLTRSDKARGKSDNVPSEEVVKKMKNYWRQLLNAKLITQRKFDNLTKAERGGLSELDKAGFIKRQLVETRQITKHVAQILDSRMNTKYDENDKLIREVKVITLKSKLVSDFRKDFQFYKVREINNYHHAHDAYLNAVVGTALIKKYPKLESEFVYGDYKVYDVRKMIAKSEQEIGKATAKYFFYSNIMNFFKTEITLANGEIRKRPLIETNGETGEIVWDKGRDFATVRKVLSMPQVNIVKKTEVQTGGFSKESILPKRNSDKLIARKKDWDPKKYGGFDSPTVAYSVLVVAKVEKGKSKKLKSVKELLGITIMERSSFEKNPIDFLEAKGYKEVKKDLIIKLPKYSLFELENGRKRMLASAGELQKGNELALPSKYVNFLYLASHYEKLKGSPEDNEQKQLFVEQHKHYLDEIIEQISEFSKRVILADANLDKVLSAYNKHRDKPIREQAENIIHLFTLTNLGAPAAFKYFDTTIDRKRYTSTKEVLDATLIHQSITGLYETRIDLSQLGGDGGGGGGSSGGMNPLQLLQPLPAEVKGTKLLAHWNSGATITCIPESFLEDEQPIKQTLIKTIHGEKQQNVYYLTFKVKGRKVEAEVIASPYEYILLSPTDVPWLTQQPLQLTILVPLQEYQDRILNKTALPEEQKQQLKALFTKYDNLWQHWENQVGHRKIRPHNIATGDYPPRPQKQYPINPKAKPSIQIVIDDLLKQGVLTPQNSTMNTPVYPVPKPDGRWRMVLDYREVNKTIPLTAAQNQHSAGILATIVRQKYKTTLDLANGFWAHPITPDSYWLTAFTWQGKQYCWTRLPQGFLNSPALFNADAVDLLKEVPNVQVYVDDIYLSHDNPHEHIQQLEKVFQILLQAGYVVSLKKSEIGQRTVEFLGFNITKEGRGLTDTFKTKLLNVTPPKDLKQLQSILGLLNFARNFIPNFAELVQTLYNLIASSPGKYIEWTEDNTKQLNKVIEALNTASNLEERLPDQRLVIKVNTSPSAGYVRYYNESGKKPIMYLNYVFSKAELKFSMLEKLLTTMHKALIKAMDLAMGQEILVYSPIVSMTKIQKTPLPERKALPIRWITWMTYLEDPRIQFHYDKTLPELKHIPDVYTSSIPPLKHPSQYEGVFCTDGSAIKSPDPTKSNNAGMGIVHAIYNPEYKILNQWSIPLGHHTAQMAEIAAVEFACKKALKVPGPVLVITDSFYVAESANKELPYWKSNGFVNNKKEPLKHISKWKSIAECLSIKPDITIQHEKGHQPINTSIHTEGNALADKLATQGSYVVNAGKRTADGSEFEKRTADGSEFESPKKKAKVE

SEQ ID NO: 711 - protein, 2174 aa, synthetic construct
MPAAKRVKLDGGDKKYSIGLDIGTNSVGWAVITDEYKVPSKKFKVLGNTDRHSIKKNLIGALLFDSGETAEATRLKRTARRRYTRRKNRICYLQEIFSNEMAKVDDSFFHRLEESFLVEEDKKHERHPIFGNIVDEVAYHEKYPTIYHLRKKLVDSTDKADLRLIYLALAHMIKFRGHFLIEGDLNPDNSDVDKLFIQLVQTYNQLFEENPINASGVDAKAILSARLSKSRRLENLIAQLPGEKKNGLFGNLIALSLGLTPNFKSNFDLAEDAKLQLSKDTYDDDLDNLLAQIGDQYADLFLAAKNLSDAILLSDILRVNTEITKAPLSASMIKRYDEHHQDLTLLKALVRQQLPEKYKEIFFDQSKNGYAGYIDGGASQEEFYKFIKPILEKMDGTEELLVKLNREDLLRKQRTFDNGSIPHQIHLGELHAILRRQEDFYPFLKDNREKIEKILTFRIPYYVGPLARGNSRFAWMTRKSEETITPWNFEEVVDKGASAQSFIERMTNFDKNLPNEKVLPKHSLLYEYFTVYNELTKVKYVTEGMRKPAFLSGEQKKAIVDLLFKTNRKVTVKQLKEDYFKKIECFDSVEISGVEDRFNASLGTYHDLLKIIKDKDFLDNEENEDILEDIVLTLTLFEDREMIEERLKTYAHLFDDKVMKQLKRRRYTGWGRLSRKLINGIRDKQSGKTILDFLKSDGFANRNFMQLIHDDSLTFKEDIQKAQVSGQGDSLHEHIANLAGSPAIKKGILQTVKVVDELVKVMGRHKPENIVIEMARENQTTQKGQKNSRERMKRIEEGIKELGSQILKEHPVENTQLQNEKLYLYYLQNGRDMYVDQELDINRLSDYDVDHIVPQSFLKDDSIDNKVLTRSDKARGKSDNVPSEEVVKKMKNYWRQLLNAKLITQRKFDNLTKAERGGLSELDKAGFIKRQLVETRQITKHVAQILDSRMNTKYDENDKLIREVKVITLKSKLVSDFRKDFQFYKVREINNYHHAHDAYLNAVVGTALIKKYPKLESEFVYGDYKVYDVRKMIAKSEQEIGKATAKYFFYSNIMNFFKTEITLANGEIRKRPLIETNGETGEIVWDKGRDFATVRKVLSMPQVNIVKKTEVQTGGFSKESILPKRNSDKLIARKKDWDPKKYGGFDSPTVAYSVLVVAKVEKGKSKKLKSVKELLGITIMERSSFEKNPIDFLEAKGYKEVKKDLIIKLPKYSLFELENGRKRMLASAGELQKGNELALPSKYVNFLYLASHYEKLKGSPEDNEQKQLFVEQHKHYLDEIIEQISEFSKRVILADANLDKVLSAYNKHRDKPIREQAENIIHLFTLTNLGAPAAFKYFDTTIDRKRYTSTKEVLDATLIHQSITGLYETRIDLSQLGGDGGGSSGGGGGSGGMNPLQLLQPLPAEVKGTKLLAHWNSGATITCIPESFLEDEQPIKQTLIKTIHGEKQQNVYYLTFKVKGRKVEAEVIASPYEYILLSPTDVPWLTQQPLQLTILVPLQEYQDRILNKTALPEEQKQQLKALFTKYDNLWQHWENQVGHRKIRPHNIATGDYPPRPQKQYPINPKAKPSIQIVIDDLLKQGVLTPQNSTMNTPVYPVPKPDGRWRMVLDYREVNKTIPLTAAQNQHSAGILATIVRQKYKTTLDLANGFWAHPITPDSYWLTAFTWQGKQYCWTRLPQGFLNSPALFNADAVDLLKEVPNVQVYVDDIYLSHDNPHEHIQQLEKVFQILLQAGYVVSLKKSEIGQRTVEFLGFNITKEGRGLTDTFKTKLLNVTPPKDLKQLQSILGLLNFARNFIPNFAELVQTLYNLIASSPGKYIEWTEDNTKQLNKVIEALNTASNLEERLPDQRLVIKVNTSPSAGYVRYYNESGKKPIMYLNYVFSKAELKFSMLEKLLTTMHKALIKAMDLAMGQEILVYSPIVSMTKIQKTPLPERKALPIRWITWMTYLEDPRIQFHYDKTLPELKHIPDVYTSSIPPLKHPSQYEGVFCTDGSAIKSPDPTKSNNAGMGIVHAIYNPEYKILNQWSIPLGHHTAQMAEIAAVEFACKKALKVPGPVLVITDSFYVAESANKELPYWKSNGFVNNKKEPLKHISKWKSIAECLSIKPDITIQHEKGHQPINTSIHTEGNALADKLATQGSYVVNAGKRTADGSEFEKRTADGSEFESPKKKAKVE

SEQ ID NO: 712 - protein, 2176 aa, synthetic construct
MPAAKRVKLDGGDKKYSIGLDIGTNSVGWAVITDEYKVPSKKFKVLGNTDRHSIKKNLIGALLFDSGETAEATRLKRTARRRYTRRKNRICYLQEIFSNEMAKVDDSFFHRLEESFLVEEDKKHERHPIFGNIVDEVAYHEKYPTIYHLRKKLVDSTDKADLRLIYLALAHMIKFRGHFLIEGDLNPDNSDVDKLFIQLVQTYNQLFEENPINASGVDAKAILSARLSKSRRLENLIAQLPGEKKNGLFGNLIALSLGLTPNFKSNFDLAEDAKLQLSKDTYDDDLDNLLAQIGDQYADLFLAAKNLSDAILLSDILRVNTEITKAPLSASMIKRYDEHHQDLTLLKALVRQQLPEKYKEIFFDQSKNGYAGYIDGGASQEEFYKFIKPILEKMDGTEELLVKLNREDLLRKQRTFDNGSIPHQIHLGELHAILRRQEDFYPFLKDNREKIEKILTFRIPYYVGPLARGNSRFAWMTRKSEETITPWNFEEVVDKGASAQSFIERMTNFDKNLPNEKVLPKHSLLYEYFTVYNELTKVKYVTEGMRKPAFLSGEQKKAIVDLLFKTNRKVTVKQLKEDYFKKIECFDSVEISGVEDRFNASLGTYHDLLKIIKDKDFLDNEENEDILEDIVLTLTLFEDREMIEERLKTYAHLFDDKVMKQLKRRRYTGWGRLSRKLINGIRDKQSGKTILDFLKSDGFANRNFMQLIHDDSLTFKEDIQKAQVSGQGDSLHEHIANLAGSPAIKKGILQTVKVVDELVKVMGRHKPENIVIEMARENQTTQKGQKNSRERMKRIEEGIKELGSQILKEHPVENTQLQNEKLYLYYLQNGRDMYVDQELDINRLSDYDVDHIVPQSFLKDDSIDNKVLTRSDKARGKSDNVPSEEVVKKMKNYWRQLLNAKLITQRKFDNLTKAERGGLSELDKAGFIKRQLVETRQITKHVAQILDSRMNTKYDENDKLIREVKVITLKSKLVSDFRKDFQFYKVREINNYHHAHDAYLNAVVGTALIKKYPKLESEFVYGDYKVYDVRKMIAKSEQEIGKATAKYFFYSNIMNFFKTEITLANGEIRKRPLIETNGETGEIVWDKGRDFATVRKVLSMPQVNIVKKTEVQTGGFSKESILPKRNSDKLIARKKDWDPKKYGGFDSPTVAYSVLVVAKVEKGKSKKLKSVKELLGITIMERSSFEKNPIDFLEAKGYKEVKKDLIIKLPKYSLFELENGRKRMLASAGELQKGNELALPSKYVNFLYLASHYEKLKGSPEDNEQKQLFVEQHKHYLDEIIEQISEFSKRVILADANLDKVLSAYNKHRDKPIREQAENIIHLFTLTNLGAPAAFKYFDTTIDRKRYTSTKEVLDATLIHQSITGLYETRIDLSQLGGDGGGSSGGSEAAAKGGMNPLQLLQPLPAEVKGTKLLAHWNSGATITCIPESFLEDEQPIKQTLIKTIHGEKQQNVYYLTFKVKGRKVEAEVIASPYEYILLSPTDVPWLTQQPLQLTILVPLQEYQDRILNKTALPEEQKQQLKALFTKYDNLWQHWENQVGHRKIRPHNIATGDYPPRPQKQYPINPKAKPSIQIVIDDLLKQGVLTPQNSTMNTPVYPVPKPDGRWRMVLDYREVNKTIPLTAAQNQHSAGILATIVRQKYKTTLDLANGFWAHPITPDSYWLTAFTWQGKQYCWTRLPQGFLNSPALFNADAVDLLKEVPNVQVYVDDIYLSHDNPHEHIQQLEKVFQILLQAGYVVSLKKSEIGQRTVEFLGFNITKEGRGLTDTFKTKLLNVTPPKDLKQLQSILGLLNFARNFIPNFAELVQTLYNLIASSPGKYIEWTEDNTKQLNKVIEALNTASNLEERLPDQRLVIKVNTSPSAGYVRYYNESGKKPIMYLNYVFSKAELKFSMLEKLLTTMHKALIKAMDLAMGQEILVYSPIVSMTKIQKTPLPERKALPIRWITWMTYLEDPRIQFHYDKTLPELKHIPDVYTSSIPPLKHPSQYEGVFCTDGSAIKSPDPTKSNNAGMGIVHAIYNPEYKILNQWSIPLGHHTAQMAEIAAVEFACKKALKVPGPVLVITDSFYVAESANKELPYWKSNGFVNNKKEPLKHISKWKSIAECLSIKPDITIQHEKGHQPINTSIHTEGNALADKLATQGSYVVNAGKRTADGSEFEKRTADGSEFESPKKKAKVE

SEQ ID NO: 713 - protein, 2181 aa, synthetic construct
MPAAKRVKLDGGDKKYSIGLDIGTNSVGWAVITDEYKVPSKKFKVLGNTDRHSIKKNLIGALLFDSGETAEATRLKRTARRRYTRRKNRICYLQEIFSNEMAKVDDSFFHRLEESFLVEEDKKHERHPIFGNIVDEVAYHEKYPTIYHLRKKLVDSTDKADLRLIYLALAHMIKFRGHFLIEGDLNPDNSDVDKLFIQLVQTYNQLFEENPINASGVDAKAILSARLSKSRRLENLIAQLPGEKKNGLFGNLIALSLGLTPNFKSNFDLAEDAKLQLSKDTYDDDLDNLLAQIGDQYADLFLAAKNLSDAILLSDILRVNTEITKAPLSASMIKRYDEHHQDLTLLKALVRQQLPEKYKEIFFDQSKNGYAGYIDGGASQEEFYKFIKPILEKMDGTEELLVKLNREDLLRKQRTFDNGSIPHQIHLGELHAILRRQEDFYPFLKDNREKIEKILTFRIPYYVGPLARGNSRFAWMTRKSEETITPWNFEEVVDKGASAQSFIERMTNFDKNLPNEKVLPKHSLLYEYFTVYNELTKVKYVTEGMRKPAFLSGEQKKAIVDLLFKTNRKVTVKQLKEDYFKKIECFDSVEISGVEDRFNASLGTYHDLLKIIKDKDFLDNEENEDILEDIVLTLTLFEDREMIEERLKTYAHLFDDKVMKQLKRRRYTGWGRLSRKLINGIRDKQSGKTILDFLKSDGFANRNFMQLIHDDSLTFKEDIQKAQVSGQGDSLHEHIANLAGSPAIKKGILQTVKVVDELVKVMGRHKPENIVIEMARENQTTQKGQKNSRERMKRIEEGIKELGSQILKEHPVENTQLQNEKLYLYYLQNGRDMYVDQELDINRLSDYDVDHIVPQSFLKDDSIDNKVLTRSDKARGKSDNVPSEEVVKKMKNYWRQLLNAKLITQRKFDNLTKAERGGLSELDKAGFIKRQLVETRQITKHVAQILDSRMNTKYDENDKLIREVKVITLKSKLVSDFRKDFQFYKVREINNYHHAHDAYLNAVVGTALIKKYPKLESEFVYGDYKVYDVRKMIAKSEQEIGKATAKYFFYSNIMNFFKTEITLANGEIRKRPLIETNGETGEIVWDKGRDFATVRKVLSMPQVNIVKKTEVQTGGFSKESILPKRNSDKLIARKKDWDPKKYGGFDSPTVAYSVLVVAKVEKGKSKKLKSVKELLGITIMERSSFEKNPIDFLEAKGYKEVKKDLIIKLPKYSLFELENGRKRMLASAGELQKGNELALPSKYVNFLYLASHYEKLKGSPEDNEQKQLFVEQHKHYLDEIIEQISEFSKRVILADANLDKVLSAYNKHRDKPIREQAENIIHLFTLTNLGAPAAFKYFDTTIDRKRYTSTKEVLDATLIHQSITGLYETRIDLSQLGGDGGSGSETPGTSESATPESGGMNPLQLLQPLPAEVKGTKLLAHWNSGATITCIPESFLEDEQPIKQTLIKTIHGEKQQNVYYLTFKVKGRKVEAEVIASPYEYILLSPTDVPWLTQQPLQLTILVPLQEYQDRILNKTALPEEQKQQLKALFTKYDNLWQHWENQVGHRKIRPHNIATGDYPPRPQKQYPINPKAKPSIQIVIDDLLKQGVLTPQNSTMNTPVYPVPKPDGRWRMVLDYREVNKTIPLTAAQNQHSAGILATIVRQKYKTTLDLANGFWAHPITPDSYWLTAFTWQGKQYCWTRLPQGFLNSPALFNADAVDLLKEVPNVQVYVDDIYLSHDNPHEHIQQLEKVFQILLQAGYVVSLKKSEIGQRTVEFLGFNITKEGRGLTDTFKTKLLNVTPPKDLKQLQSILGLLNFARNFIPNFAELVQTLYNLIASSPGKYIEWTEDNTKQLNKVIEALNTASNLEERLPDQRLVIKVNTSPSAGYVRYYNESGKKPIMYLNYVFSKAELKFSMLEKLLTTMHKALIKAMDLAMGQEILVYSPIVSMTKIQKTPLPERKALPIRWITWMTYLEDPRIQFHYDKTLPELKHIPDVYTSSIPPLKHPSQYEGVFCTDGSAIKSPDPTKSNNAGMGIVHAIYNPEYKILNQWSIPLGHHTAQMAEIAAVEFACKKALKVPGPVLVITDSFYVAESANKELPYWKSNGFVNNKKEPLKHISKWKSIAECLSIKPDITIQHEKGHQPINTSIHTEGNALADKLATQGSYVVNAGKRTADGSEFEKRTADGSEFESPKKKAKVE

SEQ ID NO: 714 - protein, 2176 aa, synthetic construct
MPAAKRVKLDGGDKKYSIGLDIGTNSVGWAVITDEYKVPSKKFKVLGNTDRHSIKKNLIGALLFDSGETAEATRLKRTARRRYTRRKNRICYLQEIFSNEMAKVDDSFFHRLEESFLVEEDKKHERHPIFGNIVDEVAYHEKYPTIYHLRKKLVDSTDKADLRLIYLALAHMIKFRGHFLIEGDLNPDNSDVDKLFIQLVQTYNQLFEENPINASGVDAKAILSARLSKSRRLENLIAQLPGEKKNGLFGNLIALSLGLTPNFKSNFDLAEDAKLQLSKDTYDDDLDNLLAQIGDQYADLFLAAKNLSDAILLSDILRVNTEITKAPLSASMIKRYDEHHQDLTLLKALVRQQLPEKYKEIFFDQSKNGYAGYIDGGASQEEFYKFIKPILEKMDGTEELLVKLNREDLLRKQRTFDNGSIPHQIHLGELHAILRRQEDFYPFLKDNREKIEKILTFRIPYYVGPLARGNSRFAWMTRKSEETITPWNFEEVVDKGASAQSFIERMTNFDKNLPNEKVLPKHSLLYEYFTVYNELTKVKYVTEGMRKPAFLSGEQKKAIVDLLFKTNRKVTVKQLKEDYFKKIECFDSVEISGVEDRFNASLGTYHDLLKIIKDKDFLDNEENEDILEDIVLTLTLFEDREMIEERLKTYAHLFDDKVMKQLKRRRYTGWGRLSRKLINGIRDKQSGKTILDFLKSDGFANRNFMQLIHDDSLTFKEDIQKAQVSGQGDSLHEHIANLAGSPAIKKGILQTVKVVDELVKVMGRHKPENIVIEMARENQTTQKGQKNSRERMKRIEEGIKELGSQILKEHPVENTQLQNEKLYLYYLQNGRDMYVDQELDINRLSDYDVDHIVPQSFLKDDSIDNKVLTRSDKARGKSDNVPSEEVVKKMKNYWRQLLNAKLITQRKFDNLTKAERGGLSELDKAGFIKRQLVETRQITKHVAQILDSRMNTKYDENDKLIREVKVITLKSKLVSDFRKDFQFYKVREINNYHHAHDAYLNAVVGTALIKKYPKLESEFVYGDYKVYDVRKMIAKSEQEIGKATAKYFFYSNIMNFFKTEITLANGEIRKRPLIETNGETGEIVWDKGRDFATVRKVLSMPQVNIVKKTEVQTGGFSKESILPKRNSDKLIARKKDWDPKKYGGFDSPTVAYSVLVVAKVEKGKSKKLKSVKELLGITIMERSSFEKNPIDFLEAKGYKEVKKDLIIKLPKYSLFELENGRKRMLASAGELQKGNELALPSKYVNFLYLASHYEKLKGSPEDNEQKQLFVEQHKHYLDEIIEQISEFSKRVILADANLDKVLSAYNKHRDKPIREQAENIIHLFTLTNLGAPAAFKYFDTTIDRKRYTSTKEVLDATLIHQSITGLYETRIDLSQLGGDGGGGSEAAAKPAPGGMNPLQLLQPLPAEVKGTKLLAHWNSGATITCIPESFLEDEQPIKQTLIKTIHGEKQQNVYYLTFKVKGRKVEAEVIASPYEYILLSPTDVPWLTQQPLQLTILVPLQEYQDRILNKTALPEEQKQQLKALFTKYDNLWQHWENQVGHRKIRPHNIATGDYPPRPQKQYPINPKAKPSIQIVIDDLLKQGVLTPQNSTMNTPVYPVPKPDGRWRMVLDYREVNKTIPLTAAQNQHSAGILATIVRQKYKTTLDLANGFWAHPITPDSYWLTAFTWQGKQYCWTRLPQGFLNSPALFNADAVDLLKEVPNVQVYVDDIYLSHDNPHEHIQQLEKVFQILLQAGYVVSLKKSEIGQRTVEFLGFNITKEGRGLTDTFKTKLLNVTPPKDLKQLQSILGLLNFARNFIPNFAELVQTLYNLIASSPGKYIEWTEDNTKQLNKVIEALNTASNLEERLPDQRLVIKVNTSPSAGYVRYYNESGKKPIMYLNYVFSKAELKFSMLEKLLTTMHKALIKAMDLAMGQEILVYSPIVSMTKIQKTPLPERKALPIRWITWMTYLEDPRIQFHYDKTLPELKHIPDVYTSSIPPLKHPSQYEGVFCTDGSAIKSPDPTKSNNAGMGIVHAIYNPEYKILNQWSIPLGHHTAQMAEIAAVEFACKKALKVPGPVLVITDSFYVAESANKELPYWKSNGFVNNKKEPLKHISKWKSIAECLSIKPDITIQHEKGHQPINTSIHTEGNALADKLATQGSYVVNAGKRTADGSEFEKRTADGSEFESPKKKAKVE

SEQ ID NO: 715 - protein, 2208 aa, synthetic construct
MPAAKRVKLDGGDKKYSIGLDIGTNSVGWAVITDEYKVPSKKFKVLGNTDRHSIKKNLIGALLFDSGETAEATRLKRTARRRYTRRKNRICYLQEIFSNEMAKVDDSFFHRLEESFLVEEDKKHERHPIFGNIVDEVAYHEKYPTIYHLRKKLVDSTDKADLRLIYLALAHMIKFRGHFLIEGDLNPDNSDVDKLFIQLVQTYNQLFEENPINASGVDAKAILSARLSKSRRLENLIAQLPGEKKNGLFGNLIALSLGLTPNFKSNFDLAEDAKLQLSKDTYDDDLDNLLAQIGDQYADLFLAAKNLSDAILLSDILRVNTEITKAPLSASMIKRYDEHHQDLTLLKALVRQQLPEKYKEIFFDQSKNGYAGYIDGGASQEEFYKFIKPILEKMDGTEELLVKLNREDLLRKQRTFDNGSIPHQIHLGELHAILRRQEDFYPFLKDNREKIEKILTFRIPYYVGPLARGNSRFAWMTRKSEETITPWNFEEVVDKGASAQSFIERMTNFDKNLPNEKVLPKHSLLYEYFTVYNELTKVKYVTEGMRKPAFLSGEQKKAIVDLLFKTNRKVTVKQLKEDYFKKIECFDSVEISGVEDRFNASLGTYHDLLKIIKDKDFLDNEENEDILEDIVLTLTLFEDREMIEERLKTYAHLFDDKVMKQLKRRRYTGWGRLSRKLINGIRDKQSGKTILDFLKSDGFANRNFMQLIHDDSLTFKEDIQKAQVSGQGDSLHEHIANLAGSPAIKKGILQTVKVVDELVKVMGRHKPENIVIEMARENQTTQKGQKNSRERMKRIEEGIKELGSQILKEHPVENTQLQNEKLYLYYLQNGRDMYVDQELDINRLSDYDVDHIVPQSFLKDDSIDNKVLTRSDKARGKSDNVPSEEVVKKMKNYWRQLLNAKLITQRKFDNLTKAERGGLSELDKAGFIKRQLVETRQITKHVAQILDSRMNTKYDENDKLIREVKVITLKSKLVSDFRKDFQFYKVREINNYHHAHDAYLNAVVGTALIKKYPKLESEFVYGDYKVYDVRKMIAKSEQEIGKATAKYFFYSNIMNFFKTEITLANGEIRKRPLIETNGETGEIVWDKGRDFATVRKVLSMPQVNIVKKTEVQTGGFSKESILPKRNSDKLIARKKDWDPKKYGGFDSPTVAYSVLVVAKVEKGKSKKLKSVKELLGITIMERSSFEKNPIDFLEAKGYKEVKKDLIIKLPKYSLFELENGRKRMLASAGELQKGNELALPSKYVNFLYLASHYEKLKGSPEDNEQKQLFVEQHKHYLDEIIEQISEFSKRVILADANLDKVLSAYNKHRDKPIREQAENIIHLFTLTNLGAPAAFKYFDTTIDRKRYTSTKEVLDATLIHQSITGLYETRIDLSQLGGDGGAEAAAKEAAAKEAAAKEAAAKALEAEAAAKEAAAKEAAAKEAAAKAGGMDLLKPLTVERKGVKIKGYWNSQADITCVPKDLLQGEEPVRQQNVTTIHGTQEGDVYYVNLKIDGRRINTEVIGTTLDYAIITPGDVPWILKKPLELTIKLDLEEQQGTLLNNSILSKKGKEELKQLFEKYSALWQSWENQVGHRRIRPHKIATGTVKPTPQKQYHINPKAKPDIQIVINDLLKQGVLIQKESTMNTPVYPVPKPNGRWRMVLDYRAVNKVTPLIAVQNQHSYGILGSLFKGRYKTTIDLSNGFWAHPIVPEDYWITAFTWQGKQYCWTVLPQGFLNSPGLFTGDVVDLLQGIPNVEVYVDDVYISHDSEKEHLEYLDILFNRLKEAGYIISLKKSNIANSIVDFLGFQITNEGRGLTDTFKEKLENITAPTTLKQLQSILGLLNFARNFIPDFTELIAPLYALIPKSTKNYVPWQIEHSTTLETLITKLNGAEYLQGRKGDKTLIMKVNASYTTGYIRYYNEGEKKPISYVSIVFSKTELKFTELEKLLTTVHKGLLKALDLSMGQNIHVYSPIVSMQNIQKTPQTAKKALASRWLSWLSYLEDPRIRFFYDPQMPALKDLPAVDTGKDNKKHPSNFQHIFYTDGSAITSPTKEGHLNAGMGIVYFINKDGNLQKQQEWSISLGNHTAQFAEIAAFEFALKKCLPLGGNILVVTDSNYVAKAYNEELDVWASNGFVNNRKKPLKHISKWKSVADLKRLRPDVVVTHEPGHQKLDSSPHAYGNNLADQLATQASFKVHAGKRTADGSEFEKRTADGSEFESPKKKAKVE

SEQ ID NO: 716 - protein, 2192 aa, synthetic construct
MPAAKRVKLDGGDKKYSIGLDIGTNSVGWAVITDEYKVPSKKFKVLGNTDRHSIKKNLIGALLFDSGETAEATRLKRTARRRYTRRKNRICYLQEIFSNEMAKVDDSFFHRLEESFLVEEDKKHERHPIFGNIVDEVAYHEKYPTIYHLRKKLVDSTDKADLRLIYLALAHMIKFRGHFLIEGDLNPDNSDVDKLFIQLVQTYNQLFEENPINASGVDAKAILSARLSKSRRLENLIAQLPGEKKNGLFGNLIALSLGLTPNFKSNFDLAEDAKLQLSKDTYDDDLDNLLAQIGDQYADLFLAAKNLSDAILLSDILRVNTEITKAPLSASMIKRYDEHHQDLTLLKALVRQQLPEKYKEIFFDQSKNGYAGYIDGGASQEEFYKFIKPILEKMDGTEELLVKLNREDLLRKQRTFDNGSIPHQIHLGELHAILRRQEDFYPFLKDNREKIEKILTFRIPYYVGPLARGNSRFAWMTRKSEETITPWNFEEVVDKGASAQSFIERMTNFDKNLPNEKVLPKHSLLYEYFTVYNELTKVKYVTEGMRKPAFLSGEQKKAIVDLLFKTNRKVTVKQLKEDYFKKIECFDSVEISGVEDRFNASLGTYHDLLKIIKDKDFLDNEENEDILEDIVLTLTLFEDREMIEERLKTYAHLFDDKVMKQLKRRRYTGWGRLSRKLINGIRDKQSGKTILDFLKSDGFANRNFMQLIHDDSLTFKEDIQKAQVSGQGDSLHEHIANLAGSPAIKKGILQTVKVVDELVKVMGRHKPENIVIEMARENQTTQKGQKNSRERMKRIEEGIKELGSQILKEHPVENTQLQNEKLYLYYLQNGRDMYVDQELDINRLSDYDVDHIVPQSFLKDDSIDNKVLTRSDKARGKSDNVPSEEVVKKMKNYWRQLLNAKLITQRKFDNLTKAERGGLSELDKAGFIKRQLVETRQITKHVAQILDSRMNTKYDENDKLIREVKVITLKSKLVSDFRKDFQFYKVREINNYHHAHDAYLNAVVGTALIKKYPKLESEFVYGDYKVYDVRKMIAKSEQEIGKATAKYFFYSNIMNFFKTEITLANGEIRKRPLIETNGETGEIVWDKGRDFATVRKVLSMPQVNIVKKTEVQTGGFSKESILPKRNSDKLIARKKDWDPKKYGGFDSPTVAYSVLVVAKVEKGKSKKLKSVKELLGITIMERSSFEKNPIDFLEAKGYKEVKKDLIIKLPKYSLFELENGRKRMLASAGELQKGNELALPSKYVNFLYLASHYEKLKGSPEDNEQKQLFVEQHKHYLDEIIEQISEFSKRVILADANLDKVLSAYNKHRDKPIREQAENIIHLFTLTNLGAPAAFKYFDTTIDRKRYTSTKEVLDATLIHQSITGLYETRIDLSQLGGDGGGGGGSGGGGSGGGGSGGGGSGGGGSGGGGSGGMDLLKPLTVERKGVKIKGYWNSQADITCVPKDLLQGEEPVRQQNVTTIHGTQEGDVYYVNLKIDGRRINTEVIGTTLDYAIITPGDVPWILKKPLELTIKLDLEEQQGTLLNNSILSKKGKEELKQLFEKYSALWQSWENQVGHRRIRPHKIATGTVKPTPQKQYHINPKAKPDIQIVINDLLKQGVLIQKESTMNTPVYPVPKPNGRWRMVLDYRAVNKVTPLIAVQNQHSYGILGSLFKGRYKTTIDLSNGFWAHPIVPEDYWITAFTWQGKQYCWTVLPQGFLNSPGLFTGDVVDLLQGIPNVEVYVDDVYISHDSEKEHLEYLDILFNRLKEAGYIISLKKSNIANSIVDFLGFQITNEGRGLTDTFKEKLENITAPTTLKQLQSILGLLNFARNFIPDFTELIAPLYALIPKSTKNYVPWQIEHSTTLETLITKLNGAEYLQGRKGDKTLIMKVNASYTTGYIRYYNEGEKKPISYVSIVFSKTELKFTELEKLLTTVHKGLLKALDLSMGQNIHVYSPIVSMQNIQKTPQTAKKALASRWLSWLSYLEDPRIRFFYDPQMPALKDLPAVDTGKDNKKHPSNFQHIFYTDGSAITSPTKEGHLNAGMGIVYFINKDGNLQKQQEWSISLGNHTAQFAEIAAFEFALKKCLPLGGNILVVTDSNYVAKAYNEELDVWASNGFVNNRKKPLKHISKWKSVADLKRLRPDVVVTHEPGHQKLDSSPHAYGNNLADQLATQASFKVHAGKRTADGSEFEKRTADGSEFESPKKKAKVE

SEQ ID NO: 717 - protein, 2171 aa, synthetic construct
MPAAKRVKLDGGDKKYSIGLDIGTNSVGWAVITDEYKVPSKKFKVLGNTDRHSIKKNLIGALLFDSGETAEATRLKRTARRRYTRRKNRICYLQEIFSNEMAKVDDSFFHRLEESFLVEEDKKHERHPIFGNIVDEVAYHEKYPTIYHLRKKLVDSTDKADLRLIYLALAHMIKFRGHFLIEGDLNPDNSDVDKLFIQLVQTYNQLFEENPINASGVDAKAILSARLSKSRRLENLIAQLPGEKKNGLFGNLIALSLGLTPNFKSNFDLAEDAKLQLSKDTYDDDLDNLLAQIGDQYADLFLAAKNLSDAILLSDILRVNTEITKAPLSASMIKRYDEHHQDLTLLKALVRQQLPEKYKEIFFDQSKNGYAGYIDGGASQEEFYKFIKPILEKMDGTEELLVKLNREDLLRKQRTFDNGSIPHQIHLGELHAILRRQEDFYPFLKDNREKIEKILTFRIPYYVGPLARGNSRFAWMTRKSEETITPWNFEEVVDKGASAQSFIERMTNFDKNLPNEKVLPKHSLLYEYFTVYNELTKVKYVTEGMRKPAFLSGEQKKAIVDLLFKTNRKVTVKQLKEDYFKKIECFDSVEISGVEDRFNASLGTYHDLLKIIKDKDFLDNEENEDILEDIVLTLTLFEDREMIEERLKTYAHLFDDKVMKQLKRRRYTGWGRLSRKLINGIRDKQSGKTILDFLKSDGFANRNFMQLIHDDSLTFKEDIQKAQVSGQGDSLHEHIANLAGSPAIKKGILQTVKVVDELVKVMGRHKPENIVIEMARENQTTQKGQKNSRERMKRIEEGIKELGSQILKEHPVENTQLQNEKLYLYYLQNGRDMYVDQELDINRLSDYDVDHIVPQSFLKDDSIDNKVLTRSDKARGKSDNVPSEEVVKKMKNYWRQLLNAKLITQRKFDNLTKAERGGLSELDKAGFIKRQLVETRQITKHVAQILDSRMNTKYDENDKLIREVKVITLKSKLVSDFRKDFQFYKVREINNYHHAHDAYLNAVVGTALIKKYPKLESEFVYGDYKVYDVRKMIAKSEQEIGKATAKYFFYSNIMNFFKTEITLANGEIRKRPLIETNGETGEIVWDKGRDFATVRKVLSMPQVNIVKKTEVQTGGFSKESILPKRNSDKLIARKKDWDPKKYGGFDSPTVAYSVLVVAKVEKGKSKKLKSVKELLGITIMERSSFEKNPIDFLEAKGYKEVKKDLIIKLPKYSLFELENGRKRMLASAGELQKGNELALPSKYVNFLYLASHYEKLKGSPEDNEQKQLFVEQHKHYLDEIIEQISEFSKRVILADANLDKVLSAYNKHRDKPIREQAENIIHLFTLTNLGAPAAFKYFDTTIDRKRYTSTKEVLDATLIHQSITGLYETRIDLSQLGGDGGGSSGGSPAPGGMDLLKPLTVERKGVKIKGYWNSQADITCVPKDLLQGEEPVRQQNVTTIHGTQEGDVYYVNLKIDGRRINTEVIGTTLDYAIITPGDVPWILKKPLELTIKLDLEEQQGTLLNNSILSKKGKEELKQLFEKYSALWQSWENQVGHRRIRPHKIATGTVKPTPQKQYHINPKAKPDIQIVINDLLKQGVLIQKESTMNTPVYPVPKPNGRWRMVLDYRAVNKVTPLIAVQNQHSYGILGSLFKGRYKTTIDLSNGFWAHPIVPEDYWITAFTWQGKQYCWTVLPQGFLNSPGLFTGDVVDLLQGIPNVEVYVDDVYISHDSEKEHLEYLDILFNRLKEAGYIISLKKSNIANSIVDFLGFQITNEGRGLTDTFKEKLENITAPTTLKQLQSILGLLNFARNFIPDFTELIAPLYALIPKSTKNYVPWQIEHSTTLETLITKLNGAEYLQGRKGDKTLIMKVNASYTTGYIRYYNEGEKKPISYVSIVFSKTELKFTELEKLLTTVHKGLLKALDLSMGQNIHVYSPIVSMQNIQKTPQTAKKALASRWLSWLSYLEDPRIRFFYDPQMPALKDLPAVDTGKDNKKHPSNFQHIFYTDGSAITSPTKEGHLNAGMGIVYFINKDGNLQKQQEWSISLGNHTAQFAEIAAFEFALKKCLPLGGNILVVTDSNYVAKAYNEELDVWASNGFVNNRKKPLKHISKWKSVADLKRLRPDVVVTHEPGHQKLDSSPHAYGNNLADQLATQASFKVHAGKRTADGSEFEKRTADGSEFESPKKKAKVE

SEQ ID NO: 718 - protein, 2177 aa, synthetic construct
MPAAKRVKLDGGDKKYSIGLDIGTNSVGWAVITDEYKVPSKKFKVLGNTDRHSIKKNLIGALLFDSGETAEATRLKRTARRRYTRRKNRICYLQEIFSNEMAKVDDSFFHRLEESFLVEEDKKHERHPIFGNIVDEVAYHEKYPTIYHLRKKLVDSTDKADLRLIYLALAHMIKFRGHFLIEGDLNPDNSDVDKLFIQLVQTYNQLFEENPINASGVDAKAILSARLSKSRRLENLIAQLPGEKKNGLFGNLIALSLGLTPNFKSNFDLAEDAKLQLSKDTYDDDLDNLLAQIGDQYADLFLAAKNLSDAILLSDILRVNTEITKAPLSASMIKRYDEHHQDLTLLKALVRQQLPEKYKEIFFDQSKNGYAGYIDGGASQEEFYKFIKPILEKMDGTEELLVKLNREDLLRKQRTFDNGSIPHQIHLGELHAILRRQEDFYPFLKDNREKIEKILTFRIPYYVGPLARGNSRFAWMTRKSEETITPWNFEEVVDKGASAQSFIERMTNFDKNLPNEKVLPKHSLLYEYFTVYNELTKVKYVTEGMRKPAFLSGEQKKAIVDLLFKTNRKVTVKQLKEDYFKKIECFDSVEISGVEDRFNASLGTYHDLLKIIKDKDFLDNEENEDILEDIVLTLTLFEDREMIEERLKTYAHLFDDKVMKQLKRRRYTGWGRLSRKLINGIRDKQSGKTILDFLKSDGFANRNFMQLIHDDSLTFKEDIQKAQVSGQGDSLHEHIANLAGSPAIKKGILQTVKVVDELVKVMGRHKPENIVIEMARENQTTQKGQKNSRERMKRIEEGIKELGSQILKEHPVENTQLQNEKLYLYYLQNGRDMYVDQELDINRLSDYDVDHIVPQSFLKDDSIDNKVLTRSDKARGKSDNVPSEEVVKKMKNYWRQLLNAKLITQRKFDNLTKAERGGLSELDKAGFIKRQLVETRQITKHVAQILDSRMNTKYDENDKLIREVKVITLKSKLVSDFRKDFQFYKVREINNYHHAHDAYLNAVVGTALIKKYPKLESEFVYGDYKVYDVRKMIAKSEQEIGKATAKYFFYSNIMNFFKTEITLANGEIRKRPLIETNGETGEIVWDKGRDFATVRKVLSMPQVNIVKKTEVQTGGFSKESILPKRNSDKLIARKKDWDPKKYGGFDSPTVAYSVLVVAKVEKGKSKKLKSVKELLGITIMERSSFEKNPIDFLEAKGYKEVKKDLIIKLPKYSLFELENGRKRMLASAGELQKGNELALPSKYVNFLYLASHYEKLKGSPEDNEQKQLFVEQHKHYLDEIIEQISEFSKRVILADANLDKVLSAYNKHRDKPIREQAENIIHLFTLTNLGAPAAFKYFDTTIDRKRYTSTKEVLDATLIHQSITGLYETRIDLSQLGGDGGEAAAKEAAAKEAAAKGGMDLLKPLTVERKGVKIKGYWNSQADITCVPKDLLQGEEPVRQQNVTTIHGTQEGDVYYVNLKIDGRRINTEVIGTTLDYAIITPGDVPWILKKPLELTIKLDLEEQQGTLLNNSILSKKGKEELKQLFEKYSALWQSWENQVGHRRIRPHKIATGTVKPTPQKQYHINPKAKPDIQIVINDLLKQGVLIQKESTMNTPVYPVPKPNGRWRMVLDYRAVNKVTPLIAVQNQHSYGILGSLFKGRYKTTIDLSNGFWAHPIVPEDYWITAFTWQGKQYCWTVLPQGFLNSPGLFTGDVVDLLQGIPNVEVYVDDVYISHDSEKEHLEYLDILFNRLKEAGYIISLKKSNIANSIVDFLGFQITNEGRGLTDTFKEKLENITAPTTLKQLQSILGLLNFARNFIPDFTELIAPLYALIPKSTKNYVPWQIEHSTTLETLITKLNGAEYLQGRKGDKTLIMKVNASYTTGYIRYYNEGEKKPISYVSIVFSKTELKFTELEKLLTTVHKGLLKALDLSMGQNIHVYSPIVSMQNIQKTPQTAKKALASRWLSWLSYLEDPRIRFFYDPQMPALKDLPAVDTGKDNKKHPSNFQHIFYTDGSAITSPTKEGHLNAGMGIVYFINKDGNLQKQQEWSISLGNHTAQFAEIAAFEFALKKCLPLGGNILVVTDSNYVAKAYNEELDVWASNGFVNNRKKPLKHISKWKSVADLKRLRPDVVVTHEPGHQKLDSSPHAYGNNLADQLATQASFKVHAGKRTADGSEFEKRTADGSEFESPKKKAKVE

SEQ ID NO: 719 - protein, 2177 aa, synthetic construct
MPAAKRVKLDGGDKKYSIGLDIGTNSVGWAVITDEYKVPSKKFKVLGNTDRHSIKKNLIGALLFDSGETAEATRLKRTARRRYTRRKNRICYLQEIFSNEMAKVDDSFFHRLEESFLVEEDKKHERHPIFGNIVDEVAYHEKYPTIYHLRKKLVDSTDKADLRLIYLALAHMIKFRGHFLIEGDLNPDNSDVDKLFIQLVQTYNQLFEENPINASGVDAKAILSARLSKSRRLENLIAQLPGEKKNGLFGNLIALSLGLTPNFKSNFDLAEDAKLQLSKDTYDDDLDNLLAQIGDQYADLFLAAKNLSDAILLSDILRVNTEITKAPLSASMIKRYDEHHQDLTLLKALVRQQLPEKYKEIFFDQSKNGYAGYIDGGASQEEFYKFIKPILEKMDGTEELLVKLNREDLLRKQRTFDNGSIPHQIHLGELHAILRRQEDFYPFLKDNREKIEKILTFRIPYYVGPLARGNSRFAWMTRKSEETITPWNFEEVVDKGASAQSFIERMTNFDKNLPNEKVLPKHSLLYEYFTVYNELTKVKYVTEGMRKPAFLSGEQKKAIVDLLFKTNRKVTVKQLKEDYFKKIECFDSVEISGVEDRFNASLGTYHDLLKIIKDKDFLDNEENEDILEDIVLTLTLFEDREMIEERLKTYAHLFDDKVMKQLKRRRYTGWGRLSRKLINGIRDKQSGKTILDFLKSDGFANRNFMQLIHDDSLTFKEDIQKAQVSGQGDSLHEHIANLAGSPAIKKGILQTVKVVDELVKVMGRHKPENIVIEMARENQTTQKGQKNSRERMKRIEEGIKELGSQILKEHPVENTQLQNEKLYLYYLQNGRDMYVDQELDINRLSDYDVDHIVPQSFLKDDSIDNKVLTRSDKARGKSDNVPSEEVVKKMKNYWRQLLNAKLITQRKFDNLTKAERGGLSELDKAGFIKRQLVETRQITKHVAQILDSRMNTKYDENDKLIREVKVITLKSKLVSDFRKDFQFYKVREINNYHHAHDAYLNAVVGTALIKKYPKLESEFVYGDYKVYDVRKMIAKSEQEIGKATAKYFFYSNIMNFFKTEITLANGEIRKRPLIETNGETGEIVWDKGRDFATVRKVLSMPQVNIVKKTEVQTGGFSKESILPKRNSDKLIARKKDWDPKKYGGFDSPTVAYSVLVVAKVEKGKSKKLKSVKELLGITIMERSSFEKNPIDFLEAKGYKEVKKDLIIKLPKYSLFELENGRKRMLASAGELQKGNELALPSKYVNFLYLASHYEKLKGSPEDNEQKQLFVEQHKHYLDEIIEQISEFSKRVILADANLDKVLSAYNKHRDKPIREQAENIIHLFTLTNLGAPAAFKYFDTTIDRKRYTSTKEVLDATLIHQSITGLYETRIDLSQLGGDGGGSSGSSGSSGSSGSSGGMDLLKPLTVERKGVKIKGYWNSQADITCVPKDLLQGEEPVRQQNVTTIHGTQEGDVYYVNLKIDGRRINTEVIGTTLDYAIITPGDVPWILKKPLELTIKLDLEEQQGTLLNNSILSKKGKEELKQLFEKYSALWQSWENQVGHRRIRPHKIATGTVKPTPQKQYHINPKAKPDIQIVINDLLKQGVLIQKESTMNTPVYPVPKPNGRWRMVLDYRAVNKVTPLIAVQNQHSYGILGSLFKGRYKTTIDLSNGFWAHPIVPEDYWITAFTWQGKQYCWTVLPQGFLNSPGLFTGDVVDLLQGIPNVEVYVDDVYISHDSEKEHLEYLDILFNRLKEAGYIISLKKSNIANSIVDFLGFQITNEGRGLTDTFKEKLENITAPTTLKQLQSILGLLNFARNFIPDFTELIAPLYALIPKSTKNYVPWQIEHSTTLETLITKLNGAEYLQGRKGDKTLIMKVNASYTTGYIRYYNEGEKKPISYVSIVFSKTELKFTELEKLLTTVHKGLLKALDLSMGQNIHVYSPIVSMQNIQKTPQTAKKALASRWLSWLSYLEDPRIRFFYDPQMPALKDLPAVDTGKDNKKHPSNFQHIFYTDGSAITSPTKEGHLNAGMGIVYFINKDGNLQKQQEWSISLGNHTAQFAEIAAFEFALKKCLPLGGNILVVTDSNYVAKAYNEELDVWASNGFVNNRKKPLKHISKWKSVADLKRLRPDVVVTHEPGHQKLDSSPHAYGNNLADQLATQASFKVHAGKRTADGSEFEKRTADGSEFESPKKKAKVE

SEQ ID NO: 720 - protein, 2171 aa, synthetic construct
MPAAKRVKLDGGDKKYSIGLDIGTNSVGWAVITDEYKVPSKKFKVLGNTDRHSIKKNLIGALLFDSGETAEATRLKRTARRRYTRRKNRICYLQEIFSNEMAKVDDSFFHRLEESFLVEEDKKHERHPIFGNIVDEVAYHEKYPTIYHLRKKLVDSTDKADLRLIYLALAHMIKFRGHFLIEGDLNPDNSDVDKLFIQLVQTYNQLFEENPINASGVDAKAILSARLSKSRRLENLIAQLPGEKKNGLFGNLIALSLGLTPNFKSNFDLAEDAKLQLSKDTYDDDLDNLLAQIGDQYADLFLAAKNLSDAILLSDILRVNTEITKAPLSASMIKRYDEHHQDLTLLKALVRQQLPEKYKEIFFDQSKNGYAGYIDGGASQEEFYKFIKPILEKMDGTEELLVKLNREDLLRKQRTFDNGSIPHQIHLGELHAILRRQEDFYPFLKDNREKIEKILTFRIPYYVGPLARGNSRFAWMTRKSEETITPWNFEEVVDKGASAQSFIERMTNFDKNLPNEKVLPKHSLLYEYFTVYNELTKVKYVTEGMRKPAFLSGEQKKAIVDLLFKTNRKVTVKQLKEDYFKKIECFDSVEISGVEDRFNASLGTYHDLLKIIKDKDFLDNEENEDILEDIVLTLTLFEDREMIEERLKTYAHLFDDKVMKQLKRRRYTGWGRLSRKLINGIRDKQSGKTILDFLKSDGFANRNFMQLIHDDSLTFKEDIQKAQVSGQGDSLHEHIANLAGSPAIKKGILQTVKVVDELVKVMGRHKPENIVIEMARENQTTQKGQKNSRERMKRIEEGIKELGSQILKEHPVENTQLQNEKLYLYYLQNGRDMYVDQELDINRLSDYDVDHIVPQSFLKDDSIDNKVLTRSDKARGKSDNVPSEEVVKKMKNYWRQLLNAKLITQRKFDNLTKAERGGLSELDKAGFIKRQLVETRQITKHVAQILDSRMNTKYDENDKLIREVKVITLKSKLVSDFRKDFQFYKVREINNYHHAHDAYLNAVVGTALIKKYPKLESEFVYGDYKVYDVRKMIAKSEQEIGKATAKYFFYSNIMNFFKTEITLANGEIRKRPLIETNGETGEIVWDKGRDFATVRKVLSMPQVNIVKKTEVQTGGFSKESILPKRNSDKLIARKKDWDPKKYGGFDSPTVAYSVLVVAKVEKGKSKKLKSVKELLGITIMERSSFEKNPIDFLEAKGYKEVKKDLIIKLPKYSLFELENGRKRMLASAGELQKGNELALPSKYVNFLYLASHYEKLKGSPEDNEQKQLFVEQHKHYLDEIIEQISEFSKRVILADANLDKVLSAYNKHRDKPIREQAENIIHLFTLTNLGAPAAFKYFDTTIDRKRYTSTKEVLDATLIHQSITGLYETRIDLSQLGGDGGGGGGSSPAPGGMDLLKPLTVERKGVKIKGYWNSQADITCVPKDLLQGEEPVRQQNVTTIHGTQEGDVYYVNLKIDGRRINTEVIGTTLDYAIITPGDVPWILKKPLELTIKLDLEEQQGTLLNNSILSKKGKEELKQLFEKYSALWQSWENQVGHRRIRPHKIATGTVKPTPQKQYHINPKAKPDIQIVINDLLKQGVLIQKESTMNTPVYPVPKPNGRWRMVLDYRAVNKVTPLIAVQNQHSYGILGSLFKGRYKTTIDLSNGFWAHPIVPEDYWITAFTWQGKQYCWTVLPQGFLNSPGLFTGDVVDLLQGIPNVEVYVDDVYISHDSEKEHLEYLDILFNRLKEAGYIISLKKSNIANSIVDFLGFQITNEGRGLTDTFKEKLENITAPTTLKQLQSILGLLNFARNFIPDFTELIAPLYALIPKSTKNYVPWQIEHSTTLETLITKLNGAEYLQGRKGDKTLIMKVNASYTTGYIRYYNEGEKKPISYVSIVFSKTELKFTELEKLLTTVHKGLLKALDLSMGQNIHVYSPIVSMQNIQKTPQTAKKALASRWLSWLSYLEDPRIRFFYDPQMPALKDLPAVDTGKDNKKHPSNFQHIFYTDGSAITSPTKEGHLNAGMGIVYFINKDGNLQKQQEWSISLGNHTAQFAEIAAFEFALKKCLPLGGNILVVTDSNYVAKAYNEELDVWASNGFVNNRKKPLKHISKWKSVADLKRLRPDVVVTHEPGHQKLDSSPHAYGNNLADQLATQASFKVHAGKRTADGSEFEKRTADGSEFESPKKKAKVE

SEQ ID NO: 721 - protein, 2173 aa, synthetic construct
MPAAKRVKLDGGDKKYSIGLDIGTNSVGWAVITDEYKVPSKKFKVLGNTDRHSIKKNLIGALLFDSGETAEATRLKRTARRRYTRRKNRICYLQEIFSNEMAKVDDSFFHRLEESFLVEEDKKHERHPIFGNIVDEVAYHEKYPTIYHLRKKLVDSTDKADLRLIYLALAHMIKFRGHFLIEGDLNPDNSDVDKLFIQLVQTYNQLFEENPINASGVDAKAILSARLSKSRRLENLIAQLPGEKKNGLFGNLIALSLGLTPNFKSNFDLAEDAKLQLSKDTYDDDLDNLLAQIGDQYADLFLAAKNLSDAILLSDILRVNTEITKAPLSASMIKRYDEHHQDLTLLKALVRQQLPEKYKEIFFDQSKNGYAGYIDGGASQEEFYKFIKPILEKMDGTEELLVKLNREDLLRKQRTFDNGSIPHQIHLGELHAILRRQEDFYPFLKDNREKIEKILTFRIPYYVGPLARGNSRFAWMTRKSEETITPWNFEEVVDKGASAQSFIERMTNFDKNLPNEKVLPKHSLLYEYFTVYNELTKVKYVTEGMRKPAFLSGEQKKAIVDLLFKTNRKVTVKQLKEDYFKKIECFDSVEISGVEDRFNASLGTYHDLLKIIKDKDFLDNEENEDILEDIVLTLTLFEDREMIEERLKTYAHLFDDKVMKQLKRRRYTGWGRLSRKLINGIRDKQSGKTILDFLKSDGFANRNFMQLIHDDSLTFKEDIQKAQVSGQGDSLHEHIANLAGSPAIKKGILQTVKVVDELVKVMGRHKPENIVIEMARENQTTQKGQKNSRERMKRIEEGIKELGSQILKEHPVENTQLQNEKLYLYYLQNGRDMYVDQELDINRLSDYDVDHIVPQSFLKDDSIDNKVLTRSDKARGKSDNVPSEEVVKKMKNYWRQLLNAKLITQRKFDNLTKAERGGLSELDKAGFIKRQLVETRQITKHVAQILDSRMNTKYDENDKLIREVKVITLKSKLVSDFRKDFQFYKVREINNYHHAHDAYLNAVVGTALIKKYPKLESEFVYGDYKVYDVRKMIAKSEQEIGKATAKYFFYSNIMNFFKTEITLANGEIRKRPLIETNGETGEIVWDKGRDFATVRKVLSMPQVNIVKKTEVQTGGFSKESILPKRNSDKLIARKKDWDPKKYGGFDSPTVAYSVLVVAKVEKGKSKKLKSVKELLGITIMERSSFEKNPIDFLEAKGYKEVKKDLIIKLPKYSLFELENGRKRMLASAGELQKGNELALPSKYVNFLYLASHYEKLKGSPEDNEQKQLFVEQHKHYLDEIIEQISEFSKRVILADANLDKVLSAYNKHRDKPIREQAENIIHLFTLTNLGAPAAFKYFDTTIDRKRYTSTKEVLDATLIHQSITGLYETRIDLSQLGGDGGEAAAKGSSPAPGGMDLLKPLTVERKGVKIKGYWNSQADITCVPKDLLQGEEPVRQQNVTTIHGTQEGDVYYVNLKIDGRRINTEVIGTTLDYAIITPGDVPWILKKPLELTIKLDLEEQQGTLLNNSILSKKGKEELKQLFEKYSALWQSWENQVGHRRIRPHKIATGTVKPTPQKQYHINPKAKPDIQIVINDLLKQGVLIQKESTMNTPVYPVPKPNGRWRMVLDYRAVNKVTPLIAVQNQHSYGILGSLFKGRYKTTIDLSNGFWAHPIVPEDYWITAFTWQGKQYCWTVLPQGFLNSPGLFTGDVVDLLQGIPNVEVYVDDVYISHDSEKEHLEYLDILFNRLKEAGYIISLKKSNIANSIVDFLGFQITNEGRGLTDTFKEKLENITAPTTLKQLQSILGLLNFARNFIPDFTELIAPLYALIPKSTKNYVPWQIEHSTTLETLITKLNGAEYLQGRKGDKTLIMKVNASYTTGYIRYYNEGEKKPISYVSIVFSKTELKFTELEKLLTTVHKGLLKALDLSMGQNIHVYSPIVSMQNIQKTPQTAKKALASRWLSWLSYLEDPRIRFFYDPQMPALKDLPAVDTGKDNKKHPSNFQHIFYTDGSAITSPTKEGHLNAGMGIVYFINKDGNLQKQQEWSISLGNHTAQFAEIAAFEFALKKCLPLGGNILVVTDSNYVAKAYNEELDVWASNGFVNNRKKPLKHISKWKSVADLKRLRPDVVVTHEPGHQKLDSSPHAYGNNLADQLATQASFKVHAGKRTADGSEFEKRTADGSEFESPKKKAKVE

SEQ ID NO: 722 - protein, 2180 aa, synthetic construct
MPAAKRVKLDGGDKKYSIGLDIGTNSVGWAVITDEYKVPSKKFKVLGNTDRHSIKKNLIGALLFDSGETAEATRLKRTARRRYTRRKNRICYLQEIFSNEMAKVDDSFFHRLEESFLVEEDKKHERHPIFGNIVDEVAYHEKYPTIYHLRKKLVDSTDKADLRLIYLALAHMIKFRGHFLIEGDLNPDNSDVDKLFIQLVQTYNQLFEENPINASGVDAKAILSARLSKSRRLENLIAQLPGEKKNGLFGNLIALSLGLTPNFKSNFDLAEDAKLQLSKDTYDDDLDNLLAQIGDQYADLFLAAKNLSDAILLSDILRVNTEITKAPLSASMIKRYDEHHQDLTLLKALVRQQLPEKYKEIFFDQSKNGYAGYIDGGASQEEFYKFIKPILEKMDGTEELLVKLNREDLLRKQRTFDNGSIPHQIHLGELHAILRRQEDFYPFLKDNREKIEKILTFRIPYYVGPLARGNSRFAWMTRKSEETITPWNFEEVVDKGASAQSFIERMTNFDKNLPNEKVLPKHSLLYEYFTVYNELTKVKYVTEGMRKPAFLSGEQKKAIVDLLFKTNRKVTVKQLKEDYFKKIECFDSVEISGVEDRFNASLGTYHDLLKIIKDKDFLDNEENEDILEDIVLTLTLFEDREMIEERLKTYAHLFDDKVMKQLKRRRYTGWGRLSRKLINGIRDKQSGKTILDFLKSDGFANRNFMQLIHDDSLTFKEDIQKAQVSGQGDSLHEHIANLAGSPAIKKGILQTVKVVDELVKVMGRHKPENIVIEMARENQTTQKGQKNSRERMKRIEEGIKELGSQILKEHPVENTQLQNEKLYLYYLQNGRDMYVDQELDINRLSDYDVDHIVPQSFLKDDSIDNKVLTRSDKARGKSDNVPSEEVVKKMKNYWRQLLNAKLITQRKFDNLTKAERGGLSELDKAGFIKRQLVETRQITKHVAQILDSRMNTKYDENDKLIREVKVITLKSKLVSDFRKDFQFYKVREINNYHHAHDAYLNAVVGTALIKKYPKLESEFVYGDYKVYDVRKMIAKSEQEIGKATAKYFFYSNIMNFFKTEITLANGEIRKRPLIETNGETGEIVWDKGRDFATVRKVLSMPQVNIVKKTEVQTGGFSKESILPKRNSDKLIARKKDWDPKKYGGFDSPTVAYSVLVVAKVEKGKSKKLKSVKELLGITIMERSSFEKNPIDFLEAKGYKEVKKDLIIKLPKYSLFELENGRKRMLASAGELQKGNELALPSKYVNFLYLASHYEKLKGSPEDNEQKQLFVEQHKHYLDEIIEQISEFSKRVILADANLDKVLSAYNKHRDKPIREQAENIIHLFTLTNLGAPAAFKYFDTTIDRKRYTSTKEVLDATLIHQSITGLYETRIDLSQLGGDGGGSSGSSGSSGSSGSSGSSGGMDLLKPLTVERKGVKIKGYWNSQADITCVPKDLLQGEEPVRQQNVTTIHGTQEGDVYYVNLKIDGRRINTEVIGTTLDYAIITPGDVPWILKKPLELTIKLDLEEQQGTLLNNSILSKKGKEELKQLFEKYSALWQSWENQVGHRRIRPHKIATGTVKPTPQKQYHINPKAKPDIQIVINDLLKQGVLIQKESTMNTPVYPVPKPNGRWRMVLDYRAVNKVTPLIAVQNQHSYGILGSLFKGRYKTTIDLSNGFWAHPIVPEDYWITAFTWQGKQYCWTVLPQGFLNSPGLFTGDVVDLLQGIPNVEVYVDDVYISHDSEKEHLEYLDILFNRLKEAGYIISLKKSNIANSIVDFLGFQITNEGRGLTDTFKEKLENITAPTTLKQLQSILGLLNFARNFIPDFTELIAPLYALIPKSTKNYVPWQIEHSTTLETLITKLNGAEYLQGRKGDKTLIMKVNASYTTGYIRYYNEGEKKPISYVSIVFSKTELKFTELEKLLTTVHKGLLKALDLSMGQNIHVYSPIVSMQNIQKTPQTAKKALASRWLSWLSYLEDPRIRFFYDPQMPALKDLPAVDTGKDNKKHPSNFQHIFYTDGSAITSPTKEGHLNAGMGIVYFINKDGNLQKQQEWSISLGNHTAQFAEIAAFEFALKKCLPLGGNILVVTDSNYVAKAYNEELDVWASNGFVNNRKKPLKHISKWKSVADLKRLRPDVVVTHEPGHQKLDSSPHAYGNNLADQLATQASFKVHAGKRTADGSEFEKRTADGSEFESPKKKAKVE

SEQ ID NO: 723 - protein, 2171 aa, synthetic construct
MPAAKRVKLDGGDKKYSIGLDIGTNSVGWAVITDEYKVPSKKFKVLGNTDRHSIKKNLIGALLFDSGETAEATRLKRTARRRYTRRKNRICYLQEIFSNEMAKVDDSFFHRLEESFLVEEDKKHERHPIFGNIVDEVAYHEKYPTIYHLRKKLVDSTDKADLRLIYLALAHMIKFRGHFLIEGDLNPDNSDVDKLFIQLVQTYNQLFEENPINASGVDAKAILSARLSKSRRLENLIAQLPGEKKNGLFGNLIALSLGLTPNFKSNFDLAEDAKLQLSKDTYDDDLDNLLAQIGDQYADLFLAAKNLSDAILLSDILRVNTEITKAPLSASMIKRYDEHHQDLTLLKALVRQQLPEKYKEIFFDQSKNGYAGYIDGGASQEEFYKFIKPILEKMDGTEELLVKLNREDLLRKQRTFDNGSIPHQIHLGELHAILRRQEDFYPFLKDNREKIEKILTFRIPYYVGPLARGNSRFAWMTRKSEETITPWNFEEVVDKGASAQSFIERMTNFDKNLPNEKVLPKHSLLYEYFTVYNELTKVKYVTEGMRKPAFLSGEQKKAIVDLLFKTNRKVTVKQLKEDYFKKIECFDSVEISGVEDRFNASLGTYHDLLKIIKDKDFLDNEENEDILEDIVLTLTLFEDREMIEERLKTYAHLFDDKVMKQLKRRRYTGWGRLSRKLINGIRDKQSGKTILDFLKSDGFANRNFMQLIHDDSLTFKEDIQKAQVSGQGDSLHEHIANLAGSPAIKKGILQTVKVVDELVKVMGRHKPENIVIEMARENQTTQKGQKNSRERMKRIEEGIKELGSQILKEHPVENTQLQNEKLYLYYLQNGRDMYVDQELDINRLSDYDVDHIVPQSFLKDDSIDNKVLTRSDKARGKSDNVPSEEVVKKMKNYWRQLLNAKLITQRKFDNLTKAERGGLSELDKAGFIKRQLVETRQITKHVAQILDSRMNTKYDENDKLIREVKVITLKSKLVSDFRKDFQFYKVREINNYHHAHDAYLNAVVGTALIKKYPKLESEFVYGDYKVYDVRKMIAKSEQEIGKATAKYFFYSNIMNFFKTEITLANGEIRKRPLIETNGETGEIVWDKGRDFATVRKVLSMPQVNIVKKTEVQTGGFSKESILPKRNSDKLIARKKDWDPKKYGGFDSPTVAYSVLVVAKVEKGKSKKLKSVKELLGITIMERSSFEKNPIDFLEAKGYKEVKKDLIIKLPKYSLFELENGRKRMLASAGELQKGNELALPSKYVNFLYLASHYEKLKGSPEDNEQKQLFVEQHKHYLDEIIEQISEFSKRVILADANLDKVLSAYNKHRDKPIREQAENIIHLFTLTNLGAPAAFKYFDTTIDRKRYTSTKEVLDATLIHQSITGLYETRIDLSQLGGDGGPAPAPAPAPGGMDLLKPLTVERKGVKIKGYWNSQADITCVPKDLLQGEEPVRQQNVTTIHGTQEGDVYYVNLKIDGRRINTEVIGTTLDYAIITPGDVPWILKKPLELTIKLDLEEQQGTLLNNSILSKKGKEELKQLFEKYSALWQSWENQVGHRRIRPHKIATGTVKPTPQKQYHINPKAKPDIQIVINDLLKQGVLIQKESTMNTPVYPVPKPNGRWRMVLDYRAVNKVTPLIAVQNQHSYGILGSLFKGRYKTTIDLSNGFWAHPIVPEDYWITAFTWQGKQYCWTVLPQGFLNSPGLFTGDVVDLLQGIPNVEVYVDDVYISHDSEKEHLEYLDILFNRLKEAGYIISLKKSNIANSIVDFLGFQITNEGRGLTDTFKEKLENITAPTTLKQLQSILGLLNFARNFIPDFTELIAPLYALIPKSTKNYVPWQIEHSTTLETLITKLNGAEYLQGRKGDKTLIMKVNASYTTGYIRYYNEGEKKPISYVSIVFSKTELKFTELEKLLTTVHKGLLKALDLSMGQNIHVYSPIVSMQNIQKTPQTAKKALASRWLSWLSYLEDPRIRFFYDPQMPALKDLPAVDTGKDNKKHPSNFQHIFYTDGSAITSPTKEGHLNAGMGIVYFINKDGNLQKQQEWSISLGNHTAQFAEIAAFEFALKKCLPLGGNILVVTDSNYVAKAYNEELDVWASNGFVNNRKKPLKHISKWKSVADLKRLRPDVVVTHEPGHQKLDSSPHAYGNNLADQLATQASFKVHAGKRTADGSEFEKRTADGSEFESPKKKAKVE

SEQ ID NO: 724 - protein, 2170 aa, synthetic construct
MPAAKRVKLDGGDKKYSIGLDIGTNSVGWAVITDEYKVPSKKFKVLGNTDRHSIKKNLIGALLFDSGETAEATRLKRTARRRYTRRKNRICYLQEIFSNEMAKVDDSFFHRLEESFLVEEDKKHERHPIFGNIVDEVAYHEKYPTIYHLRKKLVDSTDKADLRLIYLALAHMIKFRGHFLIEGDLNPDNSDVDKLFIQLVQTYNQLFEENPINASGVDAKAILSARLSKSRRLENLIAQLPGEKKNGLFGNLIALSLGLTPNFKSNFDLAEDAKLQLSKDTYDDDLDNLLAQIGDQYADLFLAAKNLSDAILLSDILRVNTEITKAPLSASMIKRYDEHHQDLTLLKALVRQQLPEKYKEIFFDQSKNGYAGYIDGGASQEEFYKFIKPILEKMDGTEELLVKLNREDLLRKQRTFDNGSIPHQIHLGELHAILRRQEDFYPFLKDNREKIEKILTFRIPYYVGPLARGNSRFAWMTRKSEETITPWNFEEVVDKGASAQSFIERMTNFDKNLPNEKVLPKHSLLYEYFTVYNELTKVKYVTEGMRKPAFLSGEQKKAIVDLLFKTNRKVTVKQLKEDYFKKIECFDSVEISGVEDRFNASLGTYHDLLKIIKDKDFLDNEENEDILEDIVLTLTLFEDREMIEERLKTYAHLFDDKVMKQLKRRRYTGWGRLSRKLINGIRDKQSGKTILDFLKSDGFANRNFMQLIHDDSLTFKEDIQKAQVSGQGDSLHEHIANLAGSPAIKKGILQTVKVVDELVKVMGRHKPENIVIEMARENQTTQKGQKNSRERMKRIEEGIKELGSQILKEHPVENTQLQNEKLYLYYLQNGRDMYVDQELDINRLSDYDVDHIVPQSFLKDDSIDNKVLTRSDKARGKSDNVPSEEVVKKMKNYWRQLLNAKLITQRKFDNLTKAERGGLSELDKAGFIKRQLVETRQITKHVAQILDSRMNTKYDENDKLIREVKVITLKSKLVSDFRKDFQFYKVREINNYHHAHDAYLNAVVGTALIKKYPKLESEFVYGDYKVYDVRKMIAKSEQEIGKATAKYFFYSNIMNFFKTEITLANGEIRKRPLIETNGETGEIVWDKGRDFATVRKVLSMPQVNIVKKTEVQTGGFSKESILPKRNSDKLIARKKDWDPKKYGGFDSPTVAYSVLVVAKVEKGKSKKLKSVKELLGITIMERSSFEKNPIDFLEAKGYKEVKKDLIIKLPKYSLFELENGRKRMLASAGELQKGNELALPSKYVNFLYLASHYEKLKGSPEDNEQKQLFVEQHKHYLDEIIEQISEFSKRVILADANLDKVLSAYNKHRDKPIREQAENIIHLFTLTNLGAPAAFKYFDTTIDRKRYTSTKEVLDATLIHQSITGLYETRIDLSQLGGDGGGSSEAAAKGGMDLLKPLTVERKGVKIKGYWNSQADITCVPKDLLQGEEPVRQQNVTTIHGTQEGDVYYVNLKIDGRRINTEVIGTTLDYAIITPGDVPWILKKPLELTIKLDLEEQQGTLLNNSILSKKGKEELKQLFEKYSALWQSWENQVGHRRIRPHKIATGTVKPTPQKQYHINPKAKPDIQIVINDLLKQGVLIQKESTMNTPVYPVPKPNGRWRMVLDYRAVNKVTPLIAVQNQHSYGILGSLFKGRYKTTIDLSNGFWAHPIVPEDYWITAFTWQGKQYCWTVLPQGFLNSPGLFTGDVVDLLQGIPNVEVYVDDVYISHDSEKEHLEYLDILFNRLKEAGYIISLKKSNIANSIVDFLGFQITNEGRGLTDTFKEKLENITAPTTLKQLQSILGLLNFARNFIPDFTELIAPLYALIPKSTKNYVPWQIEHSTTLETLITKLNGAEYLQGRKGDKTLIMKVNASYTTGYIRYYNEGEKKPISYVSIVFSKTELKFTELEKLLTTVHKGLLKALDLSMGQNIHVYSPIVSMQNIQKTPQTAKKALASRWLSWLSYLEDPRIRFFYDPQMPALKDLPAVDTGKDNKKHPSNFQHIFYTDGSAITSPTKEGHLNAGMGIVYFINKDGNLQKQQEWSISLGNHTAQFAEIAAFEFALKKCLPLGGNILVVTDSNYVAKAYNEELDVWASNGFVNNRKKPLKHISKWKSVADLKRLRPDVVVTHEPGHQKLDSSPHAYGNNLADQLATQASFKVHAGKRTADGSEFEKRTADGSEFESPKKKAKVE

SEQ ID NO: 725 - protein, 2165 aa, synthetic construct
MPAAKRVKLDGGDKKYSIGLDIGTNSVGWAVITDEYKVPSKKFKVLGNTDRHSIKKNLIGALLFDSGETAEATRLKRTARRRYTRRKNRICYLQEIFSNEMAKVDDSFFHRLEESFLVEEDKKHERHPIFGNIVDEVAYHEKYPTIYHLRKKLVDSTDKADLRLIYLALAHMIKFRGHFLIEGDLNPDNSDVDKLFIQLVQTYNQLFEENPINASGVDAKAILSARLSKSRRLENLIAQLPGEKKNGLFGNLIALSLGLTPNFKSNFDLAEDAKLQLSKDTYDDDLDNLLAQIGDQYADLFLAAKNLSDAILLSDILRVNTEITKAPLSASMIKRYDEHHQDLTLLKALVRQQLPEKYKEIFFDQSKNGYAGYIDGGASQEEFYKFIKPILEKMDGTEELLVKLNREDLLRKQRTFDNGSIPHQIHLGELHAILRRQEDFYPFLKDNREKIEKILTFRIPYYVGPLARGNSRFAWMTRKSEETITPWNFEEVVDKGASAQSFIERMTNFDKNLPNEKVLPKHSLLYEYFTVYNELTKVKYVTEGMRKPAFLSGEQKKAIVDLLFKTNRKVTVKQLKEDYFKKIECFDSVEISGVEDRFNASLGTYHDLLKIIKDKDFLDNEENEDILEDIVLTLTLFEDREMIEERLKTYAHLFDDKVMKQLKRRRYTGWGRLSRKLINGIRDKQSGKTILDFLKSDGFANRNFMQLIHDDSLTFKEDIQKAQVSGQGDSLHEHIANLAGSPAIKKGILQTVKVVDELVKVMGRHKPENIVIEMARENQTTQKGQKNSRERMKRIEEGIKELGSQILKEHPVENTQLQNEKLYLYYLQNGRDMYVDQELDINRLSDYDVDHIVPQSFLKDDSIDNKVLTRSDKARGKSDNVPSEEVVKKMKNYWRQLLNAKLITQRKFDNLTKAERGGLSELDKAGFIKRQLVETRQITKHVAQILDSRMNTKYDENDKLIREVKVITLKSKLVSDFRKDFQFYKVREINNYHHAHDAYLNAVVGTALIKKYPKLESEFVYGDYKVYDVRKMIAKSEQEIGKATAKYFFYSNIMNFFKTEITLANGEIRKRPLIETNGETGEIVWDKGRDFATVRKVLSMPQVNIVKKTEVQTGGFSKESILPKRNSDKLIARKKDWDPKKYGGFDSPTVAYSVLVVAKVEKGKSKKLKSVKELLGITIMERSSFEKNPIDFLEAKGYKEVKKDLIIKLPKYSLFELENGRKRMLASAGELQKGNELALPSKYVNFLYLASHYEKLKGSPEDNEQKQLFVEQHKHYLDEIIEQISEFSKRVILADANLDKVLSAYNKHRDKPIREQAENIIHLFTLTNLGAPAAFKYFDTTIDRKRYTSTKEVLDATLIHQSITGLYETRIDLSQLGGDGGGSSGGMDLLKPLTVERKGVKIKGYWNSQADITCVPKDLLQGEEPVRQQNVTTIHGTQEGDVYYVNLKIDGRRINTEVIGTTLDYAIITPGDVPWILKKPLELTIKLDLEEQQGTLLNNSILSKKGKEELKQLFEKYSALWQSWENQVGHRRIRPHKIATGTVKPTPQKQYHINPKAKPDIQIVINDLLKQGVLIQKESTMNTPVYPVPKPNGRWRMVLDYRAVNKVTPLIAVQNQHSYGILGSLFKGRYKTTIDLSNGFWAHPIVPEDYWITAFTWQGKQYCWTVLPQGFLNSPGLFTGDVVDLLQGIPNVEVYVDDVYISHDSEKEHLEYLDILFNRLKEAGYIISLKKSNIANSIVDFLGFQITNEGRGLTDTFKEKLENITAPTTLKQLQSILGLLNFARNFIPDFTELIAPLYALIPKSTKNYVPWQIEHSTTLETLITKLNGAEYLQGRKGDKTLIMKVNASYTTGYIRYYNEGEKKPISYVSIVFSKTELKFTELEKLLTTVHKGLLKALDLSMGQNIHVYSPIVSMQNIQKTPQTAKKALASRWLSWLSYLEDPRIRFFYDPQMPALKDLPAVDTGKDNKKHPSNFQHIFYTDGSAITSPTKEGHLNAGMGIVYFINKDGNLQKQQEWSISLGNHTAQFAEIAAFEFALKKCLPLGGNILVVTDSNYVAKAYNEELDVWASNGFVNNRKKPLKHISKWKSVADLKRLRPDVVVTHEPGHQKLDSSPHAYGNNLADQLATQASFKVHAGKRTADGSEFEKRTADGSEFESPKKKAKVE

SEQ ID NO: 726 - protein, 2173 aa, synthetic construct
MPAAKRVKLDGGDKKYSIGLDIGTNSVGWAVITDEYKVPSKKFKVLGNTDRHSIKKNLIGALLFDSGETAEATRLKRTARRRYTRRKNRICYLQEIFSNEMAKVDDSFFHRLEESFLVEEDKKHERHPIFGNIVDEVAYHEKYPTIYHLRKKLVDSTDKADLRLIYLALAHMIKFRGHFLIEGDLNPDNSDVDKLFIQLVQTYNQLFEENPINASGVDAKAILSARLSKSRRLENLIAQLPGEKKNGLFGNLIALSLGLTPNFKSNFDLAEDAKLQLSKDTYDDDLDNLLAQIGDQYADLFLAAKNLSDAILLSDILRVNTEITKAPLSASMIKRYDEHHQDLTLLKALVRQQLPEKYKEIFFDQSKNGYAGYIDGGASQEEFYKFIKPILEKMDGTEELLVKLNREDLLRKQRTFDNGSIPHQIHLGELHAILRRQEDFYPFLKDNREKIEKILTFRIPYYVGPLARGNSRFAWMTRKSEETITPWNFEEVVDKGASAQSFIERMTNFDKNLPNEKVLPKHSLLYEYFTVYNELTKVKYVTEGMRKPAFLSGEQKKAIVDLLFKTNRKVTVKQLKEDYFKKIECFDSVEISGVEDRFNASLGTYHDLLKIIKDKDFLDNEENEDILEDIVLTLTLFEDREMIEERLKTYAHLFDDKVMKQLKRRRYTGWGRLSRKLINGIRDKQSGKTILDFLKSDGFANRNFMQLIHDDSLTFKEDIQKAQVSGQGDSLHEHIANLAGSPAIKKGILQTVKVVDELVKVMGRHKPENIVIEMARENQTTQKGQKNSRERMKRIEEGIKELGSQILKEHPVENTQLQNEKLYLYYLQNGRDMYVDQELDINRLSDYDVDHIVPQSFLKDDSIDNKVLTRSDKARGKSDNVPSEEVVKKMKNYWRQLLNAKLITQRKFDNLTKAERGGLSELDKAGFIKRQLVETRQITKHVAQILDSRMNTKYDENDKLIREVKVITLKSKLVSDFRKDFQFYKVREINNYHHAHDAYLNAVVGTALIKKYPKLESEFVYGDYKVYDVRKMIAKSEQEIGKATAKYFFYSNIMNFFKTEITLANGEIRKRPLIETNGETGEIVWDKGRDFATVRKVLSMPQVNIVKKTEVQTGGFSKESILPKRNSDKLIARKKDWDPKKYGGFDSPTVAYSVLVVAKVEKGKSKKLKSVKELLGITIMERSSFEKNPIDFLEAKGYKEVKKDLIIKLPKYSLFELENGRKRMLASAGELQKGNELALPSKYVNFLYLASHYEKLKGSPEDNEQKQLFVEQHKHYLDEIIEQISEFSKRVILADANLDKVLSAYNKHRDKPIREQAENIIHLFTLTNLGAPAAFKYFDTTIDRKRYTSTKEVLDATLIHQSITGLYETRIDLSQLGGDGGEAAAKGGSGGGGGMDLLKPLTVERKGVKIKGYWNSQADITCVPKDLLQGEEPVRQQNVTTIHGTQEGDVYYVNLKIDGRRINTEVIGTTLDYAIITPGDVPWILKKPLELTIKLDLEEQQGTLLNNSILSKKGKEELKQLFEKYSALWQSWENQVGHRRIRPHKIATGTVKPTPQKQYHINPKAKPDIQIVINDLLKQGVLIQKESTMNTPVYPVPKPNGRWRMVLDYRAVNKVTPLIAVQNQHSYGILGSLFKGRYKTTIDLSNGFWAHPIVPEDYWITAFTWQGKQYCWTVLPQGFLNSPGLFTGDVVDLLQGIPNVEVYVDDVYISHDSEKEHLEYLDILFNRLKEAGYIISLKKSNIANSIVDFLGFQITNEGRGLTDTFKEKLENITAPTTLKQLQSILGLLNFARNFIPDFTELIAPLYALIPKSTKNYVPWQIEHSTTLETLITKLNGAEYLQGRKGDKTLIMKVNASYTTGYIRYYNEGEKKPISYVSIVFSKTELKFTELEKLLTTVHKGLLKALDLSMGQNIHVYSPIVSMQNIQKTPQTAKKALASRWLSWLSYLEDPRIRFFYDPQMPALKDLPAVDTGKDNKKHPSNFQHIFYTDGSAITSPTKEGHLNAGMGIVYFINKDGNLQKQQEWSISLGNHTAQFAEIAAFEFALKKCLPLGGNILVVTDSNYVAKAYNEELDVWASNGFVNNRKKPLKHISKWKSVADLKRLRPDVVVTHEPGHQKLDSSPHAYGNNLADQLATQASFKVHAGKRTADGSEFEKRTADGSEFESPKKKAKVE

SEQ ID NO: 727 - protein, 2173 aa, synthetic construct
MPAAKRVKLDGGDKKYSIGLDIGTNSVGWAVITDEYKVPSKKFKVLGNTDRHSIKKNLIGALLFDSGETAEATRLKRTARRRYTRRKNRICYLQEIFSNEMAKVDDSFFHRLEESFLVEEDKKHERHPIFGNIVDEVAYHEKYPTIYHLRKKLVDSTDKADLRLIYLALAHMIKFRGHFLIEGDLNPDNSDVDKLFIQLVQTYNQLFEENPINASGVDAKAILSARLSKSRRLENLIAQLPGEKKNGLFGNLIALSLGLTPNFKSNFDLAEDAKLQLSKDTYDDDLDNLLAQIGDQYADLFLAAKNLSDAILLSDILRVNTEITKAPLSASMIKRYDEHHQDLTLLKALVRQQLPEKYKEIFFDQSKNGYAGYIDGGASQEEFYKFIKPILEKMDGTEELLVKLNREDLLRKQRTFDNGSIPHQIHLGELHAILRRQEDFYPFLKDNREKIEKILTFRIPYYVGPLARGNSRFAWMTRKSEETITPWNFEEVVDKGASAQSFIERMTNFDKNLPNEKVLPKHSLLYEYFTVYNELTKVKYVTEGMRKPAFLSGEQKKAIVDLLFKTNRKVTVKQLKEDYFKKIECFDSVEISGVEDRFNASLGTYHDLLKIIKDKDFLDNEENEDILEDIVLTLTLFEDREMIEERLKTYAHLFDDKVMKQLKRRRYTGWGRLSRKLINGIRDKQSGKTILDFLKSDGFANRNFMQLIHDDSLTFKEDIQKAQVSGQGDSLHEHIANLAGSPAIKKGILQTVKVVDELVKVMGRHKPENIVIEMARENQTTQKGQKNSRERMKRIEEGIKELGSQILKEHPVENTQLQNEKLYLYYLQNGRDMYVDQELDINRLSDYDVDHIVPQSFLKDDSIDNKVLTRSDKARGKSDNVPSEEVVKKMKNYWRQLLNAKLITQRKFDNLTKAERGGLSELDKAGFIKRQLVETRQITKHVAQILDSRMNTKYDENDKLIREVKVITLKSKLVSDFRKDFQFYKVREINNYHHAHDAYLNAVVGTALIKKYPKLESEFVYGDYKVYDVRKMIAKSEQEIGKATAKYFFYSNIMNFFKTEITLANGEIRKRPLIETNGETGEIVWDKGRDFATVRKVLSMPQVNIVKKTEVQTGGFSKESILPKRNSDKLIARKKDWDPKKYGGFDSPTVAYSVLVVAKVEKGKSKKLKSVKELLGITIMERSSFEKNPIDFLEAKGYKEVKKDLIIKLPKYSLFELENGRKRMLASAGELQKGNELALPSKYVNFLYLASHYEKLKGSPEDNEQKQLFVEQHKHYLDEIIEQISEFSKRVILADANLDKVLSAYNKHRDKPIREQAENIIHLFTLTNLGAPAAFKYFDTTIDRKRYTSTKEVLDATLIHQSITGLYETRIDLSQLGGDGGGSSEAAAKPAPGGMDLLKPLTVERKGVKIKGYWNSQADITCVPKDLLQGEEPVRQQNVTTIHGTQEGDVYYVNLKIDGRRINTEVIGTTLDYAIITPGDVPWILKKPLELTIKLDLEEQQGTLLNNSILSKKGKEELKQLFEKYSALWQSWENQVGHRRIRPHKIATGTVKPTPQKQYHINPKAKPDIQIVINDLLKQGVLIQKESTMNTPVYPVPKPNGRWRMVLDYRAVNKVTPLIAVQNQHSYGILGSLFKGRYKTTIDLSNGFWAHPIVPEDYWITAFTWQGKQYCWTVLPQGFLNSPGLFTGDVVDLLQGIPNVEVYVDDVYISHDSEKEHLEYLDILFNRLKEAGYIISLKKSNIANSIVDFLGFQITNEGRGLTDTFKEKLENITAPTTLKQLQSILGLLNFARNFIPDFTELIAPLYALIPKSTKNYVPWQIEHSTTLETLITKLNGAEYLQGRKGDKTLIMKVNASYTTGYIRYYNEGEKKPISYVSIVFSKTELKFTELEKLLTTVHKGLLKALDLSMGQNIHVYSPIVSMQNIQKTPQTAKKALASRWLSWLSYLEDPRIRFFYDPQMPALKDLPAVDTGKDNKKHPSNFQHIFYTDGSAITSPTKEGHLNAGMGIVYFINKDGNLQKQQEWSISLGNHTAQFAEIAAFEFALKKCLPLGGNILVVTDSNYVAKAYNEELDVWASNGFVNNRKKPLKHISKWKSVADLKRLRPDVVVTHEPGHQKLDSSPHAYGNNLADQLATQASFKVHAGKRTADGSEFEKRTADGSEFESPKKKAKVE

SEQ ID NO: 728 - protein, 2173 aa, synthetic construct
MPAAKRVKLDGGDKKYSIGLDIGTNSVGWAVITDEYKVPSKKFKVLGNTDRHSIKKNLIGALLFDSGETAEATRLKRTARRRYTRRKNRICYLQEIFSNEMAKVDDSFFHRLEESFLVEEDKKHERHPIFGNIVDEVAYHEKYPTIYHLRKKLVDSTDKADLRLIYLALAHMIKFRGHFLIEGDLNPDNSDVDKLFIQLVQTYNQLFEENPINASGVDAKAILSARLSKSRRLENLIAQLPGEKKNGLFGNLIALSLGLTPNFKSNFDLAEDAKLQLSKDTYDDDLDNLLAQIGDQYADLFLAAKNLSDAILLSDILRVNTEITKAPLSASMIKRYDEHHQDLTLLKALVRQQLPEKYKEIFFDQSKNGYAGYIDGGASQEEFYKFIKPILEKMDGTEELLVKLNREDLLRKQRTFDNGSIPHQIHLGELHAILRRQEDFYPFLKDNREKIEKILTFRIPYYVGPLARGNSRFAWMTRKSEETITPWNFEEVVDKGASAQSFIERMTNFDKNLPNEKVLPKHSLLYEYFTVYNELTKVKYVTEGMRKPAFLSGEQKKAIVDLLFKTNRKVTVKQLKEDYFKKIECFDSVEISGVEDRFNASLGTYHDLLKIIKDKDFLDNEENEDILEDIVLTLTLFEDREMIEERLKTYAHLFDDKVMKQLKRRRYTGWGRLSRKLINGIRDKQSGKTILDFLKSDGFANRNFMQLIHDDSLTFKEDIQKAQVSGQGDSLHEHIANLAGSPAIKKGILQTVKVVDELVKVMGRHKPENIVIEMARENQTTQKGQKNSRERMKRIEEGIKELGSQILKEHPVENTQLQNEKLYLYYLQNGRDMYVDQELDINRLSDYDVDHIVPQSFLKDDSIDNKVLTRSDKARGKSDNVPSEEVVKKMKNYWRQLLNAKLITQRKFDNLTKAERGGLSELDKAGFIKRQLVETRQITKHVAQILDSRMNTKYDENDKLIREVKVITLKSKLVSDFRKDFQFYKVREINNYHHAHDAYLNAVVGTALIKKYPKLESEFVYGDYKVYDVRKMIAKSEQEIGKATAKYFFYSNIMNFFKTEITLANGEIRKRPLIETNGETGEIVWDKGRDFATVRKVLSMPQVNIVKKTEVQTGGFSKESILPKRNSDKLIARKKDWDPKKYGGFDSPTVAYSVLVVAKVEKGKSKKLKSVKELLGITIMERSSFEKNPIDFLEAKGYKEVKKDLIIKLPKYSLFELENGRKRMLASAGELQKGNELALPSKYVNFLYLASHYEKLKGSPEDNEQKQLFVEQHKHYLDEIIEQISEFSKRVILADANLDKVLSAYNKHRDKPIREQAENIIHLFTLTNLGAPAAFKYFDTTIDRKRYTSTKEVLDATLIHQSITGLYETRIDLSQLGGDGGGSSGGGEAAAKGGMDLLKPLTVERKGVKIKGYWNSQADITCVPKDLLQGEEPVRQQNVTTIHGTQEGDVYYVNLKIDGRRINTEVIGTTLDYAIITPGDVPWILKKPLELTIKLDLEEQQGTLLNNSILSKKGKEELKQLFEKYSALWQSWENQVGHRRIRPHKIATGTVKPTPQKQYHINPKAKPDIQIVINDLLKQGVLIQKESTMNTPVYPVPKPNGRWRMVLDYRAVNKVTPLIAVQNQHSYGILGSLFKGRYKTTIDLSNGFWAHPIVPEDYWITAFTWQGKQYCWTVLPQGFLNSPGLFTGDVVDLLQGIPNVEVYVDDVYISHDSEKEHLEYLDILFNRLKEAGYIISLKKSNIANSIVDFLGFQITNEGRGLTDTFKEKLENITAPTTLKQLQSILGLLNFARNFIPDFTELIAPLYALIPKSTKNYVPWQIEHSTTLETLITKLNGAEYLQGRKGDKTLIMKVNASYTTGYIRYYNEGEKKPISYVSIVFSKTELKFTELEKLLTTVHKGLLKALDLSMGQNIHVYSPIVSMQNIQKTPQTAKKALASRWLSWLSYLEDPRIRFFYDPQMPALKDLPAVDTGKDNKKHPSNFQHIFYTDGSAITSPTKEGHLNAGMGIVYFINKDGNLQKQQEWSISLGNHTAQFAEIAAFEFALKKCLPLGGNILVVTDSNYVAKAYNEELDVWASNGFVNNRKKPLKHISKWKSVADLKRLRPDVVVTHEPGHQKLDSSPHAYGNNLADQLATQASFKVHAGKRTADGSEFEKRTADGSEFESPKKKAKVE

SEQ ID NO: 729 - protein, 2171 aa, synthetic construct
MPAAKRVKLDGGDKKYSIGLDIGTNSVGWAVITDEYKVPSKKFKVLGNTDRHSIKKNLIGALLFDSGETAEATRLKRTARRRYTRRKNRICYLQEIFSNEMAKVDDSFFHRLEESFLVEEDKKHERHPIFGNIVDEVAYHEKYPTIYHLRKKLVDSTDKADLRLIYLALAHMIKFRGHFLIEGDLNPDNSDVDKLFIQLVQTYNQLFEENPINASGVDAKAILSARLSKSRRLENLIAQLPGEKKNGLFGNLIALSLGLTPNFKSNFDLAEDAKLQLSKDTYDDDLDNLLAQIGDQYADLFLAAKNLSDAILLSDILRVNTEITKAPLSASMIKRYDEHHQDLTLLKALVRQQLPEKYKEIFFDQSKNGYAGYIDGGASQEEFYKFIKPILEKMDGTEELLVKLNREDLLRKQRTFDNGSIPHQIHLGELHAILRRQEDFYPFLKDNREKIEKILTFRIPYYVGPLARGNSRFAWMTRKSEETITPWNFEEVVDKGASAQSFIERMTNFDKNLPNEKVLPKHSLLYEYFTVYNELTKVKYVTEGMRKPAFLSGEQKKAIVDLLFKTNRKVTVKQLKEDYFKKIECFDSVEISGVEDRFNASLGTYHDLLKIIKDKDFLDNEENEDILEDIVLTLTLFEDREMIEERLKTYAHLFDDKVMKQLKRRRYTGWGRLSRKLINGIRDKQSGKTILDFLKSDGFANRNFMQLIHDDSLTFKEDIQKAQVSGQGDSLHEHIANLAGSPAIKKGILQTVKVVDELVKVMGRHKPENIVIEMARENQTTQKGQKNSRERMKRIEEGIKELGSQILKEHPVENTQLQNEKLYLYYLQNGRDMYVDQELDINRLSDYDVDHIVPQSFLKDDSIDNKVLTRSDKARGKSDNVPSEEVVKKMKNYWRQLLNAKLITQRKFDNLTKAERGGLSELDKAGFIKRQLVETRQITKHVAQILDSRMNTKYDENDKLIREVKVITLKSKLVSDFRKDFQFYKVREINNYHHAHDAYLNAVVGTALIKKYPKLESEFVYGDYKVYDVRKMIAKSEQEIGKATAKYFFYSNIMNFFKTEITLANGEIRKRPLIETNGETGEIVWDKGRDFATVRKVLSMPQVNIVKKTEVQTGGFSKESILPKRNSDKLIARKKDWDPKKYGGFDSPTVAYSVLVVAKVEKGKSKKLKSVKELLGITIMERSSFEKNPIDFLEAKGYKEVKKDLIIKLPKYSLFELENGRKRMLASAGELQKGNELALPSKYVNFLYLASHYEKLKGSPEDNEQKQLFVEQHKHYLDEIIEQISEFSKRVILADANLDKVLSAYNKHRDKPIREQAENIIHLFTLTNLGAPAAFKYFDTTIDRKRYTSTKEVLDATLIHQSITGLYETRIDLSQLGGDGGGGSGSSGGGGGMDLLKPLTVERKGVKIKGYWNSQADITCVPKDLLQGEEPVRQQNVTTIHGTQEGDVYYVNLKIDGRRINTEVIGTTLDYAIITPGDVPWILKKPLELTIKLDLEEQQGTLLNNSILSKKGKEELKQLFEKYSALWQSWENQVGHRRIRPHKIATGTVKPTPQKQYHINPKAKPDIQIVINDLLKQGVLIQKESTMNTPVYPVPKPNGRWRMVLDYRAVNKVTPLIAVQNQHSYGILGSLFKGRYKTTIDLSNGFWAHPIVPEDYWITAFTWQGKQYCWTVLPQGFLNSPGLFTGDVVDLLQGIPNVEVYVDDVYISHDSEKEHLEYLDILFNRLKEAGYIISLKKSNIANSIVDFLGFQITNEGRGLTDTFKEKLENITAPTTLKQLQSILGLLNFARNFIPDFTELIAPLYALIPKSTKNYVPWQIEHSTTLETLITKLNGAEYLQGRKGDKTLIMKVNASYTTGYIRYYNEGEKKPISYVSIVFSKTELKFTELEKLLTTVHKGLLKALDLSMGQNIHVYSPIVSMQNIQKTPQTAKKALASRWLSWLSYLEDPRIRFFYDPQMPALKDLPAVDTGKDNKKHPSNFQHIFYTDGSAITSPTKEGHLNAGMGIVYFINKDGNLQKQQEWSISLGNHTAQFAEIAAFEFALKKCLPLGGNILVVTDSNYVAKAYNEELDVWASNGFVNNRKKPLKHISKWKSVADLKRLRPDVVVTHEPGHQKLDSSPHAYGNNLADQLATQASFKVHAGKRTADGSEFEKRTADGSEFESPKKKAKVE

SEQ ID NO: 730 - protein, 2173 aa, synthetic construct
MPAAKRVKLDGGDKKYSIGLDIGTNSVGWAVITDEYKVPSKKFKVLGNTDRHSIKKNLIGALLFDSGETAEATRLKRTARRRYTRRKNRICYLQEIFSNEMAKVDDSFFHRLEESFLVEEDKKHERHPIFGNIVDEVAYHEKYPTIYHLRKKLVDSTDKADLRLIYLALAHMIKFRGHFLIEGDLNPDNSDVDKLFIQLVQTYNQLFEENPINASGVDAKAILSARLSKSRRLENLIAQLPGEKKNGLFGNLIALSLGLTPNFKSNFDLAEDAKLQLSKDTYDDDLDNLLAQIGDQYADLFLAAKNLSDAILLSDILRVNTEITKAPLSASMIKRYDEHHQDLTLLKALVRQQLPEKYKEIFFDQSKNGYAGYIDGGASQEEFYKFIKPILEKMDGTEELLVKLNREDLLRKQRTFDNGSIPHQIHLGELHAILRRQEDFYPFLKDNREKIEKILTFRIPYYVGPLARGNSRFAWMTRKSEETITPWNFEEVVDKGASAQSFIERMTNFDKNLPNEKVLPKHSLLYEYFTVYNELTKVKYVTEGMRKPAFLSGEQKKAIVDLLFKTNRKVTVKQLKEDYFKKIECFDSVEISGVEDRFNASLGTYHDLLKIIKDKDFLDNEENEDILEDIVLTLTLFEDREMIEERLKTYAHLFDDKVMKQLKRRRYTGWGRLSRKLINGIRDKQSGKTILDFLKSDGFANRNFMQLIHDDSLTFKEDIQKAQVSGQGDSLHEHIANLAGSPAIKKGILQTVKVVDELVKVMGRHKPENIVIEMARENQTTQKGQKNSRERMKRIEEGIKELGSQILKEHPVENTQLQNEKLYLYYLQNGRDMYVDQELDINRLSDYDVDHIVPQSFLKDDSIDNKVLTRSDKARGKSDNVPSEEVVKKMKNYWRQLLNAKLITQRKFDNLTKAERGGLSELDKAGFIKRQLVETRQITKHVAQILDSRMNTKYDENDKLIREVKVITLKSKLVSDFRKDFQFYKVREINNYHHAHDAYLNAVVGTALIKKYPKLESEFVYGDYKVYDVRKMIAKSEQEIGKATAKYFFYSNIMNFFKTEITLANGEIRKRPLIETNGETGEIVWDKGRDFATVRKVLSMPQVNIVKKTEVQTGGFSKESILPKRNSDKLIARKKDWDPKKYGGFDSPTVAYSVLVVAKVEKGKSKKLKSVKELLGITIMERSSFEKNPIDFLEAKGYKEVKKDLIIKLPKYSLFELENGRKRMLASAGELQKGNELALPSKYVNFLYLASHYEKLKGSPEDNEQKQLFVEQHKHYLDEIIEQISEFSKRVILADANLDKVLSAYNKHRDKPIREQAENIIHLFTLTNLGAPAAFKYFDTTIDRKRYTSTKEVLDATLIHQSITGLYETRIDLSQLGGDGGGSSGGSEAAAKGGMDLLKPLTVERKGVKIKGYWNSQADITCVPKDLLQGEEPVRQQNVTTIHGTQEGDVYYVNLKIDGRRINTEVIGTTLDYAIITPGDVPWILKKPLELTIKLDLEEQQGTLLNNSILSKKGKEELKQLFEKYSALWQSWENQVGHRRIRPHKIATGTVKPTPQKQYHINPKAKPDIQIVINDLLKQGVLIQKESTMNTPVYPVPKPNGRWRMVLDYRAVNKVTPLIAVQNQHSYGILGSLFKGRYKTTIDLSNGFWAHPIVPEDYWITAFTWQGKQYCWTVLPQGFLNSPGLFTGDVVDLLQGIPNVEVYVDDVYISHDSEKEHLEYLDILFNRLKEAGYIISLKKSNIANSIVDFLGFQITNEGRGLTDTFKEKLENITAPTTLKQLQSILGLLNFARNFIPDFTELIAPLYALIPKSTKNYVPWQIEHSTTLETLITKLNGAEYLQGRKGDKTLIMKVNASYTTGYIRYYNEGEKKPISYVSIVFSKTELKFTELEKLLTTVHKGLLKALDLSMGQNIHVYSPIVSMQNIQKTPQTAKKALASRWLSWLSYLEDPRIRFFYDPQMPALKDLPAVDTGKDNKKHPSNFQHIFYTDGSAITSPTKEGHLNAGMGIVYFINKDGNLQKQQEWSISLGNHTAQFAEIAAFEFALKKCLPLGGNILVVTDSNYVAKAYNEELDVWASNGFVNNRKKPLKHISKWKSVADLKRLRPDVVVTHEPGHQKLDSSPHAYGNNLADQLATQASFKVHAGKRTADGSEFEKRTADGSEFESPKKKAKVE

SEQ ID NO: 731 - protein, 2171 aa, synthetic construct
MPAAKRVKLDGGDKKYSIGLDIGTNSVGWAVITDEYKVPSKKFKVLGNTDRHSIKKNLIGALLFDSGETAEATRLKRTARRRYTRRKNRICYLQEIFSNEMAKVDDSFFHRLEESFLVEEDKKHERHPIFGNIVDEVAYHEKYPTIYHLRKKLVDSTDKADLRLIYLALAHMIKFRGHFLIEGDLNPDNSDVDKLFIQLVQTYNQLFEENPINASGVDAKAILSARLSKSRRLENLIAQLPGEKKNGLFGNLIALSLGLTPNFKSNFDLAEDAKLQLSKDTYDDDLDNLLAQIGDQYADLFLAAKNLSDAILLSDILRVNTEITKAPLSASMIKRYDEHHQDLTLLKALVRQQLPEKYKEIFFDQSKNGYAGYIDGGASQEEFYKFIKPILEKMDGTEELLVKLNREDLLRKQRTFDNGSIPHQIHLGELHAILRRQEDFYPFLKDNREKIEKILTFRIPYYVGPLARGNSRFAWMTRKSEETITPWNFEEVVDKGASAQSFIERMTNFDKNLPNEKVLPKHSLLYEYFTVYNELTKVKYVTEGMRKPAFLSGEQKKAIVDLLFKTNRKVTVKQLKEDYFKKIECFDSVEISGVEDRFNASLGTYHDLLKIIKDKDFLDNEENEDILEDIVLTLTLFEDREMIEERLKTYAHLFDDKVMKQLKRRRYTGWGRLSRKLINGIRDKQSGKTILDFLKSDGFANRNFMQLIHDDSLTFKEDIQKAQVSGQGDSLHEHIANLAGSPAIKKGILQTVKVVDELVKVMGRHKPENIVIEMARENQTTQKGQKNSRERMKRIEEGIKELGSQILKEHPVENTQLQNEKLYLYYLQNGRDMYVDQELDINRLSDYDVDHIVPQSFLKDDSIDNKVLTRSDKARGKSDNVPSEEVVKKMKNYWRQLLNAKLITQRKFDNLTKAERGGLSELDKAGFIKRQLVETRQITKHVAQILDSRMNTKYDENDKLIREVKVITLKSKLVSDFRKDFQFYKVREINNYHHAHDAYLNAVVGTALIKKYPKLESEFVYGDYKVYDVRKMIAKSEQEIGKATAKYFFYSNIMNFFKTEITLANGEIRKRPLIETNGETGEIVWDKGRDFATVRKVLSMPQVNIVKKTEVQTGGFSKESILPKRNSDKLIARKKDWDPKKYGGFDSPTVAYSVLVVAKVEKGKSKKLKSVKELLGITIMERSSFEKNPIDFLEAKGYKEVKKDLIIKLPKYSLFELENGRKRMLASAGELQKGNELALPSKYVNFLYLASHYEKLKGSPEDNEQKQLFVEQHKHYLDEIIEQISEFSKRVILADANLDKVLSAYNKHRDKPIREQAENIIHLFTLTNLGAPAAFKYFDTTIDRKRYTSTKEVLDATLIHQSITGLYETRIDLSQLGGDGGGGSGGGPAPGGMDLLKPLTVERKGVKIKGYWNSQADITCVPKDLLQGEEPVRQQNVTTIHGTQEGDVYYVNLKIDGRRINTEVIGTTLDYAIITPGDVPWILKKPLELTIKLDLEEQQGTLLNNSILSKKGKEELKQLFEKYSALWQSWENQVGHRRIRPHKIATGTVKPTPQKQYHINPKAKPDIQIVINDLLKQGVLIQKESTMNTPVYPVPKPNGRWRMVLDYRAVNKVTPLIAVQNQHSYGILGSLFKGRYKTTIDLSNGFWAHPIVPEDYWITAFTWQGKQYCWTVLPQGFLNSPGLFTGDVVDLLQGIPNVEVYVDDVYISHDSEKEHLEYLDILFNRLKEAGYIISLKKSNIANSIVDFLGFQITNEGRGLTDTFKEKLENITAPTTLKQLQSILGLLNFARNFIPDFTELIAPLYALIPKSTKNYVPWQIEHSTTLETLITKLNGAEYLQGRKGDKTLIMKVNASYTTGYIRYYNEGEKKPISYVSIVFSKTELKFTELEKLLTTVHKGLLKALDLSMGQNIHVYSPIVSMQNIQKTPQTAKKALASRWLSWLSYLEDPRIRFFYDPQMPALKDLPAVDTGKDNKKHPSNFQHIFYTDGSAITSPTKEGHLNAGMGIVYFINKDGNLQKQQEWSISLGNHTAQFAEIAAFEFALKKCLPLGGNILVVTDSNYVAKAYNEELDVWASNGFVNNRKKPLKHISKWKSVADLKRLRPDVVVTHEPGHQKLDSSPHAYGNNLADQLATQASFKVHAGKRTADGSEFEKRTADGSEFESPKKKAKVE

SEQ ID NO: 732 - protein, 2173 aa, synthetic construct
MPAAKRVKLDGGDKKYSIGLDIGTNSVGWAVITDEYKVPSKKFKVLGNTDRHSIKKNLIGALLFDSGETAEATRLKRTARRRYTRRKNRICYLQEIFSNEMAKVDDSFFHRLEESFLVEEDKKHERHPIFGNIVDEVAYHEKYPTIYHLRKKLVDSTDKADLRLIYLALAHMIKFRGHFLIEGDLNPDNSDVDKLFIQLVQTYNQLFEENPINASGVDAKAILSARLSKSRRLENLIAQLPGEKKNGLFGNLIALSLGLTPNFKSNFDLAEDAKLQLSKDTYDDDLDNLLAQIGDQYADLFLAAKNLSDAILLSDILRVNTEITKAPLSASMIKRYDEHHQDLTLLKALVRQQLPEKYKEIFFDQSKNGYAGYIDGGASQEEFYKFIKPILEKMDGTEELLVKLNREDLLRKQRTFDNGSIPHQIHLGELHAILRRQEDFYPFLKDNREKIEKILTFRIPYYVGPLARGNSRFAWMTRKSEETITPWNFEEVVDKGASAQSFIERMTNFDKNLPNEKVLPKHSLLYEYFTVYNELTKVKYVTEGMRKPAFLSGEQKKAIVDLLFKTNRKVTVKQLKEDYFKKIECFDSVEISGVEDRFNASLGTYHDLLKIIKDKDFLDNEENEDILEDIVLTLTLFEDREMIEERLKTYAHLFDDKVMKQLKRRRYTGWGRLSRKLINGIRDKQSGKTILDFLKSDGFANRNFMQLIHDDSLTFKEDIQKAQVSGQGDSLHEHIANLAGSPAIKKGILQTVKVVDELVKVMGRHKPENIVIEMARENQTTQKGQKNSRERMKRIEEGIKELGSQILKEHPVENTQLQNEKLYLYYLQNGRDMYVDQELDINRLSDYDVDHIVPQSFLKDDSIDNKVLTRSDKARGKSDNVPSEEVVKKMKNYWRQLLNAKLITQRKFDNLTKAERGGLSELDKAGFIKRQLVETRQITKHVAQILDSRMNTKYDENDKLIREVKVITLKSKLVSDFRKDFQFYKVREINNYHHAHDAYLNAVVGTALIKKYPKLESEFVYGDYKVYDVRKMIAKSEQEIGKATAKYFFYSNIMNFFKTEITLANGEIRKRPLIETNGETGEIVWDKGRDFATVRKVLSMPQVNIVKKTEVQTGGFSKESILPKRNSDKLIARKKDWDPKKYGGFDSPTVAYSVLVVAKVEKGKSKKLKSVKELLGITIMERSSFEKNPIDFLEAKGYKEVKKDLIIKLPKYSLFELENGRKRMLASAGELQKGNELALPSKYVNFLYLASHYEKLKGSPEDNEQKQLFVEQHKHYLDEIIEQISEFSKRVILADANLDKVLSAYNKHRDKPIREQAENIIHLFTLTNLGAPAAFKYFDTTIDRKRYTSTKEVLDATLIHQSITGLYETRIDLSQLGGDGGGGGEAAAKPAPGGMDLLKPLTVERKGVKIKGYWNSQADITCVPKDLLQGEEPVRQQNVTTIHGTQEGDVYYVNLKIDGRRINTEVIGTTLDYAIITPGDVPWILKKPLELTIKLDLEEQQGTLLNNSILSKKGKEELKQLFEKYSALWQSWENQVGHRRIRPHKIATGTVKPTPQKQYHINPKAKPDIQIVINDLLKQGVLIQKESTMNTPVYPVPKPNGRWRMVLDYRAVNKVTPLIAVQNQHSYGILGSLFKGRYKTTIDLSNGFWAHPIVPEDYWITAFTWQGKQYCWTVLPQGFLNSPGLFTGDVVDLLQGIPNVEVYVDDVYISHDSEKEHLEYLDILFNRLKEAGYIISLKKSNIANSIVDFLGFQITNEGRGLTDTFKEKLENITAPTTLKQLQSILGLLNFARNFIPDFTELIAPLYALIPKSTKNYVPWQIEHSTTLETLITKLNGAEYLQGRKGDKTLIMKVNASYTTGYIRYYNEGEKKPISYVSIVFSKTELKFTELEKLLTTVHKGLLKALDLSMGQNIHVYSPIVSMQNIQKTPQTAKKALASRWLSWLSYLEDPRIRFFYDPQMPALKDLPAVDTGKDNKKHPSNFQHIFYTDGSAITSPTKEGHLNAGMGIVYFINKDGNLQKQQEWSISLGNHTAQFAEIAAFEFALKKCLPLGGNILVVTDSNYVAKAYNEELDVWASNGFVNNRKKPLKHISKWKSVADLKRLRPDVVVTHEPGHQKLDSSPHAYGNNLADQLATQASFKVHAGKRTADGSEFEKRTADGSEFESPKKKAKVE

SEQ ID NO: 733 - protein, 2167 aa, synthetic construct
MPAAKRVKLDGGDKKYSIGLDIGTNSVGWAVITDEYKVPSKKFKVLGNTDRHSIKKNLIGALLFDSGETAEATRLKRTARRRYTRRKNRICYLQEIFSNEMAKVDDSFFHRLEESFLVEEDKKHERHPIFGNIVDEVAYHEKYPTIYHLRKKLVDSTDKADLRLIYLALAHMIKFRGHFLIEGDLNPDNSDVDKLFIQLVQTYNQLFEENPINASGVDAKAILSARLSKSRRLENLIAQLPGEKKNGLFGNLIALSLGLTPNFKSNFDLAEDAKLQLSKDTYDDDLDNLLAQIGDQYADLFLAAKNLSDAILLSDILRVNTEITKAPLSASMIKRYDEHHQDLTLLKALVRQQLPEKYKEIFFDQSKNGYAGYIDGGASQEEFYKFIKPILEKMDGTEELLVKLNREDLLRKQRTFDNGSIPHQIHLGELHAILRRQEDFYPFLKDNREKIEKILTFRIPYYVGPLARGNSRFAWMTRKSEETITPWNFEEVVDKGASAQSFIERMTNFDKNLPNEKVLPKHSLLYEYFTVYNELTKVKYVTEGMRKPAFLSGEQKKAIVDLLFKTNRKVTVKQLKEDYFKKIECFDSVEISGVEDRFNASLGTYHDLLKIIKDKDFLDNEENEDILEDIVLTLTLFEDREMIEERLKTYAHLFDDKVMKQLKRRRYTGWGRLSRKLINGIRDKQSGKTILDFLKSDGFANRNFMQLIHDDSLTFKEDIQKAQVSGQGDSLHEHIANLAGSPAIKKGILQTVKVVDELVKVMGRHKPENIVIEMARENQTTQKGQKNSRERMKRIEEGIKELGSQILKEHPVENTQLQNEKLYLYYLQNGRDMYVDQELDINRLSDYDVDHIVPQSFLKDDSIDNKVLTRSDKARGKSDNVPSEEVVKKMKNYWRQLLNAKLITQRKFDNLTKAERGGLSELDKAGFIKRQLVETRQITKHVAQILDSRMNTKYDENDKLIREVKVITLKSKLVSDFRKDFQFYKVREINNYHHAHDAYLNAVVGTALIKKYPKLESEFVYGDYKVYDVRKMIAKSEQEIGKATAKYFFYSNIMNFFKTEITLANGEIRKRPLIETNGETGEIVWDKGRDFATVRKVLSMPQVNIVKKTEVQTGGFSKESILPKRNSDKLIARKKDWDPKKYGGFDSPTVAYSVLVVAKVEKGKSKKLKSVKELLGITIMERSSFEKNPIDFLEAKGYKEVKKDLIIKLPKYSLFELENGRKRMLASAGELQKGNELALPSKYVNFLYLASHYEKLKGSPEDNEQKQLFVEQHKHYLDEIIEQISEFSKRVILADANLDKVLSAYNKHRDKPIREQAENIIHLFTLTNLGAPAAFKYFDTTIDRKRYTSTKEVLDATLIHQSITGLYETRIDLSQLGGDGGGGGGGGGMDLLKPLTVERKGVKIKGYWNSQADITCVPKDLLQGEEPVRQQNVTTIHGTQEGDVYYVNLKIDGRRINTEVIGTTLDYAIITPGDVPWILKKPLELTIKLDLEEQQGTLLNNSILSKKGKEELKQLFEKYSALWQSWENQVGHRRIRPHKIATGTVKPTPQKQYHINPKAKPDIQIVINDLLKQGVLIQKESTMNTPVYPVPKPNGRWRMVLDYRAVNKVTPLIAVQNQHSYGILGSLFKGRYKTTIDLSNGFWAHPIVPEDYWITAFTWQGKQYCWTVLPQGFLNSPGLFTGDVVDLLQGIPNVEVYVDDVYISHDSEKEHLEYLDILFNRLKEAGYIISLKKSNIANSIVDFLGFQITNEGRGLTDTFKEKLENITAPTTLKQLQSILGLLNFARNFIPDFTELIAPLYALIPKSTKNYVPWQIEHSTTLETLITKLNGAEYLQGRKGDKTLIMKVNASYTTGYIRYYNEGEKKPISYVSIVFSKTELKFTELEKLLTTVHKGLLKALDLSMGQNIHVYSPIVSMQNIQKTPQTAKKALASRWLSWLSYLEDPRIRFFYDPQMPALKDLPAVDTGKDNKKHPSNFQHIFYTDGSAITSPTKEGHLNAGMGIVYFINKDGNLQKQQEWSISLGNHTAQFAEIAAFEFALKKCLPLGGNILVVTDSNYVAKAYNEELDVWASNGFVNNRKKPLKHISKWKSVADLKRLRPDVVVTHEPGHQKLDSSPHAYGNNLADQLATQASFKVHAGKRTADGSEFEKRTADGSEFESPKKKAKVE

SEQ ID NO: 734 - protein, 2165 aa, synthetic construct
MPAAKRVKLDGGDKKYSIGLDIGTNSVGWAVITDEYKVPSKKFKVLGNTDRHSIKKNLIGALLFDSGETAEATRLKRTARRRYTRRKNRICYLQEIFSNEMAKVDDSFFHRLEESFLVEEDKKHERHPIFGNIVDEVAYHEKYPTIYHLRKKLVDSTDKADLRLIYLALAHMIKFRGHFLIEGDLNPDNSDVDKLFIQLVQTYNQLFEENPINASGVDAKAILSARLSKSRRLENLIAQLPGEKKNGLFGNLIALSLGLTPNFKSNFDLAEDAKLQLSKDTYDDDLDNLLAQIGDQYADLFLAAKNLSDAILLSDILRVNTEITKAPLSASMIKRYDEHHQDLTLLKALVRQQLPEKYKEIFFDQSKNGYAGYIDGGASQEEFYKFIKPILEKMDGTEELLVKLNREDLLRKQRTFDNGSIPHQIHLGELHAILRRQEDFYPFLKDNREKIEKILTFRIPYYVGPLARGNSRFAWMTRKSEETITPWNFEEVVDKGASAQSFIERMTNFDKNLPNEKVLPKHSLLYEYFTVYNELTKVKYVTEGMRKPAFLSGEQKKAIVDLLFKTNRKVTVKQLKEDYFKKIECFDSVEISGVEDRFNASLGTYHDLLKIIKDKDFLDNEENEDILEDIVLTLTLFEDREMIEERLKTYAHLFDDKVMKQLKRRRYTGWGRLSRKLINGIRDKQSGKTILDFLKSDGFANRNFMQLIHDDSLTFKEDIQKAQVSGQGDSLHEHIANLAGSPAIKKGILQTVKVVDELVKVMGRHKPENIVIEMARENQTTQKGQKNSRERMKRIEEGIKELGSQILKEHPVENTQLQNEKLYLYYLQNGRDMYVDQELDINRLSDYDVDHIVPQSFLKDDSIDNKVLTRSDKARGKSDNVPSEEVVKKMKNYWRQLLNAKLITQRKFDNLTKAERGGLSELDKAGFIKRQLVETRQITKHVAQILDSRMNTKYDENDKLIREVKVITLKSKLVSDFRKDFQFYKVREINNYHHAHDAYLNAVVGTALIKKYPKLESEFVYGDYKVYDVRKMIAKSEQEIGKATAKYFFYSNIMNFFKTEITLANGEIRKRPLIETNGETGEIVWDKGRDFATVRKVLSMPQVNIVKKTEVQTGGFSKESILPKRNSDKLIARKKDWDPKKYGGFDSPTVAYSVLVVAKVEKGKSKKLKSVKELLGITIMERSSFEKNPIDFLEAKGYKEVKKDLIIKLPKYSLFELENGRKRMLASAGELQKGNELALPSKYVNFLYLASHYEKLKGSPEDNEQKQLFVEQHKHYLDEIIEQISEFSKRVILADANLDKVLSAYNKHRDKPIREQAENIIHLFTLTNLGAPAAFKYFDTTIDRKRYTSTKEVLDATLIHQSITGLYETRIDLSQLGGDGGGGGGGMDLLKPLTVERKGVKIKGYWNSQADITCVPKDLLQGEEPVRQQNVTTIHGTQEGDVYYVNLKIDGRRINTEVIGTTLDYAIITPGDVPWILKKPLELTIKLDLEEQQGTLLNNSILSKKGKEELKQLFEKYSALWQSWENQVGHRRIRPHKIATGTVKPTPQKQYHINPKAKPDIQIVINDLLKQGVLIQKESTMNTPVYPVPKPNGRWRMVLDYRAVNKVTPLIAVQNQHSYGILGSLFKGRYKTTIDLSNGFWAHPIVPEDYWITAFTWQGKQYCWTVLPQGFLNSPGLFTGDVVDLLQGIPNVEVYVDDVYISHDSEKEHLEYLDILFNRLKEAGYIISLKKSNIANSIVDFLGFQITNEGRGLTDTFKEKLENITAPTTLKQLQSILGLLNFARNFIPDFTELIAPLYALIPKSTKNYVPWQIEHSTTLETLITKLNGAEYLQGRKGDKTLIMKVNASYTTGYIRYYNEGEKKPISYVSIVFSKTELKFTELEKLLTTVHKGLLKALDLSMGQNIHVYSPIVSMQNIQKTPQTAKKALASRWLSWLSYLEDPRIRFFYDPQMPALKDLPAVDTGKDNKKHPSNFQHIFYTDGSAITSPTKEGHLNAGMGIVYFINKDGNLQKQQEWSISLGNHTAQFAEIAAFEFALKKCLPLGGNILVVTDSNYVAKAYNEELDVWASNGFVNNRKKPLKHISKWKSVADLKRLRPDVVVTHEPGHQKLDSSPHAYGNNLADQLATQASFKVHAGKRTADGSEFEKRTADGSEFESPKKKAKVE

SEQ ID NO: 735 - protein, 2167 aa, synthetic construct
MPAAKRVKLDGGDKKYSIGLDIGTNSVGWAVITDEYKVPSKKFKVLGNTDRHSIKKNLIGALLFDSGETAEATRLKRTARRRYTRRKNRICYLQEIFSNEMAKVDDSFFHRLEESFLVEEDKKHERHPIFGNIVDEVAYHEKYPTIYHLRKKLVDSTDKADLRLIYLALAHMIKFRGHFLIEGDLNPDNSDVDKLFIQLVQTYNQLFEENPINASGVDAKAILSARLSKSRRLENLIAQLPGEKKNGLFGNLIALSLGLTPNFKSNFDLAEDAKLQLSKDTYDDDLDNLLAQIGDQYADLFLAAKNLSDAILLSDILRVNTEITKAPLSASMIKRYDEHHQDLTLLKALVRQQLPEKYKEIFFDQSKNGYAGYIDGGASQEEFYKFIKPILEKMDGTEELLVKLNREDLLRKQRTFDNGSIPHQIHLGELHAILRRQEDFYPFLKDNREKIEKILTFRIPYYVGPLARGNSRFAWMTRKSEETITPWNFEEVVDKGASAQSFIERMTNFDKNLPNEKVLPKHSLLYEYFTVYNELTKVKYVTEGMRKPAFLSGEQKKAIVDLLFKTNRKVTVKQLKEDYFKKIECFDSVEISGVEDRFNASLGTYHDLLKIIKDKDFLDNEENEDILEDIVLTLTLFEDREMIEERLKTYAHLFDDKVMKQLKRRRYTGWGRLSRKLINGIRDKQSGKTILDFLKSDGFANRNFMQLIHDDSLTFKEDIQKAQVSGQGDSLHEHIANLAGSPAIKKGILQTVKVVDELVKVMGRHKPENIVIEMARENQTTQKGQKNSRERMKRIEEGIKELGSQILKEHPVENTQLQNEKLYLYYLQNGRDMYVDQELDINRLSDYDVDHIVPQSFLKDDSIDNKVLTRSDKARGKSDNVPSEEVVKKMKNYWRQLLNAKLITQRKFDNLTKAERGGLSELDKAGFIKRQLVETRQITKHVAQILDSRMNTKYDENDKLIREVKVITLKSKLVSDFRKDFQFYKVREINNYHHAHDAYLNAVVGTALIKKYPKLESEFVYGDYKVYDVRKMIAKSEQEIGKATAKYFFYSNIMNFFKTEITLANGEIRKRPLIETNGETGEIVWDKGRDFATVRKVLSMPQVNIVKKTEVQTGGFSKESILPKRNSDKLIARKKDWDPKKYGGFDSPTVAYSVLVVAKVEKGKSKKLKSVKELLGITIMERSSFEKNPIDFLEAKGYKEVKKDLIIKLPKYSLFELENGRKRMLASAGELQKGNELALPSKYVNFLYLASHYEKLKGSPEDNEQKQLFVEQHKHYLDEIIEQISEFSKRVILADANLDKVLSAYNKHRDKPIREQAENIIHLFTLTNLGAPAAFKYFDTTIDRKRYTSTKEVLDATLIHQSITGLYETRIDLSQLGGDGGPAPAPGGMDLLKPLTVERKGVKIKGYWNSQADITCVPKDLLQGEEPVRQQNVTTIHGTQEGDVYYVNLKIDGRRINTEVIGTTLDYAIITPGDVPWILKKPLELTIKLDLEEQQGTLLNNSILSKKGKEELKQLFEKYSALWQSWENQVGHRRIRPHKIATGTVKPTPQKQYHINPKAKPDIQIVINDLLKQGVLIQKESTMNTPVYPVPKPNGRWRMVLDYRAVNKVTPLIAVQNQHSYGILGSLFKGRYKTTIDLSNGFWAHPIVPEDYWITAFTWQGKQYCWTVLPQGFLNSPGLFTGDVVDLLQGIPNVEVYVDDVYISHDSEKEHLEYLDILFNRLKEAGYIISLKKSNIANSIVDFLGFQITNEGRGLTDTFKEKLENITAPTTLKQLQSILGLLNFARNFIPDFTELIAPLYALIPKSTKNYVPWQIEHSTTLETLITKLNGAEYLQGRKGDKTLIMKVNASYTTGYIRYYNEGEKKPISYVSIVFSKTELKFTELEKLLTTVHKGLLKALDLSMGQNIHVYSPIVSMQNIQKTPQTAKKALASRWLSWLSYLEDPRIRFFYDPQMPALKDLPAVDTGKDNKKHPSNFQHIFYTDGSAITSPTKEGHLNAGMGIVYFINKDGNLQKQQEWSISLGNHTAQFAEIAAFEFALKKCLPLGGNILVVTDSNYVAKAYNEELDVWASNGFVNNRKKPLKHISKWKSVADLKRLRPDVVVTHEPGHQKLDSSPHAYGNNLADQLATQASFKVHAGKRTADGSEFEKRTADGSEFESPKKKAKVE

SEQ ID NO: 736 - protein, 2171 aa, synthetic construct
MPAAKRVKLDGGDKKYSIGLDIGTNSVGWAVITDEYKVPSKKFKVLGNTDRHSIKKNLIGALLFDSGETAEATRLKRTARRRYTRRKNRICYLQEIFSNEMAKVDDSFFHRLEESFLVEEDKKHERHPIFGNIVDEVAYHEKYPTIYHLRKKLVDSTDKADLRLIYLALAHMIKFRGHFLIEGDLNPDNSDVDKLFIQLVQTYNQLFEENPINASGVDAKAILSARLSKSRRLENLIAQLPGEKKNGLFGNLIALSLGLTPNFKSNFDLAEDAKLQLSKDTYDDDLDNLLAQIGDQYADLFLAAKNLSDAILLSDILRVNTEITKAPLSASMIKRYDEHHQDLTLLKALVRQQLPEKYKEIFFDQSKNGYAGYIDGGASQEEFYKFIKPILEKMDGTEELLVKLNREDLLRKQRTFDNGSIPHQIHLGELHAILRRQEDFYPFLKDNREKIEKILTFRIPYYVGPLARGNSRFAWMTRKSEETITPWNFEEVVDKGASAQSFIERMTNFDKNLPNEKVLPKHSLLYEYFTVYNELTKVKYVTEGMRKPAFLSGEQKKAIVDLLFKTNRKVTVKQLKEDYFKKIECFDSVEISGVEDRFNASLGTYHDLLKIIKDKDFLDNEENEDILEDIVLTLTLFEDREMIEERLKTYAHLFDDKVMKQLKRRRYTGWGRLSRKLINGIRDKQSGKTILDFLKSDGFANRNFMQLIHDDSLTFKEDIQKAQVSGQGDSLHEHIANLAGSPAIKKGILQTVKVVDELVKVMGRHKPENIVIEMARENQTTQKGQKNSRERMKRIEEGIKELGSQILKEHPVENTQLQNEKLYLYYLQNGRDMYVDQELDINRLSDYDVDHIVPQSFLKDDSIDNKVLTRSDKARGKSDNVPSEEVVKKMKNYWRQLLNAKLITQRKFDNLTKAERGGLSELDKAGFIKRQLVETRQITKHVAQILDSRMNTKYDENDKLIREVKVITLKSKLVSDFRKDFQFYKVREINNYHHAHDAYLNAVVGTALIKKYPKLESEFVYGDYKVYDVRKMIAKSEQEIGKATAKYFFYSNIMNFFKTEITLANGEIRKRPLIETNGETGEIVWDKGRDFATVRKVLSMPQVNIVKKTEVQTGGFSKESILPKRNSDKLIARKKDWDPKKYGGFDSPTVAYSVLVVAKVEKGKSKKLKSVKELLGITIMERSSFEKNPIDFLEAKGYKEVKKDLIIKLPKYSLFELENGRKRMLASAGELQKGNELALPSKYVNFLYLASHYEKLKGSPEDNEQKQLFVEQHKHYLDEIIEQISEFSKRVILADANLDKVLSAYNKHRDKPIREQAENIIHLFTLTNLGAPAAFKYFDTTIDRKRYTSTKEVLDATLIHQSITGLYETRIDLSQLGGDGGGSSGGGGGSGGMDLLKPLTVERKGVKIKGYWNSQADITCVPKDLLQGEEPVRQQNVTTIHGTQEGDVYYVNLKIDGRRINTEVIGTTLDYAIITPGDVPWILKKPLELTIKLDLEEQQGTLLNNSILSKKGKEELKQLFEKYSALWQSWENQVGHRRIRPHKIATGTVKPTPQKQYHINPKAKPDIQIVINDLLKQGVLIQKESTMNTPVYPVPKPNGRWRMVLDYRAVNKVTPLIAVQNQHSYGILGSLFKGRYKTTIDLSNGFWAHPIVPEDYWITAFTWQGKQYCWTVLPQGFLNSPGLFTGDVVDLLQGIPNVEVYVDDVYISHDSEKEHLEYLDILFNRLKEAGYIISLKKSNIANSIVDFLGFQITNEGRGLTDTFKEKLENITAPTTLKQLQSILGLLNFARNFIPDFTELIAPLYALIPKSTKNYVPWQIEHSTTLETLITKLNGAEYLQGRKGDKTLIMKVNASYTTGYIRYYNEGEKKPISYVSIVFSKTELKFTELEKLLTTVHKGLLKALDLSMGQNIHVYSPIVSMQNIQKTPQTAKKALASRWLSWLSYLEDPRIRFFYDPQMPALKDLPAVDTGKDNKKHPSNFQHIFYTDGSAITSPTKEGHLNAGMGIVYFINKDGNLQKQQEWSISLGNHTAQFAEIAAFEFALKKCLPLGGNILVVTDSNYVAKAYNEELDVWASNGFVNNRKKPLKHISKWKSVADLKRLRPDVVVTHEPGHQKLDSSPHAYGNNLADQLATQASFKVHAGKRTADGSEFEKRTADGSEFESPKKKAKVE

SEQ ID NO: 737 - protein, 2171 aa, synthetic construct
MPAAKRVKLDGGDKKYSIGLDIGTNSVGWAVITDEYKVPSKKFKVLGNTDRHSIKKNLIGALLFDSGETAEATRLKRTARRRYTRRKNRICYLQEIFSNEMAKVDDSFFHRLEESFLVEEDKKHERHPIFGNIVDEVAYHEKYPTIYHLRKKLVDSTDKADLRLIYLALAHMIKFRGHFLIEGDLNPDNSDVDKLFIQLVQTYNQLFEENPINASGVDAKAILSARLSKSRRLENLIAQLPGEKKNGLFGNLIALSLGLTPNFKSNFDLAEDAKLQLSKDTYDDDLDNLLAQIGDQYADLFLAAKNLSDAILLSDILRVNTEITKAPLSASMIKRYDEHHQDLTLLKALVRQQLPEKYKEIFFDQSKNGYAGYIDGGASQEEFYKFIKPILEKMDGTEELLVKLNREDLLRKQRTFDNGSIPHQIHLGELHAILRRQEDFYPFLKDNREKIEKILTFRIPYYVGPLARGNSRFAWMTRKSEETITPWNFEEVVDKGASAQSFIERMTNFDKNLPNEKVLPKHSLLYEYFTVYNELTKVKYVTEGMRKPAFLSGEQKKAIVDLLFKTNRKVTVKQLKEDYFKKIECFDSVEISGVEDRFNASLGTYHDLLKIIKDKDFLDNEENEDILEDIVLTLTLFEDREMIEERLKTYAHLFDDKVMKQLKRRRYTGWGRLSRKLINGIRDKQSGKTILDFLKSDGFANRNFMQLIHDDSLTFKEDIQKAQVSGQGDSLHEHIANLAGSPAIKKGILQTVKVVDELVKVMGRHKPENIVIEMARENQTTQKGQKNSRERMKRIEEGIKELGSQILKEHPVENTQLQNEKLYLYYLQNGRDMYVDQELDINRLSDYDVDHIVPQSFLKDDSIDNKVLTRSDKARGKSDNVPSEEVVKKMKNYWRQLLNAKLITQRKFDNLTKAERGGLSELDKAGFIKRQLVETRQITKHVAQILDSRMNTKYDENDKLIREVKVITLKSKLVSDFRKDFQFYKVREINNYHHAHDAYLNAVVGTALIKKYPKLESEFVYGDYKVYDVRKMIAKSEQEIGKATAKYFFYSNIMNFFKTEITLANGEIRKRPLIETNGETGEIVWDKGRDFATVRKVLSMPQVNIVKKTEVQTGGFSKESILPKRNSDKLIARKKDWDPKKYGGFDSPTVAYSVLVVAKVEKGKSKKLKSVKELLGITIMERSSFEKNPIDFLEAKGYKEVKKDLIIKLPKYSLFELENGRKRMLASAGELQKGNELALPSKYVNFLYLASHYEKLKGSPEDNEQKQLFVEQHKHYLDEIIEQISEFSKRVILADANLDKVLSAYNKHRDKPIREQAENIIHLFTLTNLGAPAAFKYFDTTIDRKRYTSTKEVLDATLIHQSITGLYETRIDLSQLGGDGGPAPGGSGSSGGMDLLKPLTVERKGVKIKGYWNSQADITCVPKDLLQGEEPVRQQNVTTIHGTQEGDVYYVNLKIDGRRINTEVIGTTLDYAIITPGDVPWILKKPLELTIKLDLEEQQGTLLNNSILSKKGKEELKQLFEKYSALWQSWENQVGHRRIRPHKIATGTVKPTPQKQYHINPKAKPDIQIVINDLLKQGVLIQKESTMNTPVYPVPKPNGRWRMVLDYRAVNKVTPLIAVQNQHSYGILGSLFKGRYKTTIDLSNGFWAHPIVPEDYWITAFTWQGKQYCWTVLPQGFLNSPGLFTGDVVDLLQGIPNVEVYVDDVYISHDSEKEHLEYLDILFNRLKEAGYIISLKKSNIANSIVDFLGFQITNEGRGLTDTFKEKLENITAPTTLKQLQSILGLLNFARNFIPDFTELIAPLYALIPKSTKNYVPWQIEHSTTLETLITKLNGAEYLQGRKGDKTLIMKVNASYTTGYIRYYNEGEKKPISYVSIVFSKTELKFTELEKLLTTVHKGLLKALDLSMGQNIHVYSPIVSMQNIQKTPQTAKKALASRWLSWLSYLEDPRIRFFYDPQMPALKDLPAVDTGKDNKKHPSNFQHIFYTDGSAITSPTKEGHLNAGMGIVYFINKDGNLQKQQEWSISLGNHTAQFAEIAAFEFALKKCLPLGGNILVVTDSNYVAKAYNEELDVWASNGFVNNRKKPLKHISKWKSVADLKRLRPDVVVTHEPGHQKLDSSPHAYGNNLADQLATQASFKVHAGKRTADGSEFEKRTADGSEFESPKKKAKVE

SEQ ID NO: 738 - protein, 2185 aa, synthetic construct
MPAAKRVKLDGGDKKYSIGLDIGTNSVGWAVITDEYKVPSKKFKVLGNTDRHSIKKNLIGALLFDSGETAEATRLKRTARRRYTRRKNRICYLQEIFSNEMAKVDDSFFHRLEESFLVEEDKKHERHPIFGNIVDEVAYHEKYPTIYHLRKKLVDSTDKADLRLIYLALAHMIKFRGHFLIEGDLNPDNSDVDKLFIQLVQTYNQLFEENPINASGVDAKAILSARLSKSRRLENLIAQLPGEKKNGLFGNLIALSLGLTPNFKSNFDLAEDAKLQLSKDTYDDDLDNLLAQIGDQYADLFLAAKNLSDAILLSDILRVNTEITKAPLSASMIKRYDEHHQDLTLLKALVRQQLPEKYKEIFFDQSKNGYAGYIDGGASQEEFYKFIKPILEKMDGTEELLVKLNREDLLRKQRTFDNGSIPHQIHLGELHAILRRQEDFYPFLKDNREKIEKILTFRIPYYVGPLARGNSRFAWMTRKSEETITPWNFEEVVDKGASAQSFIERMTNFDKNLPNEKVLPKHSLLYEYFTVYNELTKVKYVTEGMRKPAFLSGEQKKAIVDLLFKTNRKVTVKQLKEDYFKKIECFDSVEISGVEDRFNASLGTYHDLLKIIKDKDFLDNEENEDILEDIVLTLTLFEDREMIEERLKTYAHLFDDKVMKQLKRRRYTGWGRLSRKLINGIRDKQSGKTILDFLKSDGFANRNFMQLIHDDSLTFKEDIQKAQVSGQGDSLHEHIANLAGSPAIKKGILQTVKVVDELVKVMGRHKPENIVIEMARENQTTQKGQKNSRERMKRIEEGIKELGSQILKEHPVENTQLQNEKLYLYYLQNGRDMYVDQELDINRLSDYDVDHIVPQSFLKDDSIDNKVLTRSDKARGKSDNVPSEEVVKKMKNYWRQLLNAKLITQRKFDNLTKAERGGLSELDKAGFIKRQLVETRQITKHVAQILDSRMNTKYDENDKLIREVKVITLKSKLVSDFRKDFQFYKVREINNYHHAHDAYLNAVVGTALIKKYPKLESEFVYGDYKVYDVRKMIAKSEQEIGKATAKYFFYSNIMNFFKTEITLANGEIRKRPLIETNGETGEIVWDKGRDFATVRKVLSMPQVNIVKKTEVQTGGFSKESILPKRNSDKLIARKKDWDPKKYGGFDSPTVAYSVLVVAKVEKGKSKKLKSVKELLGITIMERSSFEKNPIDFLEAKGYKEVKKDLIIKLPKYSLFELENGRKRMLASAGELQKGNELALPSKYVNFLYLASHYEKLKGSPEDNEQKQLFVEQHKHYLDEIIEQISEFSKRVILADANLDKVLSAYNKHRDKPIREQAENIIHLFTLTNLGAPAAFKYFDTTIDRKRYTSTKEVLDATLIHQSITGLYETRIDLSQLGGDGGGGGGSGGGGSGGGGSGGGGSGGMNPLQLLQPLPAEVKGTKLLAHWNSGATITCIPESFLEDEQPIKQTLIKTIHGEKQQNVYYLTFKVKGRKVEAEVIASPYEYILLSPTDVPWLTQQPLQLTILVPLQEYQDRILNKTALPEEQKQQLKALFTKYDNLWQHWENQVGHRKIRPHNIATGDYPPRPQKQYPINPKAKPSIQIVIDDLLKQGVLTPQNSTMNTPVYPVPKPDGRWRMVLDYREVNKTIPLTAAQNQHSAGILATIVRQKYKTTLDLANGFWAHPITPDSYWLTAFTWQGKQYCWTRLPQGFLNSPALFNADAVDLLKEVPNVQVYVDDIYLSHDNPHEHIQQLEKVFQILLQAGYVVSLKKSEIGQRTVEFLGFNITKEGRGLTDTFKTKLLNVTPPKDLKQLQSILGKLNFARNFIPNFAELVQTLYNLIASSPGKYIEWTEDNTKQLNKVIEALNTASNLEERLPDQRLVIKVNTSPSAGYVRYYNESGKKPIMYLNYVFSKAELKFSMLEKLLTTMHKALIKAMDLAMGQEILVYSPIVSMTKIQKTPLPERKALPIRWITWMTYLEDPRIQFHYDKTLPELKHIPDVYTSSIPPLKHPSQYEGVFCTDGSAIKSPDPTKSNNAGMGIVHAIYNPEYKILNQWSIPLGHHTAQMAEIAAVEFACKKALKVPGPVLVITDSFYVAESANKELPYWKSNGFVNNKKEPLKHISKWKSIAECLSIKPDITIQHEKGHQPINTSIHTEGNALADKLATQGSYVVNAGKRTADGSEFEKRTADGSEFESPKKKAKVE

SEQ ID NO: 739 - protein, 2175 aa, synthetic construct
MPAAKRVKLDGGDKKYSIGLDIGTNSVGWAVITDEYKVPSKKFKVLGNTDRHSIKKNLIGALLFDSGETAEATRLKRTARRRYTRRKNRICYLQEIFSNEMAKVDDSFFHRLEESFLVEEDKKHERHPIFGNIVDEVAYHEKYPTIYHLRKKLVDSTDKADLRLIYLALAHMIKFRGHFLIEGDLNPDNSDVDKLFIQLVQTYNQLFEENPINASGVDAKAILSARLSKSRRLENLIAQLPGEKKNGLFGNLIALSLGLTPNFKSNFDLAEDAKLQLSKDTYDDDLDNLLAQIGDQYADLFLAAKNLSDAILLSDILRVNTEITKAPLSASMIKRYDEHHQDLTLLKALVRQQLPEKYKEIFFDQSKNGYAGYIDGGASQEEFYKFIKPILEKMDGTEELLVKLNREDLLRKQRTFDNGSIPHQIHLGELHAILRRQEDFYPFLKDNREKIEKILTFRIPYYVGPLARGNSRFAWMTRKSEETITPWNFEEVVDKGASAQSFIERMTNFDKNLPNEKVLPKHSLLYEYFTVYNELTKVKYVTEGMRKPAFLSGEQKKAIVDLLFKTNRKVTVKQLKEDYFKKIECFDSVEISGVEDRFNASLGTYHDLLKIIKDKDFLDNEENEDILEDIVLTLTLFEDREMIEERLKTYAHLFDDKVMKQLKRRRYTGWGRLSRKLINGIRDKQSGKTILDFLKSDGFANRNFMQLIHDDSLTFKEDIQKAQVSGQGDSLHEHIANLAGSPAIKKGILQTVKVVDELVKVMGRHKPENIVIEMARENQTTQKGQKNSRERMKRIEEGIKELGSQILKEHPVENTQLQNEKLYLYYLQNGRDMYVDQELDINRLSDYDVDHIVPQSFLKDDSIDNKVLTRSDKARGKSDNVPSEEVVKKMKNYWRQLLNAKLITQRKFDNLTKAERGGLSELDKAGFIKRQLVETRQITKHVAQILDSRMNTKYDENDKLIREVKVITLKSKLVSDFRKDFQFYKVREINNYHHAHDAYLNAVVGTALIKKYPKLESEFVYGDYKVYDVRKMIAKSEQEIGKATAKYFFYSNIMNFFKTEITLANGEIRKRPLIETNGETGEIVWDKGRDFATVRKVLSMPQVNIVKKTEVQTGGFSKESILPKRNSDKLIARKKDWDPKKYGGFDSPTVAYSVLVVAKVEKGKSKKLKSVKELLGITIMERSSFEKNPIDFLEAKGYKEVKKDLIIKLPKYSLFELENGRKRMLASAGELQKGNELALPSKYVNFLYLASHYEKLKGSPEDNEQKQLFVEQHKHYLDEIIEQISEFSKRVILADANLDKVLSAYNKHRDKPIREQAENIIHLFTLTNLGAPAAFKYFDTTIDRKRYTSTKEVLDATLIHQSITGLYETRIDLSQLGGDGGGGGGSGGGGSGGMNPLQLLQPLPAEVKGTKLLAHWNSGATITCIPESFLEDEQPIKQTLIKTIHGEKQQNVYYLTFKVKGRKVEAEVIASPYEYILLSPTDVPWLTQQPLQLTILVPLQEYQDRILNKTALPEEQKQQLKALFTKYDNLWQHWENQVGHRKIRPHNIATGDYPPRPQKQYPINPKAKPSIQIVIDDLLKQGVLTPQNSTMNTPVYPVPKPDGRWRMVLDYREVNKTIPLTAAQNQHSAGILATIVRQKYKTTLDLANGFWAHPITPDSYWLTAFTWQGKQYCWTRLPQGFLNSPALFNADAVDLLKEVPNVQVYVDDIYLSHDNPHEHIQQLEKVFQILLQAGYVVSLKKSEIGQRTVEFLGFNITKEGRGLTDTFKTKLLNVTPPKDLKQLQSILGKLNFARNFIPNFAELVQTLYNLIASSPGKYIEWTEDNTKQLNKVIEALNTASNLEERLPDQRLVIKVNTSPSAGYVRYYNESGKKPIMYLNYVFSKAELKFSMLEKLLTTMHKALIKAMDLAMGQEILVYSPIVSMTKIQKTPLPERKALPIRWITWMTYLEDPRIQFHYDKTLPELKHIPDVYTSSIPPLKHPSQYEGVFCTDGSAIKSPDPTKSNNAGMGIVHAIYNPEYKILNQWSIPLGHHTAQMAEIAAVEFACKKALKVPGPVLVITDSFYVAESANKELPYWKSNGFVNNKKEPLKHISKWKSIAECLSIKPDITIQHEKGHQPINTSIHTEGNALADKLATQGSYVVNAGKRTADGSEFEKRTADGSEFESPKKKAKVE

SEQ ID NO: 740 - protein, 2176 aa, synthetic construct
MPAAKRVKLDGGDKKYSIGLDIGTNSVGWAVITDEYKVPSKKFKVLGNTDRHSIKKNLIGALLFDSGETAEATRLKRTARRRYTRRKNRICYLQEIFSNEMAKVDDSFFHRLEESFLVEEDKKHERHPIFGNIVDEVAYHEKYPTIYHLRKKLVDSTDKADLRLIYLALAHMIKFRGHFLIEGDLNPDNSDVDKLFIQLVQTYNQLFEENPINASGVDAKAILSARLSKSRRLENLIAQLPGEKKNGLFGNLIALSLGLTPNFKSNFDLAEDAKLQLSKDTYDDDLDNLLAQIGDQYADLFLAAKNLSDAILLSDILRVNTEITKAPLSASMIKRYDEHHQDLTLLKALVRQQLPEKYKEIFFDQSKNGYAGYIDGGASQEEFYKFIKPILEKMDGTEELLVKLNREDLLRKQRTFDNGSIPHQIHLGELHAILRRQEDFYPFLKDNREKIEKILTFRIPYYVGPLARGNSRFAWMTRKSEETITPWNFEEVVDKGASAQSFIERMTNFDKNLPNEKVLPKHSLLYEYFTVYNELTKVKYVTEGMRKPAFLSGEQKKAIVDLLFKTNRKVTVKQLKEDYFKKIECFDSVEISGVEDRFNASLGTYHDLLKIIKDKDFLDNEENEDILEDIVLTLTLFEDREMIEERLKTYAHLFDDKVMKQLKRRRYTGWGRLSRKLINGIRDKQSGKTILDFLKSDGFANRNFMQLIHDDSLTFKEDIQKAQVSGQGDSLHEHIANLAGSPAIKKGILQTVKVVDELVKVMGRHKPENIVIEMARENQTTQKGQKNSRERMKRIEEGIKELGSQILKEHPVENTQLQNEKLYLYYLQNGRDMYVDQELDINRLSDYDVDHIVPQSFLKDDSIDNKVLTRSDKARGKSDNVPSEEVVKKMKNYWRQLLNAKLITQRKFDNLTKAERGGLSELDKAGFIKRQLVETRQITKHVAQILDSRMNTKYDENDKLIREVKVITLKSKLVSDFRKDFQFYKVREINNYHHAHDAYLNAVVGTALIKKYPKLESEFVYGDYKVYDVRKMIAKSEQEIGKATAKYFFYSNIMNFFKTEITLANGEIRKRPLIETNGETGEIVWDKGRDFATVRKVLSMPQVNIVKKTEVQTGGFSKESILPKRNSDKLIARKKDWDPKKYGGFDSPTVAYSVLVVAKVEKGKSKKLKSVKELLGITIMERSSFEKNPIDFLEAKGYKEVKKDLIIKLPKYSLFELENGRKRMLASAGELQKGNELALPSKYVNFLYLASHYEKLKGSPEDNEQKQLFVEQHKHYLDEIIEQISEFSKRVILADANLDKVLSAYNKHRDKPIREQAENIIHLFTLTNLGAPAAFKYFDTTIDRKRYTSTKEVLDATLIHQSITGLYETRIDLSQLGGDGGGGGEAAAKGGSGGMNPLQLLQPLPAEVKGTKLLAHWNSGATITCIPESFLEDEQPIKQTLIKTIHGEKQQNVYYLTFKVKGRKVEAEVIASPYEYILLSPTDVPWLTQQPLQLTILVPLQEYQDRILNKTALPEEQKQQLKALFTKYDNLWQHWENQVGHRKIRPHNIATGDYPPRPQKQYPINPKAKPSIQIVIDDLLKQGVLTPQNSTMNTPVYPVPKPDGRWRMVLDYREVNKTIPLTAAQNQHSAGILATIVRQKYKTTLDLANGFWAHPITPDSYWLTAFTWQGKQYCWTRLPQGFLNSPALFNADAVDLLKEVPNVQVYVDDIYLSHDNPHEHIQQLEKVFQILLQAGYVVSLKKSEIGQRTVEFLGFNITKEGRGLTDTFKTKLLNVTPPKDLKQLQSILGKLNFARNFIPNFAELVQTLYNLIASSPGKYIEWTEDNTKQLNKVIEALNTASNLEERLPDQRLVIKVNTSPSAGYVRYYNESGKKPIMYLNYVFSKAELKFSMLEKLLTTMHKALIKAMDLAMGQEILVYSPIVSMTKIQKTPLPERKALPIRWITWMTYLEDPRIQFHYDKTLPELKHIPDVYTSSIPPLKHPSQYEGVFCTDGSAIKSPDPTKSNNAGMGIVHAIYNPEYKILNQWSIPLGHHTAQMAEIAAVEFACKKALKVPGPVLVITDSFYVAESANKELPYWKSNGFVNNKKEPLKHISKWKSIAECLSIKPDITIQHEKGHQPINTSIHTEGNALADKLATQGSYVVNAGKRTADGSEFEKRTADGSEFESPKKKAKVE

SEQ ID NO: 741 - protein, 2012 aa, synthetic construct
MPAAKRVKLDGGDKKYSIGLDIGTNSVGWAVITDEYKVPSKKFKVLGNTDRHSIKKNLIGALLFDSGETAEATRLKRTARRRYTRRKNRICYLQEIFSNEMAKVDDSFFHRLEESFLVEEDKKHERHPIFGNIVDEVAYHEKYPTIYHLRKKLVDSTDKADLRLIYLALAHMIKFRGHFLIEGDLNPDNSDVDKLFIQLVQTYNQLFEENPINASGVDAKAILSARLSKSRRLENLIAQLPGEKKNGLFGNLIALSLGLTPNFKSNFDLAEDAKLQLSKDTYDDDLDNLLAQIGDQYADLFLAAKNLSDAILLSDILRVNTEITKAPLSASMIKRYDEHHQDLTLLKALVRQQLPEKYKEIFFDQSKNGYAGYIDGGASQEEFYKFIKPILEKMDGTEELLVKLNREDLLRKQRTFDNGSIPHQIHLGELHAILRRQEDFYPFLKDNREKIEKILTFRIPYYVGPLARGNSRFAWMTRKSEETITPWNFEEVVDKGASAQSFIERMTNFDKNLPNEKVLPKHSLLYEYFTVYNELTKVKYVTEGMRKPAFLSGEQKKAIVDLLFKTNRKVTVKQLKEDYFKKIECFDSVEISGVEDRFNASLGTYHDLLKIIKDKDFLDNEENEDILEDIVLTLTLFEDREMIEERLKTYAHLFDDKVMKQLKRRRYTGWGRLSRKLINGIRDKQSGKTILDFLKSDGFANRNFMQLIHDDSLTFKEDIQKAQVSGQGDSLHEHIANLAGSPAIKKGILQTVKVVDELVKVMGRHKPENIVIEMARENQTTQKGQKNSRERMKRIEEGIKELGSQILKEHPVENTQLQNEKLYLYYLQNGRDMYVDQELDINRLSDYDVDHIVPQSFLKDDSIDNKVLTRSDKARGKSDNVPSEEVVKKMKNYWRQLLNAKLITQRKFDNLTKAERGGLSELDKAGFIKRQLVETRQITKHVAQILDSRMNTKYDENDKLIREVKVITLKSKLVSDFRKDFQFYKVREINNYHHAHDAYLNAVVGTALIKKYPKLESEFVYGDYKVYDVRKMIAKSEQEIGKATAKYFFYSNIMNFFKTEITLANGEIRKRPLIETNGETGEIVWDKGRDFATVRKVLSMPQVNIVKKTEVQTGGFSKESILPKRNSDKLIARKKDWDPKKYGGFDSPTVAYSVLVVAKVEKGKSKKLKSVKELLGITIMERSSFEKNPIDFLEAKGYKEVKKDLIIKLPKYSLFELENGRKRMLASAGELQKGNELALPSKYVNFLYLASHYEKLKGSPEDNEQKQLFVEQHKHYLDEIIEQISEFSKRVILADANLDKVLSAYNKHRDKPIREQAENIIHLFTLTNLGAPAAFKYFDTTIDRKRYTSTKEVLDATLIHQSITGLYETRIDLSQLGGDGGPAPGGGGGPRSRAIDIPVPHADKISWKITDPVWVDQWPLTYEKTLAAIALVQEQLAAGHIEPTNSPWNTPIFIIKKKSGSWRLLQDLRAVNKVMVPMGALQPGLPSPVAIPLNYHKIVIDLKDCFFTIPLHPEDRPYFAFSVPQINFQSPMPRYQWKVLPQGMANSPTLCQKFVAAAIAPVRSQWPEAYILHYMDDILLACDSAEAAKACYAHIISCLTSYGLKIAPDKVQVSEPFSYLGFELHHQQVFTPRVCLKTDHLKTLNDFQKLLGDIQWLRPYLKLPTSALVPLNNILKGDPNPLSVRALTPEAKQSLALINKAIQNQSVQQISYNLPLVLLLLPTPHTPTAVFWQPNGTDPTKNGSPLLWLHLPASPSKVLLTYPSLLAMLIIKGRYTGRQLFGRDPHSIIIPYTQDQLTWLLQTSDEWAIALSSFTGDIDNHYPSDPVIQFAKLHQFIFPKITKCAPIPQATLVFTDGSSNGIAAYVIDNQPISIKSPYLSAQLVELYAILQVFTVLAHQPFNLYTDSAYIAQSVPLLETVPFIKSSTNATPLFSKLQQLILNRQHPFFIGHLRAHLNLPGPLAEGNALADAATQIFPIISDAGKRTADGSEFEKRTADGSEFESPKKKAKVE

SEQ ID NO: 742 - protein, 2012 aa, synthetic construct
MPAAKRVKLDGGDKKYSIGLDIGTNSVGWAVITDEYKVPSKKFKVLGNTDRHSIKKNLIGALLFDSGETAEATRLKRTARRRYTRRKNRICYLQEIFSNEMAKVDDSFFHRLEESFLVEEDKKHERHPIFGNIVDEVAYHEKYPTIYHLRKKLVDSTDKADLRLIYLALAHMIKFRGHFLIEGDLNPDNSDVDKLFIQLVQTYNQLFEENPINASGVDAKAILSARLSKSRRLENLIAQLPGEKKNGLFGNLIALSLGLTPNFKSNFDLAEDAKLQLSKDTYDDDLDNLLAQIGDQYADLFLAAKNLSDAILLSDILRVNTEITKAPLSASMIKRYDEHHQDLTLLKALVRQQLPEKYKEIFFDQSKNGYAGYIDGGASQEEFYKFIKPILEKMDGTEELLVKLNREDLLRKQRTFDNGSIPHQIHLGELHAILRRQEDFYPFLKDNREKIEKILTFRIPYYVGPLARGNSRFAWMTRKSEETITPWNFEEVVDKGASAQSFIERMTNFDKNLPNEKVLPKHSLLYEYFTVYNELTKVKYVTEGMRKPAFLSGEQKKAIVDLLFKTNRKVTVKQLKEDYFKKIECFDSVEISGVEDRFNASLGTYHDLLKIIKDKDFLDNEENEDILEDIVLTLTLFEDREMIEERLKTYAHLFDDKVMKQLKRRRYTGWGRLSRKLINGIRDKQSGKTILDFLKSDGFANRNFMQLIHDDSLTFKEDIQKAQVSGQGDSLHEHIANLAGSPAIKKGILQTVKVVDELVKVMGRHKPENIVIEMARENQTTQKGQKNSRERMKRIEEGIKELGSQILKEHPVENTQLQNEKLYLYYLQNGRDMYVDQELDINRLSDYDVDHIVPQSFLKDDSIDNKVLTRSDKARGKSDNVPSEEVVKKMKNYWRQLLNAKLITQRKFDNLTKAERGGLSELDKAGFIKRQLVETRQITKHVAQILDSRMNTKYDENDKLIREVKVITLKSKLVSDFRKDFQFYKVREINNYHHAHDAYLNAVVGTALIKKYPKLESEFVYGDYKVYDVRKMIAKSEQEIGKATAKYFFYSNIMNFFKTEITLANGEIRKRPLIETNGETGEIVWDKGRDFATVRKVLSMPQVNIVKKTEVQTGGFSKESILPKRNSDKLIARKKDWDPKKYGGFDSPTVAYSVLVVAKVEKGKSKKLKSVKELLGITIMERSSFEKNPIDFLEAKGYKEVKKDLIIKLPKYSLFELENGRKRMLASAGELQKGNELALPSKYVNFLYLASHYEKLKGSPEDNEQKQLFVEQHKHYLDEIIEQISEFSKRVILADANLDKVLSAYNKHRDKPIREQAENIIHLFTLTNLGAPAAFKYFDTTIDRKRYTSTKEVLDATLIHQSITGLYETRIDLSQLGGDGGGGGGGGGGPRSRAIDIPVPHADKISWKITDPVWVDQWPLTYEKTLAAIALVQEQLAAGHIEPTNSPWNTPIFIIKKKSGSWRLLQDLRAVNKVMVPMGALQPGLPSPVAIPLNYHKIVIDLKDCFFTIPLHPEDRPYFAFSVPQINFQSPMPRYQWKVLPQGMANSPTLCQKFVAAAIAPVRSQWPEAYILHYMDDILLACDSAEAAKACYAHIISCLTSYGLKIAPDKVQVSEPFSYLGFELHHQQVFTPRVCLKTDHLKTLNDFQKLLGDIQWLRPYLKLPTSALVPLNNILKPDPNPLSVRALTPEAKQSLALINKAIQNQSVQQISYNLPLVLLLLPTPHTPTAVFWQPNGTDPTKNGSPLLWLHLPASPSKVLLTYPSLLAMLIIKGRYTGRQLFGRDPHSIIIPYTQDQLTWLLQTSDEWAIALSSFTGDIDNHYPSDPVIQFAKLHQFIFPKITKCAPIPQATLVFTDGSSNGIAAYVIDNQPISIKSPYLSAQLVELYAILQVFTVLAHQPFNLYTDSAYIAQSVPLLETVPFIKSSTNATPLFSKLQQLILNRQHPFFIGHLRAHLNLPGPLAEGNALADAATQIFPIISDAGKRTADGSEFEKRTADGSEFESPKKKAKVE

SEQ ID NO: 743 - protein, 2021 aa, synthetic construct
MPAAKRVKLDGGDKKYSIGLDIGTNSVGWAVITDEYKVPSKKFKVLGNTDRHSIKKNLIGALLFDSGETAEATRLKRTARRRYTRRKNRICYLQEIFSNEMAKVDDSFFHRLEESFLVEEDKKHERHPIFGNIVDEVAYHEKYPTIYHLRKKLVDSTDKADLRLIYLALAHMIKFRGHFLIEGDLNPDNSDVDKLFIQLVQTYNQLFEENPINASGVDAKAILSARLSKSRRLENLIAQLPGEKKNGLFGNLIALSLGLTPNFKSNFDLAEDAKLQLSKDTYDDDLDNLLAQIGDQYADLFLAAKNLSDAILLSDILRVNTEITKAPLSASMIKRYDEHHQDLTLLKALVRQQLPEKYKEIFFDQSKNGYAGYIDGGASQEEFYKFIKPILEKMDGTEELLVKLNREDLLRKQRTFDNGSIPHQIHLGELHAILRRQEDFYPFLKDNREKIEKILTFRIPYYVGPLARGNSRFAWMTRKSEETITPWNFEEVVDKGASAQSFIERMTNFDKNLPNEKVLPKHSLLYEYFTVYNELTKVKYVTEGMRKPAFLSGEQKKAIVDLLFKTNRKVTVKQLKEDYFKKIECFDSVEISGVEDRFNASLGTYHDLLKIIKDKDFLDNEENEDILEDIVLTLTLFEDREMIEERLKTYAHLFDDKVMKQLKRRRYTGWGRLSRKLINGIRDKQSGKTILDFLKSDGFANRNFMQLIHDDSLTFKEDIQKAQVSGQGDSLHEHIANLAGSPAIKKGILQTVKVVDELVKVMGRHKPENIVIEMARENQTTQKGQKNSRERMKRIEEGIKELGSQILKEHPVENTQLQNEKLYLYYLQNGRDMYVDQELDINRLSDYDVDHIVPQSFLKDDSIDNKVLTRSDKARGKSDNVPSEEVVKKMKNYWRQLLNAKLITQRKFDNLTKAERGGLSELDKAGFIKRQLVETRQITKHVAQILDSRMNTKYDENDKLIREVKVITLKSKLVSDFRKDFQFYKVREINNYHHAHDAYLNAVVGTALIKKYPKLESEFVYGDYKVYDVRKMIAKSEQEIGKATAKYFFYSNIMNFFKTEITLANGEIRKRPLIETNGETGEIVWDKGRDFATVRKVLSMPQVNIVKKTEVQTGGFSKESILPKRNSDKLIARKKDWDPKKYGGFDSPTVAYSVLVVAKVEKGKSKKLKSVKELLGITIMERSSFEKNPIDFLEAKGYKEVKKDLIIKLPKYSLFELENGRKRMLASAGELQKGNELALPSKYVNFLYLASHYEKLKGSPEDNEQKQLFVEQHKHYLDEIIEQISEFSKRVILADANLDKVLSAYNKHRDKPIREQAENIIHLFTLTNLGAPAAFKYFDTTIDRKRYTSTKEVLDATLIHQSITGLYETRIDLSQLGGDGGGGSGGSGGSGGSGGSGGPRSRAIDIPVPHADKISWKITDPVWVDQWPLTYEKTLAAIALVQEQLAAGHIEPTNSPWNTPIFIIKKKSGSWRLLQDLRAVNKVMVPMGALQPGLPSPVAPPLNYHKIVIDLKDCFFTIPLHPEDRPYFAFSVPQINFQSPMPRYQWKVLPQGMANSPTLCQKFVAAAIAPVRSQWPEAYILHYMDDILLACDSAEAAKACYAHIISCLTSYGLKIAPDKVQVSEPFSYLGFELHHQQVFTPRVCLKTDHLKTLNDFQKLLGDIQWLRPYLKLPTSALVPLNNILKPDPNPLSVRALTPEAKQSLALINKAIQNQSVQQISYNLPLVLLLLPTPHTPTAVFWQPNGTDPTKNGSPLLWLHLPASPSKVLLTYPSLLAMLIIKGRYTGRQLFGRDPHSIIIPYTQDQLTWLLQTSDEWAIALSSFTGDIDNHYPSDPVIQFAKLHQFIFPKITKCAPIPQATLVFTDGSSNGIAAYVIDNQPISIKSPYLSAQLVELYAILQVFTVLAHQPFNLYTDSAYIAQSVPLLETVPFIKSSTNATPLFSKLQQLILNRQHPFFIGHLRAHLNLPGPLAEGNALADAATQIFPIISDAGKRTADGSEFEKRTADGSEFESPKKKAKVE

SEQ ID NO: 744 - protein, 2017 aa, synthetic construct
MPAAKRVKLDGGDKKYSIGLDIGTNSVGWAVITDEYKVPSKKFKVLGNTDRHSIKKNLIGALLFDSGETAEATRLKRTARRRYTRRKNRICYLQEIFSNEMAKVDDSFFHRLEESFLVEEDKKHERHPIFGNIVDEVAYHEKYPTIYHLRKKLVDSTDKADLRLIYLALAHMIKFRGHFLIEGDLNPDNSDVDKLFIQLVQTYNQLFEENPINASGVDAKAILSARLSKSRRLENLIAQLPGEKKNGLFGNLIALSLGLTPNFKSNFDLAEDAKLQLSKDTYDDDLDNLLAQIGDQYADLFLAAKNLSDAILLSDILRVNTEITKAPLSASMIKRYDEHHQDLTLLKALVRQQLPEKYKEIFFDQSKNGYAGYIDGGASQEEFYKFIKPILEKMDGTEELLVKLNREDLLRKQRTFDNGSIPHQIHLGELHAILRRQEDFYPFLKDNREKIEKILTFRIPYYVGPLARGNSRFAWMTRKSEETITPWNFEEVVDKGASAQSFIERMTNFDKNLPNEKVLPKHSLLYEYFTVYNELTKVKYVTEGMRKPAFLSGEQKKAIVDLLFKTNRKVTVKQLKEDYFKKIECFDSVEISGVEDRFNASLGTYHDLLKIIKDKDFLDNEENEDILEDIVLTLTLFEDREMIEERLKTYAHLFDDKVMKQLKRRRYTGWGRLSRKLINGIRDKQSGKTILDFLKSDGFANRNFMQLIHDDSLTFKEDIQKAQVSGQGDSLHEHIANLAGSPAIKKGILQTVKVVDELVKVMGRHKPENIVIEMARENQTTQKGQKNSRERMKRIEEGIKELGSQILKEHPVENTQLQNEKLYLYYLQNGRDMYVDQELDINRLSDYDVDHIVPQSFLKDDSIDNKVLTRSDKARGKSDNVPSEEVVKKMKNYWRQLLNAKLITQRKFDNLTKAERGGLSELDKAGFIKRQLVETRQITKHVAQILDSRMNTKYDENDKLIREVKVITLKSKLVSDFRKDFQFYKVREINNYHHAHDAYLNAVVGTALIKKYPKLESEFVYGDYKVYDVRKMIAKSEQEIGKATAKYFFYSNIMNFFKTEITLANGEIRKRPLIETNGETGEIVWDKGRDFATVRKVLSMPQVNIVKKTEVQTGGFSKESILPKRNSDKLIARKKDWDPKKYGGFDSPTVAYSVLVVAKVEKGKSKKLKSVKELLGITIMERSSFEKNPIDFLEAKGYKEVKKDLIIKLPKYSLFELENGRKRMLASAGELQKGNELALPSKYVNFLYLASHYEKLKGSPEDNEQKQLFVEQHKHYLDEIIEQISEFSKRVILADANLDKVLSAYNKHRDKPIREQAENIIHLFTLTNLGAPAAFKYFDTTIDRKRYTSTKEVLDATLIHQSITGLYETRIDLSQLGGDGGGSSPAPEAAAKGGPRSRAIDIPVPHADKISWKITDPVWVDQWPLTYEKTLAAIALVQEQLAAGHIEPTNSPWNTPIFIIKKKSGSWRLLQDLRAVNKVMVPMGALQPGLPSPVAPPLNYHKIVIDLKDCFFTIPLHPEDRPYFAFSVPQINFQSPMPRYQWKVLPQGMANSPTLCQKFVAAAIAPVRSQWPEAYILHYMDDILLACDSAEAAKACYAHIISCLTSYGLKIAPDKVQVSEPFSYLGFELHHQQVFTPRVCLKTDHLKTLNDFQKLLGDIQWLRPYLKLPTSALVPLNNILKPDPNPLSVRALTPEAKQSLALINKAIQNQSVQQISYNLPLVLLLLPTPHTPTAVFWQPNGTDPTKNGSPLLWLHLPASPSKVLLTYPSLLAMLIIKGRYTGRQLFGRDPHSIIIPYTQDQLTWLLQTSDEWAIALSSFTGDIDNHYPSDPVIQFAKLHQFIFPKITKCAPIPQATLVFTDGSSNGIAAYVIDNQPISIKSPYLSAQLVELYAILQVFTVLAHQPFNLYTDSAYIAQSVPLLETVPFIKSSTNATPLFSKLQQLILNRQHPFFIGHLRAHLNLPGPLAEGNALADAATQIFPIISDAGKRTADGSEFEKRTADGSEFESPKKKAKVE

SEQ ID NO: 745 - protein, 2032 aa, synthetic construct
MPAAKRVKLDGGDKKYSIGLDIGTNSVGWAVITDEYKVPSKKFKVLGNTDRHSIKKNLIGALLFDSGETAEATRLKRTARRRYTRRKNRICYLQEIFSNEMAKVDDSFFHRLEESFLVEEDKKHERHPIFGNIVDEVAYHEKYPTIYHLRKKLVDSTDKADLRLIYLALAHMIKFRGHFLIEGDLNPDNSDVDKLFIQLVQTYNQLFEENPINASGVDAKAILSARLSKSRRLENLIAQLPGEKKNGLFGNLIALSLGLTPNFKSNFDLAEDAKLQLSKDTYDDDLDNLLAQIGDQYADLFLAAKNLSDAILLSDILRVNTEITKAPLSASMIKRYDEHHQDLTLLKALVRQQLPEKYKEIFFDQSKNGYAGYIDGGASQEEFYKFIKPILEKMDGTEELLVKLNREDLLRKQRTFDNGSIPHQIHLGELHAILRRQEDFYPFLKDNREKIEKILTFRIPYYVGPLARGNSRFAWMTRKSEETITPWNFEEVVDKGASAQSFIERMTNFDKNLPNEKVLPKHSLLYEYFTVYNELTKVKYVTEGMRKPAFLSGEQKKAIVDLLFKTNRKVTVKQLKEDYFKKIECFDSVEISGVEDRFNASLGTYHDLLKIIKDKDFLDNEENEDILEDIVLTLTLFEDREMIEERLKTYAHLFDDKVMKQLKRRRYTGWGRLSRKLINGIRDKQSGKTILDFLKSDGFANRNFMQLIHDDSLTFKEDIQKAQVSGQGDSLHEHIANLAGSPAIKKGILQTVKVVDELVKVMGRHKPENIVIEMARENQTTQKGQKNSRERMKRIEEGIKELGSQILKEHPVENTQLQNEKLYLYYLQNGRDMYVDQELDINRLSDYDVDHIVPQSFLKDDSIDNKVLTRSDKARGKSDNVPSEEVVKKMKNYWRQLLNAKLITQRKFDNLTKAERGGLSELDKAGFIKRQLVETRQITKHVAQILDSRMNTKYDENDKLIREVKVITLKSKLVSDFRKDFQFYKVREINNYHHAHDAYLNAVVGTALIKKYPKLESEFVYGDYKVYDVRKMIAKSEQEIGKATAKYFFYSNIMNFFKTEITLANGEIRKRPLIETNGETGEIVWDKGRDFATVRKVLSMPQVNIVKKTEVQTGGFSKESILPKRNSDKLIARKKDWDPKKYGGFDSPTVAYSVLVVAKVEKGKSKKLKSVKELLGITIMERSSFEKNPIDFLEAKGYKEVKKDLIIKLPKYSLFELENGRKRMLASAGELQKGNELALPSKYVNFLYLASHYEKLKGSPEDNEQKQLFVEQHKHYLDEIIEQISEFSKRVILADANLDKVLSAYNKHRDKPIREQAENIIHLFTLTNLGAPAAFKYFDTTIDRKRYTSTKEVLDATLIHQSITGLYETRIDLSQLGGDGGSGGSSGGSSGSETPGTSESATPESSGGSSGGSSGGLATAVDILAPQRYADPITWKSDEPVWVDQWPLTQEKLAAAQQLVQEQLQAGHIIESNSPWNTPIFVIKKKSGKWRLLQDLRAVNATMVLMGALQPGLPSPVAIPQGYFKIVIDLKDCFFTIPLQPVDQKRFAFSLPSTNFKQPMKRYQWKVLPQGMANSPTLCQKYVAAAIEPVRKSWAQMYIIHYMDDILIAGKLGEQVLQCFAQLKQALTTTGLQIAPEKVQLQDPYTYLGFQINGPKITNQKAVIRRDKLQTLNDFQKLLGDINWLRPYLHLTTGDLKPLFDILKGDSNPNSPRSLSEAALASLQKVETAIAEQFVTQIDYTQPLTFLIFNTTLTPTGLFWQNNPVMWVHLPASPKKVLLPYYDAIADLIILGRDNSKKYFGLEPSTIIQPYSKSQIHWLMQNTETWPIACASYAGNIDNHYPPNKLIQFCKLHAVVFPRIISKTPLDNALLVFTDGSSTGIAAYTFEKTTVRFKTSHTSAQLVELQALIAVLSAFPHRALNVYTDSAYLAHSIPLLETVSHIKHISDTAKFFLQCQQLIYNRSIPFYLGHIRAHSGLPGPLSQGNHITDLATKVVATTLTTAGKRTADGSEFEKRTADGSEFESPKKKAKVE

SEQ ID NO: 746 - protein, 2045 aa, synthetic construct
MPAAKRVKLDGGDKKYSIGLDIGTNSVGWAVITDEYKVPSKKFKVLGNTDRHSIKKNLIGALLFDSGETAEATRLKRTARRRYTRRKNRICYLQEIFSNEMAKVDDSFFHRLEESFLVEEDKKHERHPIFGNIVDEVAYHEKYPTIYHLRKKLVDSTDKADLRLIYLALAHMIKFRGHFLIEGDLNPDNSDVDKLFIQLVQTYNQLFEENPINASGVDAKAILSARLSKSRRLENLIAQLPGEKKNGLFGNLIALSLGLTPNFKSNFDLAEDAKLQLSKDTYDDDLDNLLAQIGDQYADLFLAAKNLSDAILLSDILRVNTEITKAPLSASMIKRYDEHHQDLTLLKALVRQQLPEKYKEIFFDQSKNGYAGYIDGGASQEEFYKFIKPILEKMDGTEELLVKLNREDLLRKQRTFDNGSIPHQIHLGELHAILRRQEDFYPFLKDNREKIEKILTFRIPYYVGPLARGNSRFAWMTRKSEETITPWNFEEVVDKGASAQSFIERMTNFDKNLPNEKVLPKHSLLYEYFTVYNELTKVKYVTEGMRKPAFLSGEQKKAIVDLLFKTNRKVTVKQLKEDYFKKIECFDSVEISGVEDRFNASLGTYHDLLKIIKDKDFLDNEENEDILEDIVLTLTLFEDREMIEERLKTYAHLFDDKVMKQLKRRRYTGWGRLSRKLINGIRDKQSGKTILDFLKSDGFANRNFMQLIHDDSLTFKEDIQKAQVSGQGDSLHEHIANLAGSPAIKKGILQTVKVVDELVKVMGRHKPENIVIEMARENQTTQKGQKNSRERMKRIEEGIKELGSQILKEHPVENTQLQNEKLYLYYLQNGRDMYVDQELDINRLSDYDVDHIVPQSFLKDDSIDNKVLTRSDKARGKSDNVPSEEVVKKMKNYWRQLLNAKLITQRKFDNLTKAERGGLSELDKAGFIKRQLVETRQITKHVAQILDSRMNTKYDENDKLIREVKVITLKSKLVSDFRKDFQFYKVREINNYHHAHDAYLNAVVGTALIKKYPKLESEFVYGDYKVYDVRKMIAKSEQEIGKATAKYFFYSNIMNFFKTEITLANGEIRKRPLIETNGETGEIVWDKGRDFATVRKVLSMPQVNIVKKTEVQTGGFSKESILPKRNSDKLIARKKDWDPKKYGGFDSPTVAYSVLVVAKVEKGKSKKLKSVKELLGITIMERSSFEKNPIDFLEAKGYKEVKKDLIIKLPKYSLFELENGRKRMLASAGELQKGNELALPSKYVNFLYLASHYEKLKGSPEDNEQKQLFVEQHKHYLDEIIEQISEFSKRVILADANLDKVLSAYNKHRDKPIREQAENIIHLFTLTNLGAPAAFKYFDTTIDRKRYTSTKEVLDATLIHQSITGLYETRIDLSQLGGDGGAEAAAKEAAAKEAAAKEAAAKALEAEAAAKEAAAKEAAAKEAAAKAGGLATAVDILAPQRYADPITWKSDEPVWVDQWPLTQEKLAAAQQLVQEQLQAGHIIESNSPWNTPIFVIKKKSGKWRLLQDLRAVNATMVLMGALQPGLPSPVAIPQGYFKIVIDLKDCFFTIPLQPVDQKRFAFSLPSTNFKQPMKRYQWKVLPQGMANSPTLCQKYVAAAIEPVRKSWAQMYIIHYMDDILIAGKLGEQVLQCFAQLKQALTTTGLQIAPEKVQLQDPYTYLGFQINGPKITNQKAVIRRDKLQTLNDFQKLLGDINWLRPYLHLTTGDLKPLFDILKGDSNPNSPRSLSEAALASLQKVETAIAEQFVTQIDYTQPLTFLIFNTTLTPTGLFWQNNPVMWVHLPASPKKVLLPYYDAIADLIILGRDNSKKYFGLEPSTIIQPYSKSQIHWLMQNTETWPIACASYAGNIDNHYPPNKLIQFCKLHAVVFPRIISKTPLDNALLVFTDGSSTGIAAYTFEKTTVRFKTSHTSAQLVELQALIAVLSAFPHRALNVYTDSAYLAHSIPLLETVSHIKHISDTAKFFLQCQQLIYNRSIPFYLGHIRAHSGLPGPLSQGNHITDLATKVVATTLTTAGKRTADGSEFEKRTADGSEFESPKKKAKVE

SEQ ID NO: 747 - protein, 2029 aa, synthetic construct
MPAAKRVKLDGGDKKYSIGLDIGTNSVGWAVITDEYKVPSKKFKVLGNTDRHSIKKNLIGALLFDSGETAEATRLKRTARRRYTRRKNRICYLQEIFSNEMAKVDDSFFHRLEESFLVEEDKKHERHPIFGNIVDEVAYHEKYPTIYHLRKKLVDSTDKADLRLIYLALAHMIKFRGHFLIEGDLNPDNSDVDKLFIQLVQTYNQLFEENPINASGVDAKAILSARLSKSRRLENLIAQLPGEKKNGLFGNLIALSLGLTPNFKSNFDLAEDAKLQLSKDTYDDDLDNLLAQIGDQYADLFLAAKNLSDAILLSDILRVNTEITKAPLSASMIKRYDEHHQDLTLLKALVRQQLPEKYKEIFFDQSKNGYAGYIDGGASQEEFYKFIKPILEKMDGTEELLVKLNREDLLRKQRTFDNGSIPHQIHLGELHAILRRQEDFYPFLKDNREKIEKILTFRIPYYVGPLARGNSRFAWMTRKSEETITPWNFEEVVDKGASAQSFIERMTNFDKNLPNEKVLPKHSLLYEYFTVYNELTKVKYVTEGMRKPAFLSGEQKKAIVDLLFKTNRKVTVKQLKEDYFKKIECFDSVEISGVEDRFNASLGTYHDLLKIIKDKDFLDNEENEDILEDIVLTLTLFEDREMIEERLKTYAHLFDDKVMKQLKRRRYTGWGRLSRKLINGIRDKQSGKTILDFLKSDGFANRNFMQLIHDDSLTFKEDIQKAQVSGQGDSLHEHIANLAGSPAIKKGILQTVKVVDELVKVMGRHKPENIVIEMARENQTTQKGQKNSRERMKRIEEGIKELGSQILKEHPVENTQLQNEKLYLYYLQNGRDMYVDQELDINRLSDYDVDHIVPQSFLKDDSIDNKVLTRSDKARGKSDNVPSEEVVKKMKNYWRQLLNAKLITQRKFDNLTKAERGGLSELDKAGFIKRQLVETRQITKHVAQILDSRMNTKYDENDKLIREVKVITLKSKLVSDFRKDFQFYKVREINNYHHAHDAYLNAVVGTALIKKYPKLESEFVYGDYKVYDVRKMIAKSEQEIGKATAKYFFYSNIMNFFKTEITLANGEIRKRPLIETNGETGEIVWDKGRDFATVRKVLSMPQVNIVKKTEVQTGGFSKESILPKRNSDKLIARKKDWDPKKYGGFDSPTVAYSVLVVAKVEKGKSKKLKSVKELLGITIMERSSFEKNPIDFLEAKGYKEVKKDLIIKLPKYSLFELENGRKRMLASAGELQKGNELALPSKYVNFLYLASHYEKLKGSPEDNEQKQLFVEQHKHYLDEIIEQISEFSKRVILADANLDKVLSAYNKHRDKPIREQAENIIHLFTLTNLGAPAAFKYFDTTIDRKRYTSTKEVLDATLIHQSITGLYETRIDLSQLGGDGGEAAAKEAAAKEAAAKEAAAKEAAAKEAAAKGGLATAVDILAPQRYADPITWKSDEPVWVDQWPLTQEKLAAAQQLVQEQLQAGHIIESNSPWNTPIFVIKKKSGKWRLLQDLRAVNATMVLMGALQPGLPSPVAIPQGYFKIVIDLKDCFFTIPLQPVDQKRFAFSLPSTNFKQPMKRYQWKVLPQGMANSPTLCQKYVAAAIEPVRKSWAQMYIIHYMDDILIAGKLGEQVLQCFAQLKQALTTTGLQIAPEKVQLQDPYTYLGFQINGPKITNQKAVIRRDKLQTLNDFQKLLGDINWLRPYLHLTTGDLKPLFDILKGDSNPNSPRSLSEAALASLQKVETAIAEQFVTQIDYTQPLTFLIFNTTLTPTGLFWQNNPVMWVHLPASPKKVLLPYYDAIADLIILGRDNSKKYFGLEPSTIIQPYSKSQIHWLMQNTETWPIACASYAGNIDNHYPPNKLIQFCKLHAVVFPRIISKTPLDNALLVFTDGSSTGIAAYTFEKTTVRFKTSHTSAQLVELQALIAVLSAFPHRALNVYTDSAYLAHSIPLLETVSHIKHISDTAKFFLQCQQLIYNRSIPFYLGHIRAHSGLPGPLSQGNHITDLATKVVATTLTTAGKRTADGSEFEKRTADGSEFESPKKKAKVE

SEQ ID NO: 748 - protein, 2024 aa, synthetic construct
MPAAKRVKLDGGDKKYSIGLDIGTNSVGWAVITDEYKVPSKKFKVLGNTDRHSIKKNLIGALLFDSGETAEATRLKRTARRRYTRRKNRICYLQEIFSNEMAKVDDSFFHRLEESFLVEEDKKHERHPIFGNIVDEVAYHEKYPTIYHLRKKLVDSTDKADLRLIYLALAHMIKFRGHFLIEGDLNPDNSDVDKLFIQLVQTYNQLFEENPINASGVDAKAILSARLSKSRRLENLIAQLPGEKKNGLFGNLIALSLGLTPNFKSNFDLAEDAKLQLSKDTYDDDLDNLLAQIGDQYADLFLAAKNLSDAILLSDILRVNTEITKAPLSASMIKRYDEHHQDLTLLKALVRQQLPEKYKEIFFDQSKNGYAGYIDGGASQEEFYKFIKPILEKMDGTEELLVKLNREDLLRKQRTFDNGSIPHQIHLGELHAILRRQEDFYPFLKDNREKIEKILTFRIPYYVGPLARGNSRFAWMTRKSEETITPWNFEEVVDKGASAQSFIERMTNFDKNLPNEKVLPKHSLLYEYFTVYNELTKVKYVTEGMRKPAFLSGEQKKAIVDLLFKTNRKVTVKQLKEDYFKKIECFDSVEISGVEDRFNASLGTYHDLLKIIKDKDFLDNEENEDILEDIVLTLTLFEDREMIEERLKTYAHLFDDKVMKQLKRRRYTGWGRLSRKLINGIRDKQSGKTILDFLKSDGFANRNFMQLIHDDSLTFKEDIQKAQVSGQGDSLHEHIANLAGSPAIKKGILQTVKVVDELVKVMGRHKPENIVIEMARENQTTQKGQKNSRERMKRIEEGIKELGSQILKEHPVENTQLQNEKLYLYYLQNGRDMYVDQELDINRLSDYDVDHIVPQSFLKDDSIDNKVLTRSDKARGKSDNVPSEEVVKKMKNYWRQLLNAKLITQRKFDNLTKAERGGLSELDKAGFIKRQLVETRQITKHVAQILDSRMNTKYDENDKLIREVKVITLKSKLVSDFRKDFQFYKVREINNYHHAHDAYLNAVVGTALIKKYPKLESEFVYGDYKVYDVRKMIAKSEQEIGKATAKYFFYSNIMNFFKTEITLANGEIRKRPLIETNGETGEIVWDKGRDFATVRKVLSMPQVNIVKKTEVQTGGFSKESILPKRNSDKLIARKKDWDPKKYGGFDSPTVAYSVLVVAKVEKGKSKKLKSVKELLGITIMERSSFEKNPIDFLEAKGYKEVKKDLIIKLPKYSLFELENGRKRMLASAGELQKGNELALPSKYVNFLYLASHYEKLKGSPEDNEQKQLFVEQHKHYLDEIIEQISEFSKRVILADANLDKVLSAYNKHRDKPIREQAENIIHLFTLTNLGAPAAFKYFDTTIDRKRYTSTKEVLDATLIHQSITGLYETRIDLSQLGGDGGEAAAKEAAAKEAAAKEAAAKEAAAKGGLATAVDILAPQRYADPITWKSDEPVWVDQWPLTQEKLAAAQQLVQEQLQAGHIIESNSPWNTPIFVIKKKSGKWRLLQDLRAVNATMVLMGALQPGLPSPVAIPQGYFKIVIDLKDCFFTIPLQPVDQKRFAFSLPSTNFKQPMKRYQWKVLPQGMANSPTLCQKYVAAAIEPVRKSWAQMYIIHYMDDILIAGKLGEQVLQCFAQLKQALTTTGLQIAPEKVQLQDPYTYLGFQINGPKITNQKAVIRRDKLQTLNDFQKLLGDINWLRPYLHLTTGDLKPLFDILKGDSNPNSPRSLSEAALASLQKVETAIAEQFVTQIDYTQPLTFLIFNTTLTPTGLFWQNNPVMWVHLPASPKKVLLPYYDAIADLIILGRDNSKKYFGLEPSTIIQPYSKSQIHWLMQNTETWPIACASYAGNIDNHYPPNKLIQFCKLHAVVFPRIISKTPLDNALLVFTDGSSTGIAAYTFEKTTVRFKTSHTSAQLVELQALIAVLSAFPHRALNVYTDSAYLAHSIPLLETVSHIKHISDTAKFFLQCQQLIYNRSIPFYLGHIRAHSGLPGPLSQGNHITDLATKVVATTLTTAGKRTADGSEFEKRTADGSEFESPKKKAKVE

SEQ ID NO: 749 - protein, 2012 aa, synthetic construct
MPAAKRVKLDGGDKKYSIGLDIGTNSVGWAVITDEYKVPSKKFKVLGNTDRHSIKKNLIGALLFDSGETAEATRLKRTARRRYTRRKNRICYLQEIFSNEMAKVDDSFFHRLEESFLVEEDKKHERHPIFGNIVDEVAYHEKYPTIYHLRKKLVDSTDKADLRLIYLALAHMIKFRGHFLIEGDLNPDNSDVDKLFIQLVQTYNQLFEENPINASGVDAKAILSARLSKSRRLENLIAQLPGEKKNGLFGNLIALSLGLTPNFKSNFDLAEDAKLQLSKDTYDDDLDNLLAQIGDQYADLFLAAKNLSDAILLSDILRVNTEITKAPLSASMIKRYDEHHQDLTLLKALVRQQLPEKYKEIFFDQSKNGYAGYIDGGASQEEFYKFIKPILEKMDGTEELLVKLNREDLLRKQRTFDNGSIPHQIHLGELHAILRRQEDFYPFLKDNREKIEKILTFRIPYYVGPLARGNSRFAWMTRKSEETITPWNFEEVVDKGASAQSFIERMTNFDKNLPNEKVLPKHSLLYEYFTVYNELTKVKYVTEGMRKPAFLSGEQKKAIVDLLFKTNRKVTVKQLKEDYFKKIECFDSVEISGVEDRFNASLGTYHDLLKIIKDKDFLDNEENEDILEDIVLTLTLFEDREMIEERLKTYAHLFDDKVMKQLKRRRYTGWGRLSRKLINGIRDKQSGKTILDFLKSDGFANRNFMQLIHDDSLTFKEDIQKAQVSGQGDSLHEHIANLAGSPAIKKGILQTVKVVDELVKVMGRHKPENIVIEMARENQTTQKGQKNSRERMKRIEEGIKELGSQILKEHPVENTQLQNEKLYLYYLQNGRDMYVDQELDINRLSDYDVDHIVPQSFLKDDSIDNKVLTRSDKARGKSDNVPSEEVVKKMKNYWRQLLNAKLITQRKFDNLTKAERGGLSELDKAGFIKRQLVETRQITKHVAQILDSRMNTKYDENDKLIREVKVITLKSKLVSDFRKDFQFYKVREINNYHHAHDAYLNAVVGTALIKKYPKLESEFVYGDYKVYDVRKMIAKSEQEIGKATAKYFFYSNIMNFFKTEITLANGEIRKRPLIETNGETGEIVWDKGRDFATVRKVLSMPQVNIVKKTEVQTGGFSKESILPKRNSDKLIARKKDWDPKKYGGFDSPTVAYSVLVVAKVEKGKSKKLKSVKELLGITIMERSSFEKNPIDFLEAKGYKEVKKDLIIKLPKYSLFELENGRKRMLASAGELQKGNELALPSKYVNFLYLASHYEKLKGSPEDNEQKQLFVEQHKHYLDEIIEQISEFSKRVILADANLDKVLSAYNKHRDKPIREQAENIIHLFTLTNLGAPAAFKYFDTTIDRKRYTSTKEVLDATLIHQSITGLYETRIDLSQLGGDGGPAPAPAPAPAPAPGGLATAVDILAPQRYADPITWKSDEPVWVDQWPLTQEKLAAAQQLVQEQLQAGHIIESNSPWNTPIFVIKKKSGKWRLLQDLRAVNATMVLMGALQPGLPSPVAIPQGYFKIVIDLKDCFFTIPLQPVDQKRFAFSLPSTNFKQPMKRYQWKVLPQGMANSPTLCQKYVAAAIEPVRKSWAQMYIIHYMDDILIAGKLGEQVLQCFAQLKQALTTTGLQIAPEKVQLQDPYTYLGFQINGPKITNQKAVIRRDKLQTLNDFQKLLGDINWLRPYLHLTTGDLKPLFDILKGDSNPNSPRSLSEAALASLQKVETAIAEQFVTQIDYTQPLTFLIFNTTLTPTGLFWQNNPVMWVHLPASPKKVLLPYYDAIADLIILGRDNSKKYFGLEPSTIIQPYSKSQIHWLMQNTETWPIACASYAGNIDNHYPPNKLIQFCKLHAVVFPRIISKTPLDNALLVFTDGSSTGIAAYTFEKTTVRFKTSHTSAQLVELQALIAVLSAFPHRALNVYTDSAYLAHSIPLLETVSHIKHISDTAKFFLQCQQLIYNRSIPFYLGHIRAHSGLPGPLSQGNHITDLATKVVATTLTTAGKRTADGSEFEKRTADGSEFESPKKKAKVE

SEQ ID NO: 750 - protein, 2010 aa, synthetic construct
MPAAKRVKLDGGDKKYSIGLDIGTNSVGWAVITDEYKVPSKKFKVLGNTDRHSIKKNLIGALLFDSGETAEATRLKRTARRRYTRRKNRICYLQEIFSNEMAKVDDSFFHRLEESFLVEEDKKHERHPIFGNIVDEVAYHEKYPTIYHLRKKLVDSTDKADLRLIYLALAHMIKFRGHFLIEGDLNPDNSDVDKLFIQLVQTYNQLFEENPINASGVDAKAILSARLSKSRRLENLIAQLPGEKKNGLFGNLIALSLGLTPNFKSNFDLAEDAKLQLSKDTYDDDLDNLLAQIGDQYADLFLAAKNLSDAILLSDILRVNTEITKAPLSASMIKRYDEHHQDLTLLKALVRQQLPEKYKEIFFDQSKNGYAGYIDGGASQEEFYKFIKPILEKMDGTEELLVKLNREDLLRKQRTFDNGSIPHQIHLGELHAILRRQEDFYPFLKDNREKIEKILTFRIPYYVGPLARGNSRFAWMTRKSEETITPWNFEEVVDKGASAQSFIERMTNFDKNLPNEKVLPKHSLLYEYFTVYNELTKVKYVTEGMRKPAFLSGEQKKAIVDLLFKTNRKVTVKQLKEDYFKKIECFDSVEISGVEDRFNASLGTYHDLLKIIKDKDFLDNEENEDILEDIVLTLTLFEDREMIEERLKTYAHLFDDKVMKQLKRRRYTGWGRLSRKLINGIRDKQSGKTILDFLKSDGFANRNFMQLIHDDSLTFKEDIQKAQVSGQGDSLHEHIANLAGSPAIKKGILQTVKVVDELVKVMGRHKPENIVIEMARENQTTQKGQKNSRERMKRIEEGIKELGSQILKEHPVENTQLQNEKLYLYYLQNGRDMYVDQELDINRLSDYDVDHIVPQSFLKDDSIDNKVLTRSDKARGKSDNVPSEEVVKKMKNYWRQLLNAKLITQRKFDNLTKAERGGLSELDKAGFIKRQLVETRQITKHVAQILDSRMNTKYDENDKLIREVKVITLKSKLVSDFRKDFQFYKVREINNYHHAHDAYLNAVVGTALIKKYPKLESEFVYGDYKVYDVRKMIAKSEQEIGKATAKYFFYSNIMNFFKTEITLANGEIRKRPLIETNGETGEIVWDKGRDFATVRKVLSMPQVNIVKKTEVQTGGFSKESILPKRNSDKLIARKKDWDPKKYGGFDSPTVAYSVLVVAKVEKGKSKKLKSVKELLGITIMERSSFEKNPIDFLEAKGYKEVKKDLIIKLPKYSLFELENGRKRMLASAGELQKGNELALPSKYVNFLYLASHYEKLKGSPEDNEQKQLFVEQHKHYLDEIIEQISEFSKRVILADANLDKVLSAYNKHRDKPIREQAENIIHLFTLTNLGAPAAFKYFDTTIDRKRYTSTKEVLDATLIHQSITGLYETRIDLSQLGGDGGPAPAPAPAPAPGGLATAVDILAPQRYADPITWKSDEPVWVDQWPLTQEKLAAAQQLVQEQLQAGHIIESNSPWNTPIFVIKKKSGKWRLLQDLRAVNATMVLMGALQPGLPSPVAIPQGYFKIVIDLKDCFFTIPLQPVDQKRFAFSLPSTNFKQPMKRYQWKVLPQGMANSPTLCQKYVAAAIEPVRKSWAQMYIIHYMDDILIAGKLGEQVLQCFAQLKQALTTTGLQIAPEKVQLQDPYTYLGFQINGPKITNQKAVIRRDKLQTLNDFQKLLGDINWLRPYLHLTTGDLKPLFDILKGDSNPNSPRSLSEAALASLQKVETAIAEQFVTQIDYTQPLTFLIFNTTLTPTGLFWQNNPVMWVHLPASPKKVLLPYYDAIADLIILGRDNSKKYFGLEPSTIIQPYSKSQIHWLMQNTETWPIACASYAGNIDNHYPPNKLIQFCKLHAVVFPRIISKTPLDNALLVFTDGSSTGIAAYTFEKTTVRFKTSHTSAQLVELQALIAVLSAFPHRALNVYTDSAYLAHSIPLLETVSHIKHISDTAKFFLQCQQLIYNRSIPFYLGHIRAHSGLPGPLSQGNHITDLATKVVATTLTTAGKRTADGSEFEKRTADGSEFESPKKKAKVE

SEQ ID NO: 751 - protein, 2014 aa, synthetic construct
MPAAKRVKLDGGDKKYSIGLDIGTNSVGWAVITDEYKVPSKKFKVLGNTDRHSIKKNLIGALLFDSGETAEATRLKRTARRRYTRRKNRICYLQEIFSNEMAKVDDSFFHRLEESFLVEEDKKHERHPIFGNIVDEVAYHEKYPTIYHLRKKLVDSTDKADLRLIYLALAHMIKFRGHFLIEGDLNPDNSDVDKLFIQLVQTYNQLFEENPINASGVDAKAILSARLSKSRRLENLIAQLPGEKKNGLFGNLIALSLGLTPNFKSNFDLAEDAKLQLSKDTYDDDLDNLLAQIGDQYADLFLAAKNLSDAILLSDILRVNTEITKAPLSASMIKRYDEHHQDLTLLKALVRQQLPEKYKEIFFDQSKNGYAGYIDGGASQEEFYKFIKPILEKMDGTEELLVKLNREDLLRKQRTFDNGSIPHQIHLGELHAILRRQEDFYPFLKDNREKIEKILTFRIPYYVGPLARGNSRFAWMTRKSEETITPWNFEEVVDKGASAQSFIERMTNFDKNLPNEKVLPKHSLLYEYFTVYNELTKVKYVTEGMRKPAFLSGEQKKAIVDLLFKTNRKVTVKQLKEDYFKKIECFDSVEISGVEDRFNASLGTYHDLLKIIKDKDFLDNEENEDILEDIVLTLTLFEDREMIEERLKTYAHLFDDKVMKQLKRRRYTGWGRLSRKLINGIRDKQSGKTILDFLKSDGFANRNFMQLIHDDSLTFKEDIQKAQVSGQGDSLHEHIANLAGSPAIKKGILQTVKVVDELVKVMGRHKPENIVIEMARENQTTQKGQKNSRERMKRIEEGIKELGSQILKEHPVENTQLQNEKLYLYYLQNGRDMYVDQELDINRLSDYDVDHIVPQSFLKDDSIDNKVLTRSDKARGKSDNVPSEEVVKKMKNYWRQLLNAKLITQRKFDNLTKAERGGLSELDKAGFIKRQLVETRQITKHVAQILDSRMNTKYDENDKLIREVKVITLKSKLVSDFRKDFQFYKVREINNYHHAHDAYLNAVVGTALIKKYPKLESEFVYGDYKVYDVRKMIAKSEQEIGKATAKYFFYSNIMNFFKTEITLANGEIRKRPLIETNGETGEIVWDKGRDFATVRKVLSMPQVNIVKKTEVQTGGFSKESILPKRNSDKLIARKKDWDPKKYGGFDSPTVAYSVLVVAKVEKGKSKKLKSVKELLGITIMERSSFEKNPIDFLEAKGYKEVKKDLIIKLPKYSLFELENGRKRMLASAGELQKGNELALPSKYVNFLYLASHYEKLKGSPEDNEQKQLFVEQHKHYLDEIIEQISEFSKRVILADANLDKVLSAYNKHRDKPIREQAENIIHLFTLTNLGAPAAFKYFDTTIDRKRYTSTKEVLDATLIHQSITGLYETRIDLSQLGGDGGGSSGSSGSSGSSGSSGGLATAVDILAPQRYADPITWKSDEPVWVDQWPLTQEKLAAAQQLVQEQLQAGHIIESNSPWNTPIFVIKKKSGKWRLLQDLRAVNATMVLMGALQPGLPSPVAIPQGYFKIVIDLKDCFFTIPLQPVDQKRFAFSLPSTNFKQPMKRYQWKVLPQGMANSPTLCQKYVAAAIEPVRKSWAQMYIIHYMDDILIAGKLGEQVLQCFAQLKQALTTTGLQIAPEKVQLQDPYTYLGFQINGPKITNQKAVIRRDKLQTLNDFQKLLGDINWLRPYLHLTTGDLKPLFDILKGDSNPNSPRSLSEAALASLQKVETAIAEQFVTQIDYTQPLTFLIFNTTLTPTGLFWQNNPVMWVHLPASPKKVLLPYYDAIADLIILGRDNSKKYFGLEPSTIIQPYSKSQIHWLMQNTETWPIACASYAGNIDNHYPPNKLIQFCKLHAVVFPRIISKTPLDNALLVFTDGSSTGIAAYTFEKTTVRFKTSHTSAQLVELQALIAVLSAFPHRALNVYTDSAYLAHSIPLLETVSHIKHISDTAKFFLQCQQLIYNRSIPFYLGHIRAHSGLPGPLSQGNHITDLATKVVATTLTTAGKRTADGSEFEKRTADGSEFESPKKKAKVE

SEQ ID NO: 752 - protein, 2015 aa, synthetic construct
MPAAKRVKLDGGDKKYSIGLDIGTNSVGWAVITDEYKVPSKKFKVLGNTDRHSIKKNLIGALLFDSGETAEATRLKRTARRRYTRRKNRICYLQEIFSNEMAKVDDSFFHRLEESFLVEEDKKHERHPIFGNIVDEVAYHEKYPTIYHLRKKLVDSTDKADLRLIYLALAHMIKFRGHFLIEGDLNPDNSDVDKLFIQLVQTYNQLFEENPINASGVDAKAILSARLSKSRRLENLIAQLPGEKKNGLFGNLIALSLGLTPNFKSNFDLAEDAKLQLSKDTYDDDLDNLLAQIGDQYADLFLAAKNLSDAILLSDILRVNTEITKAPLSASMIKRYDEHHQDLTLLKALVRQQLPEKYKEIFFDQSKNGYAGYIDGGASQEEFYKFIKPILEKMDGTEELLVKLNREDLLRKQRTFDNGSIPHQIHLGELHAILRRQEDFYPFLKDNREKIEKILTFRIPYYVGPLARGNSRFAWMTRKSEETITPWNFEEVVDKGASAQSFIERMTNFDKNLPNEKVLPKHSLLYEYFTVYNELTKVKYVTEGMRKPAFLSGEQKKAIVDLLFKTNRKVTVKQLKEDYFKKIECFDSVEISGVEDRFNASLGTYHDLLKIIKDKDFLDNEENEDILEDIVLTLTLFEDREMIEERLKTYAHLFDDKVMKQLKRRRYTGWGRLSRKLINGIRDKQSGKTILDFLKSDGFANRNFMQLIHDDSLTFKEDIQKAQVSGQGDSLHEHIANLAGSPAIKKGILQTVKVVDELVKVMGRHKPENIVIEMARENQTTQKGQKNSRERMKRIEEGIKELGSQILKEHPVENTQLQNEKLYLYYLQNGRDMYVDQELDINRLSDYDVDHIVPQSFLKDDSIDNKVLTRSDKARGKSDNVPSEEVVKKMKNYWRQLLNAKLITQRKFDNLTKAERGGLSELDKAGFIKRQLVETRQITKHVAQILDSRMNTKYDENDKLIREVKVITLKSKLVSDFRKDFQFYKVREINNYHHAHDAYLNAVVGTALIKKYPKLESEFVYGDYKVYDVRKMIAKSEQEIGKATAKYFFYSNIMNFFKTEITLANGEIRKRPLIETNGETGEIVWDKGRDFATVRKVLSMPQVNIVKKTEVQTGGFSKESILPKRNSDKLIARKKDWDPKKYGGFDSPTVAYSVLVVAKVEKGKSKKLKSVKELLGITIMERSSFEKNPIDFLEAKGYKEVKKDLIIKLPKYSLFELENGRKRMLASAGELQKGNELALPSKYVNFLYLASHYEKLKGSPEDNEQKQLFVEQHKHYLDEIIEQISEFSKRVILADANLDKVLSAYNKHRDKPIREQAENIIHLFTLTNLGAPAAFKYFDTTIDRKRYTSTKEVLDATLIHQSITGLYETRIDLSQLGGDGGSGSETPGTSESATPESGGLATAVDILAPQRYADPITWKSDEPVWVDQWPLTQEKLAAAQQLVQEQLQAGHIIESNSPWNTPIFVIKKKSGKWRLLQDLRAVNATMVLMGALQPGLPSPVAIPQGYFKIVIDLKDCFFTIPLQPVDQKRFAFSLPSTNFKQPMKRYQWKVLPQGMANSPTLCQKYVAAAIEPVRKSWAQMYIIHYMDDILIAGKLGEQVLQCFAQLKQALTTTGLQIAPEKVQLQDPYTYLGFQINGPKITNQKAVIRRDKLQTLNDFQKLLGDINWLRPYLHLTTGDLKPLFDILKGDSNPNSPRSLSEAALASLQKVETAIAEQFVTQIDYTQPLTFLIFNTTLTPTGLFWQNNPVMWVHLPASPKKVLLPYYDAIADLIILGRDNSKKYFGLEPSTIIQPYSKSQIHWLMQNTETWPIACASYAGNIDNHYPPNKLIQFCKLHAVVFPRIISKTPLDNALLVFTDGSSTGIAAYTFEKTTVRFKTSHTSAQLVELQALIAVLSAFPHRALNVYTDSAYLAHSIPLLETVSHIKHISDTAKFFLQCQQLIYNRSIPFYLGHIRAHSGLPGPLSQGNHITDLATKVVATTLTTAGKRTADGSEFEKRTADGSEFESPKKKAKVE

SEQ ID NO: 753 - protein, 2010 aa, synthetic construct
MPAAKRVKLDGGDKKYSIGLDIGTNSVGWAVITDEYKVPSKKFKVLGNTDRHSIKKNLIGALLFDSGETAEATRLKRTARRRYTRRKNRICYLQEIFSNEMAKVDDSFFHRLEESFLVEEDKKHERHPIFGNIVDEVAYHEKYPTIYHLRKKLVDSTDKADLRLIYLALAHMIKFRGHFLIEGDLNPDNSDVDKLFIQLVQTYNQLFEENPINASGVDAKAILSARLSKSRRLENLIAQLPGEKKNGLFGNLIALSLGLTPNFKSNFDLAEDAKLQLSKDTYDDDLDNLLAQIGDQYADLFLAAKNLSDAILLSDILRVNTEITKAPLSASMIKRYDEHHQDLTLLKALVRQQLPEKYKEIFFDQSKNGYAGYIDGGASQEEFYKFIKPILEKMDGTEELLVKLNREDLLRKQRTFDNGSIPHQIHLGELHAILRRQEDFYPFLKDNREKIEKILTFRIPYYVGPLARGNSRFAWMTRKSEETITPWNFEEVVDKGASAQSFIERMTNFDKNLPNEKVLPKHSLLYEYFTVYNELTKVKYVTEGMRKPAFLSGEQKKAIVDLLFKTNRKVTVKQLKEDYFKKIECFDSVEISGVEDRFNASLGTYHDLLKIIKDKDFLDNEENEDILEDIVLTLTLFEDREMIEERLKTYAHLFDDKVMKQLKRRRYTGWGRLSRKLINGIRDKQSGKTILDFLKSDGFANRNFMQLIHDDSLTFKEDIQKAQVSGQGDSLHEHIANLAGSPAIKKGILQTVKVVDELVKVMGRHKPENIVIEMARENQTTQKGQKNSRERMKRIEEGIKELGSQILKEHPVENTQLQNEKLYLYYLQNGRDMYVDQELDINRLSDYDVDHIVPQSFLKDDSIDNKVLTRSDKARGKSDNVPSEEVVKKMKNYWRQLLNAKLITQRKFDNLTKAERGGLSELDKAGFIKRQLVETRQITKHVAQILDSRMNTKYDENDKLIREVKVITLKSKLVSDFRKDFQFYKVREINNYHHAHDAYLNAVVGTALIKKYPKLESEFVYGDYKVYDVRKMIAKSEQEIGKATAKYFFYSNIMNFFKTEITLANGEIRKRPLIETNGETGEIVWDKGRDFATVRKVLSMPQVNIVKKTEVQTGGFSKESILPKRNSDKLIARKKDWDPKKYGGFDSPTVAYSVLVVAKVEKGKSKKLKSVKELLGITIMERSSFEKNPIDFLEAKGYKEVKKDLIIKLPKYSLFELENGRKRMLASAGELQKGNELALPSKYVNFLYLASHYEKLKGSPEDNEQKQLFVEQHKHYLDEIIEQISEFSKRVILADANLDKVLSAYNKHRDKPIREQAENIIHLFTLTNLGAPAAFKYFDTTIDRKRYTSTKEVLDATLIHQSITGLYETRIDLSQLGGDGGGSSPAPEAAAKGGLATAVDILAPQRYADPITWKSDEPVWVDQWPLTQEKLAAAQQLVQEQLQAGHIIESNSPWNTPIFVIKKKSGKWRLLQDLRAVNATMVLMGALQPGLPSPVAIPQGYFKIVIDLKDCFFTIPLQPVDQKRFAFSLPSTNFKQPMKRYQWKVLPQGMANSPTLCQKYVAAAIEPVRKSWAQMYIIHYMDDILIAGKLGEQVLQCFAQLKQALTTTGLQIAPEKVQLQDPYTYLGFQINGPKITNQKAVIRRDKLQTLNDFQKLLGDINWLRPYLHLTTGDLKPLFDILKGDSNPNSPRSLSEAALASLQKVETAIAEQFVTQIDYTQPLTFLIFNTTLTPTGLFWQNNPVMWVHLPASPKKVLLPYYDAIADLIILGRDNSKKYFGLEPSTIIQPYSKSQIHWLMQNTETWPIACASYAGNIDNHYPPNKLIQFCKLHAVVFPRIISKTPLDNALLVFTDGSSTGIAAYTFEKTTVRFKTSHTSAQLVELQALIAVLSAFPHRALNVYTDSAYLAHSIPLLETVSHIKHISDTAKFFLQCQQLIYNRSIPFYLGHIRAHSGLPGPLSQGNHITDLATKVVATTLTTAGKRTADGSEFEKRTADGSEFESPKKKAKVE

SEQ ID NO: 754 - protein, 2010 aa, synthetic construct
MPAAKRVKLDGGDKKYSIGLDIGTNSVGWAVITDEYKVPSKKFKVLGNTDRHSIKKNLIGALLFDSGETAEATRLKRTARRRYTRRKNRICYLQEIFSNEMAKVDDSFFHRLEESFLVEEDKKHERHPIFGNIVDEVAYHEKYPTIYHLRKKLVDSTDKADLRLIYLALAHMIKFRGHFLIEGDLNPDNSDVDKLFIQLVQTYNQLFEENPINASGVDAKAILSARLSKSRRLENLIAQLPGEKKNGLFGNLIALSLGLTPNFKSNFDLAEDAKLQLSKDTYDDDLDNLLAQIGDQYADLFLAAKNLSDAILLSDILRVNTEITKAPLSASMIKRYDEHHQDLTLLKALVRQQLPEKYKEIFFDQSKNGYAGYIDGGASQEEFYKFIKPILEKMDGTEELLVKLNREDLLRKQRTFDNGSIPHQIHLGELHAILRRQEDFYPFLKDNREKIEKILTFRIPYYVGPLARGNSRFAWMTRKSEETITPWNFEEVVDKGASAQSFIERMTNFDKNLPNEKVLPKHSLLYEYFTVYNELTKVKYVTEGMRKPAFLSGEQKKAIVDLLFKTNRKVTVKQLKEDYFKKIECFDSVEISGVEDRFNASLGTYHDLLKIIKDKDFLDNEENEDILEDIVLTLTLFEDREMIEERLKTYAHLFDDKVMKQLKRRRYTGWGRLSRKLINGIRDKQSGKTILDFLKSDGFANRNFMQLIHDDSLTFKEDIQKAQVSGQGDSLHEHIANLAGSPAIKKGILQTVKVVDELVKVMGRHKPENIVIEMARENQTTQKGQKNSRERMKRIEEGIKELGSQILKEHPVENTQLQNEKLYLYYLQNGRDMYVDQELDINRLSDYDVDHIVPQSFLKDDSIDNKVLTRSDKARGKSDNVPSEEVVKKMKNYWRQLLNAKLITQRKFDNLTKAERGGLSELDKAGFIKRQLVETRQITKHVAQILDSRMNTKYDENDKLIREVKVITLKSKLVSDFRKDFQFYKVREINNYHHAHDAYLNAVVGTALIKKYPKLESEFVYGDYKVYDVRKMIAKSEQEIGKATAKYFFYSNIMNFFKTEITLANGEIRKRPLIETNGETGEIVWDKGRDFATVRKVLSMPQVNIVKKTEVQTGGFSKESILPKRNSDKLIARKKDWDPKKYGGFDSPTVAYSVLVVAKVEKGKSKKLKSVKELLGITIMERSSFEKNPIDFLEAKGYKEVKKDLIIKLPKYSLFELENGRKRMLASAGELQKGNELALPSKYVNFLYLASHYEKLKGSPEDNEQKQLFVEQHKHYLDEIIEQISEFSKRVILADANLDKVLSAYNKHRDKPIREQAENIIHLFTLTNLGAPAAFKYFDTTIDRKRYTSTKEVLDATLIHQSITGLYETRIDLSQLGGDGGGSSGGSEAAAKGGLATAVDILAPQRYADPITWKSDEPVWVDQWPLTQEKLAAAQQLVQEQLQAGHIIESNSPWNTPIFVIKKKSGKWRLLQDLRAVNATMVLMGALQPGLPSPVAIPQGYFKIVIDLKDCFFTIPLQPVDQKRFAFSLPSTNFKQPMKRYQWKVLPQGMANSPTLCQKYVAAAIEPVRKSWAQMYIIHYMDDILIAGKLGEQVLQCFAQLKQALTTTGLQIAPEKVQLQDPYTYLGFQINGPKITNQKAVIRRDKLQTLNDFQKLLGDINWLRPYLHLTTGDLKPLFDILKGDSNPNSPRSLSEAALASLQKVETAIAEQFVTQIDYTQPLTFLIFNTTLTPTGLFWQNNPVMWVHLPASPKKVLLPYYDAIADLIILGRDNSKKYFGLEPSTIIQPYSKSQIHWLMQNTETWPIACASYAGNIDNHYPPNKLIQFCKLHAVVFPRIISKTPLDNALLVFTDGSSTGIAAYTFEKTTVRFKTSHTSAQLVELQALIAVLSAFPHRALNVYTDSAYLAHSIPLLETVSHIKHISDTAKFFLQCQQLIYNRSIPFYLGHIRAHSGLPGPLSQGNHITDLATKVVATTLTTAGKRTADGSEFEKRTADGSEFESPKKKAKVE

SEQ ID NO: 755 - protein, 2008 aa, synthetic construct
MPAAKRVKLDGGDKKYSIGLDIGTNSVGWAVITDEYKVPSKKFKVLGNTDRHSIKKNLIGALLFDSGETAEATRLKRTARRRYTRRKNRICYLQEIFSNEMAKVDDSFFHRLEESFLVEEDKKHERHPIFGNIVDEVAYHEKYPTIYHLRKKLVDSTDKADLRLIYLALAHMIKFRGHFLIEGDLNPDNSDVDKLFIQLVQTYNQLFEENPINASGVDAKAILSARLSKSRRLENLIAQLPGEKKNGLFGNLIALSLGLTPNFKSNFDLAEDAKLQLSKDTYDDDLDNLLAQIGDQYADLFLAAKNLSDAILLSDILRVNTEITKAPLSASMIKRYDEHHQDLTLLKALVRQQLPEKYKEIFFDQSKNGYAGYIDGGASQEEFYKFIKPILEKMDGTEELLVKLNREDLLRKQRTFDNGSIPHQIHLGELHAILRRQEDFYPFLKDNREKIEKILTFRIPYYVGPLARGNSRFAWMTRKSEETITPWNFEEVVDKGASAQSFIERMTNFDKNLPNEKVLPKHSLLYEYFTVYNELTKVKYVTEGMRKPAFLSGEQKKAIVDLLFKTNRKVTVKQLKEDYFKKIECFDSVEISGVEDRFNASLGTYHDLLKIIKDKDFLDNEENEDILEDIVLTLTLFEDREMIEERLKTYAHLFDDKVMKQLKRRRYTGWGRLSRKLINGIRDKQSGKTILDFLKSDGFANRNFMQLIHDDSLTFKEDIQKAQVSGQGDSLHEHIANLAGSPAIKKGILQTVKVVDELVKVMGRHKPENIVIEMARENQTTQKGQKNSRERMKRIEEGIKELGSQILKEHPVENTQLQNEKLYLYYLQNGRDMYVDQELDINRLSDYDVDHIVPQSFLKDDSIDNKVLTRSDKARGKSDNVPSEEVVKKMKNYWRQLLNAKLITQRKFDNLTKAERGGLSELDKAGFIKRQLVETRQITKHVAQILDSRMNTKYDENDKLIREVKVITLKSKLVSDFRKDFQFYKVREINNYHHAHDAYLNAVVGTALIKKYPKLESEFVYGDYKVYDVRKMIAKSEQEIGKATAKYFFYSNIMNFFKTEITLANGEIRKRPLIETNGETGEIVWDKGRDFATVRKVLSMPQVNIVKKTEVQTGGFSKESILPKRNSDKLIARKKDWDPKKYGGFDSPTVAYSVLVVAKVEKGKSKKLKSVKELLGITIMERSSFEKNPIDFLEAKGYKEVKKDLIIKLPKYSLFELENGRKRMLASAGELQKGNELALPSKYVNFLYLASHYEKLKGSPEDNEQKQLFVEQHKHYLDEIIEQISEFSKRVILADANLDKVLSAYNKHRDKPIREQAENIIHLFTLTNLGAPAAFKYFDTTIDRKRYTSTKEVLDATLIHQSITGLYETRIDLSQLGGDGGPAPGGGGGSGGLATAVDILAPQRYADPITWKSDEPVWVDQWPLTQEKLAAAQQLVQEQLQAGHIIESNSPWNTPIFVIKKKSGKWRLLQDLRAVNATMVLMGALQPGLPSPVAIPQGYFKIVIDLKDCFFTIPLQPVDQKRFAFSLPSTNFKQPMKRYQWKVLPQGMANSPTLCQKYVAAAIEPVRKSWAQMYIIHYMDDILIAGKLGEQVLQCFAQLKQALTTTGLQIAPEKVQLQDPYTYLGFQINGPKITNQKAVIRRDKLQTLNDFQKLLGDINWLRPYLHLTTGDLKPLFDILKGDSNPNSPRSLSEAALASLQKVETAIAEQFVTQIDYTQPLTFLIFNTTLTPTGLFWQNNPVMWVHLPASPKKVLLPYYDAIADLIILGRDNSKKYFGLEPSTIIQPYSKSQIHWLMQNTETWPIACASYAGNIDNHYPPNKLIQFCKLHAVVFPRIISKTPLDNALLVFTDGSSTGIAAYTFEKTTVRFKTSHTSAQLVELQALIAVLSAFPHRALNVYTDSAYLAHSIPLLETVSHIKHISDTAKFFLQCQQLIYNRSIPFYLGHIRAHSGLPGPLSQGNHITDLATKVVATTLTTAGKRTADGSEFEKRTADGSEFESPKKKAKVE

SEQ ID NO: 756 - protein, 2005 aa, synthetic construct
MPAAKRVKLDGGDKKYSIGLDIGTNSVGWAVITDEYKVPSKKFKVLGNTDRHSIKKNLIGALLFDSGETAEATRLKRTARRRYTRRKNRICYLQEIFSNEMAKVDDSFFHRLEESFLVEEDKKHERHPIFGNIVDEVAYHEKYPTIYHLRKKLVDSTDKADLRLIYLALAHMIKFRGHFLIEGDLNPDNSDVDKLFIQLVQTYNQLFEENPINASGVDAKAILSARLSKSRRLENLIAQLPGEKKNGLFGNLIALSLGLTPNFKSNFDLAEDAKLQLSKDTYDDDLDNLLAQIGDQYADLFLAAKNLSDAILLSDILRVNTEITKAPLSASMIKRYDEHHQDLTLLKALVRQQLPEKYKEIFFDQSKNGYAGYIDGGASQEEFYKFIKPILEKMDGTEELLVKLNREDLLRKQRTFDNGSIPHQIHLGELHAILRRQEDFYPFLKDNREKIEKILTFRIPYYVGPLARGNSRFAWMTRKSEETITPWNFEEVVDKGASAQSFIERMTNFDKNLPNEKVLPKHSLLYEYFTVYNELTKVKYVTEGMRKPAFLSGEQKKAIVDLLFKTNRKVTVKQLKEDYFKKIECFDSVEISGVEDRFNASLGTYHDLLKIIKDKDFLDNEENEDILEDIVLTLTLFEDREMIEERLKTYAHLFDDKVMKQLKRRRYTGWGRLSRKLINGIRDKQSGKTILDFLKSDGFANRNFMQLIHDDSLTFKEDIQKAQVSGQGDSLHEHIANLAGSPAIKKGILQTVKVVDELVKVMGRHKPENIVIEMARENQTTQKGQKNSRERMKRIEEGIKELGSQILKEHPVENTQLQNEKLYLYYLQNGRDMYVDQELDINRLSDYDVDHIVPQSFLKDDSIDNKVLTRSDKARGKSDNVPSEEVVKKMKNYWRQLLNAKLITQRKFDNLTKAERGGLSELDKAGFIKRQLVETRQITKHVAQILDSRMNTKYDENDKLIREVKVITLKSKLVSDFRKDFQFYKVREINNYHHAHDAYLNAVVGTALIKKYPKLESEFVYGDYKVYDVRKMIAKSEQEIGKATAKYFFYSNIMNFFKTEITLANGEIRKRPLIETNGETGEIVWDKGRDFATVRKVLSMPQVNIVKKTEVQTGGFSKESILPKRNSDKLIARKKDWDPKKYGGFDSPTVAYSVLVVAKVEKGKSKKLKSVKELLGITIMERSSFEKNPIDFLEAKGYKEVKKDLIIKLPKYSLFELENGRKRMLASAGELQKGNELALPSKYVNFLYLASHYEKLKGSPEDNEQKQLFVEQHKHYLDEIIEQISEFSKRVILADANLDKVLSAYNKHRDKPIREQAENIIHLFTLTNLGAPAAFKYFDTTIDRKRYTSTKEVLDATLIHQSITGLYETRIDLSQLGGDGGGGGGGSGGLATAVDILAPQRYADPITWKSDEPVWVDQWPLTQEKLAAAQQLVQEQLQAGHIIESNSPWNTPIFVIKKKSGKWRLLQDLRAVNATMVLMGALQPGLPSPVAIPQGYFKIVIDLKDCFFTIPLQPVDQKRFAFSLPSTNFKQPMKRYQWKVLPQGMANSPTLCQKYVAAAIEPVRKSWAQMYIIHYMDDILIAGKLGEQVLQCFAQLKQALTTTGLQIAPEKVQLQDPYTYLGFQINGPKITNQKAVIRRDKLQTLNDFQKLLGDINWLRPYLHLTTGDLKPLFDILKGDSNPNSPRSLSEAALASLQKVETAIAEQFVTQIDYTQPLTFLIFNTTLTPTGLFWQNNPVMWVHLPASPKKVLLPYYDAIADLIILGRDNSKKYFGLEPSTIIQPYSKSQIHWLMQNTETWPIACASYAGNIDNHYPPNKLIQFCKLHAVVFPRIISKTPLDNALLVFTDGSSTGIAAYTFEKTTVRFKTSHTSAQLVELQALIAVLSAFPHRALNVYTDSAYLAHSIPLLETVSHIKHISDTAKFFLQCQQLIYNRSIPFYLGHIRAHSGLPGPLSQGNHITDLATKVVATTLTTAGKRTADGSEFEKRTADGSEFESPKKKAKVE

SEQ ID NO: 757 - protein, 2014 aa, synthetic construct
MPAAKRVKLDGGDKKYSIGLDIGTNSVGWAVITDEYKVPSKKFKVLGNTDRHSIKKNLIGALLFDSGETAEATRLKRTARRRYTRRKNRICYLQEIFSNEMAKVDDSFFHRLEESFLVEEDKKHERHPIFGNIVDEVAYHEKYPTIYHLRKKLVDSTDKADLRLIYLALAHMIKFRGHFLIEGDLNPDNSDVDKLFIQLVQTYNQLFEENPINASGVDAKAILSARLSKSRRLENLIAQLPGEKKNGLFGNLIALSLGLTPNFKSNFDLAEDAKLQLSKDTYDDDLDNLLAQIGDQYADLFLAAKNLSDAILLSDILRVNTEITKAPLSASMIKRYDEHHQDLTLLKALVRQQLPEKYKEIFFDQSKNGYAGYIDGGASQEEFYKFIKPILEKMDGTEELLVKLNREDLLRKQRTFDNGSIPHQIHLGELHAILRRQEDFYPFLKDNREKIEKILTFRIPYYVGPLARGNSRFAWMTRKSEETITPWNFEEVVDKGASAQSFIERMTNFDKNLPNEKVLPKHSLLYEYFTVYNELTKVKYVTEGMRKPAFLSGEQKKAIVDLLFKTNRKVTVKQLKEDYFKKIECFDSVEISGVEDRFNASLGTYHDLLKIIKDKDFLDNEENEDILEDIVLTLTLFEDREMIEERLKTYAHLFDDKVMKQLKRRRYTGWGRLSRKLINGIRDKQSGKTILDFLKSDGFANRNFMQLIHDDSLTFKEDIQKAQVSGQGDSLHEHIANLAGSPAIKKGILQTVKVVDELVKVMGRHKPENIVIEMARENQTTQKGQKNSRERMKRIEEGIKELGSQILKEHPVENTQLQNEKLYLYYLQNGRDMYVDQELDINRLSDYDVDHIVPQSFLKDDSIDNKVLTRSDKARGKSDNVPSEEVVKKMKNYWRQLLNAKLITQRKFDNLTKAERGGLSELDKAGFIKRQLVETRQITKHVAQILDSRMNTKYDENDKLIREVKVITLKSKLVSDFRKDFQFYKVREINNYHHAHDAYLNAVVGTALIKKYPKLESEFVYGDYKVYDVRKMIAKSEQEIGKATAKYFFYSNIMNFFKTEITLANGEIRKRPLIETNGETGEIVWDKGRDFATVRKVLSMPQVNIVKKTEVQTGGFSKESILPKRNSDKLIARKKDWDPKKYGGFDSPTVAYSVLVVAKVEKGKSKKLKSVKELLGITIMERSSFEKNPIDFLEAKGYKEVKKDLIIKLPKYSLFELENGRKRMLASAGELQKGNELALPSKYVNFLYLASHYEKLKGSPEDNEQKQLFVEQHKHYLDEIIEQISEFSKRVILADANLDKVLSAYNKHRDKPIREQAENIIHLFTLTNLGAPAAFKYFDTTIDRKRYTSTKEVLDATLIHQSITGLYETRIDLSQLGGDGGGSSGSSGSSGSSGSSGGLATAVDILAPQRYADPITWKSDEPVWVDQWPLTQEKLAAAQQLVQEQLQAGHIIESNSPWNTPIFVIKKKSGKWRLLQDLRAVNATMVLMGALQPGLPSPVAPPQGYFKIVIDLKDCFFTIPLQPVDQKRFAFSLPSTNFKQPMKRYQWKVLPQGMANSPTLCQKYVAAAIEPVRKSWAQMYIIHYMDDILIAGKLGEQVLQCFAQLKQALTTTGLQIAPEKVQLQDPYTYLGFQINGPKITNQKAVIRRDKLQTLNDFQKLLGDINWLRPYLHLTTGDLKPLFDILKGDSNPNSPRSLSEAALASLQKVETAIAEQFVTQIDYTQPLTFLIFNTTLTPTGLFWQNNPVMWVHLPASPKKVLLPYYDAIADLIILGRDNSKKYFGLEPSTIIQPYSKSQIHWLMQNTETWPIACASYAGNIDNHYPPNKLIQFCKLHAVVFPRIISKTPLDNALLVFTDGSSTGIAAYTFEKTTVRFKTSHTSAQLVELQALIAVLSAFPHRALNVYTDSAYLAHSIPLLETVSHIKHISDTAKFFLQCQQLIYNRSIPFYLGHIRAHSGLPGPLSQGNHITDLATKVVATTLTTAGKRTADGSEFEKRTADGSEFESPKKKAKVE

SEQ ID NO: 758 - protein, 2010 aa, synthetic construct
MPAAKRVKLDGGDKKYSIGLDIGTNSVGWAVITDEYKVPSKKFKVLGNTDRHSIKKNLIGALLFDSGETAEATRLKRTARRRYTRRKNRICYLQEIFSNEMAKVDDSFFHRLEESFLVEEDKKHERHPIFGNIVDEVAYHEKYPTIYHLRKKLVDSTDKADLRLIYLALAHMIKFRGHFLIEGDLNPDNSDVDKLFIQLVQTYNQLFEENPINASGVDAKAILSARLSKSRRLENLIAQLPGEKKNGLFGNLIALSLGLTPNFKSNFDLAEDAKLQLSKDTYDDDLDNLLAQIGDQYADLFLAAKNLSDAILLSDILRVNTEITKAPLSASMIKRYDEHHQDLTLLKALVRQQLPEKYKEIFFDQSKNGYAGYIDGGASQEEFYKFIKPILEKMDGTEELLVKLNREDLLRKQRTFDNGSIPHQIHLGELHAILRRQEDFYPFLKDNREKIEKILTFRIPYYVGPLARGNSRFAWMTRKSEETITPWNFEEVVDKGASAQSFIERMTNFDKNLPNEKVLPKHSLLYEYFTVYNELTKVKYVTEGMRKPAFLSGEQKKAIVDLLFKTNRKVTVKQLKEDYFKKIECFDSVEISGVEDRFNASLGTYHDLLKIIKDKDFLDNEENEDILEDIVLTLTLFEDREMIEERLKTYAHLFDDKVMKQLKRRRYTGWGRLSRKLINGIRDKQSGKTILDFLKSDGFANRNFMQLIHDDSLTFKEDIQKAQVSGQGDSLHEHIANLAGSPAIKKGILQTVKVVDELVKVMGRHKPENIVIEMARENQTTQKGQKNSRERMKRIEEGIKELGSQILKEHPVENTQLQNEKLYLYYLQNGRDMYVDQELDINRLSDYDVDHIVPQSFLKDDSIDNKVLTRSDKARGKSDNVPSEEVVKKMKNYWRQLLNAKLITQRKFDNLTKAERGGLSELDKAGFIKRQLVETRQITKHVAQILDSRMNTKYDENDKLIREVKVITLKSKLVSDFRKDFQFYKVREINNYHHAHDAYLNAVVGTALIKKYPKLESEFVYGDYKVYDVRKMIAKSEQEIGKATAKYFFYSNIMNFFKTEITLANGEIRKRPLIETNGETGEIVWDKGRDFATVRKVLSMPQVNIVKKTEVQTGGFSKESILPKRNSDKLIARKKDWDPKKYGGFDSPTVAYSVLVVAKVEKGKSKKLKSVKELLGITIMERSSFEKNPIDFLEAKGYKEVKKDLIIKLPKYSLFELENGRKRMLASAGELQKGNELALPSKYVNFLYLASHYEKLKGSPEDNEQKQLFVEQHKHYLDEIIEQISEFSKRVILADANLDKVLSAYNKHRDKPIREQAENIIHLFTLTNLGAPAAFKYFDTTIDRKRYTSTKEVLDATLIHQSITGLYETRIDLSQLGGDGGGSSPAPEAAAKGGLATAVDILAPQRYADPITWKSDEPVWVDQWPLTQEKLAAAQQLVQEQLQAGHIIESNSPWNTPIFVIKKKSGKWRLLQDLRAVNATMVLMGALQPGLPSPVAPPQGYFKIVIDLKDCFFTIPLQPVDQKRFAFSLPSTNFKQPMKRYQWKVLPQGMANSPTLCQKYVAAAIEPVRKSWAQMYIIHYMDDILIAGKLGEQVLQCFAQLKQALTTTGLQIAPEKVQLQDPYTYLGFQINGPKITNQKAVIRRDKLQTLNDFQKLLGDINWLRPYLHLTTGDLKPLFDILKGDSNPNSPRSLSEAALASLQKVETAIAEQFVTQIDYTQPLTFLIFNTTLTPTGLFWQNNPVMWVHLPASPKKVLLPYYDAIADLIILGRDNSKKYFGLEPSTIIQPYSKSQIHWLMQNTETWPIACASYAGNIDNHYPPNKLIQFCKLHAVVFPRIISKTPLDNALLVFTDGSSTGIAAYTFEKTTVRFKTSHTSAQLVELQALIAVLSAFPHRALNVYTDSAYLAHSIPLLETVSHIKHISDTAKFFLQCQQLIYNRSIPFYLGHIRAHSGLPGPLSQGNHITDLATKVVATTLTTAGKRTADGSEFEKRTADGSEFESPKKKAKVE

SEQ ID NO: 759 - protein, 2072 aa, synthetic construct
MPAAKRVKLDGGDKKYSIGLDIGTNSVGWAVITDEYKVPSKKFKVLGNTDRHSIKKNLIGALLFDSGETAEATRLKRTARRRYTRRKNRICYLQEIFSNEMAKVDDSFFHRLEESFLVEEDKKHERHPIFGNIVDEVAYHEKYPTIYHLRKKLVDSTDKADLRLIYLALAHMIKFRGHFLIEGDLNPDNSDVDKLFIQLVQTYNQLFEENPINASGVDAKAILSARLSKSRRLENLIAQLPGEKKNGLFGNLIALSLGLTPNFKSNFDLAEDAKLQLSKDTYDDDLDNLLAQIGDQYADLFLAAKNLSDAILLSDILRVNTEITKAPLSASMIKRYDEHHQDLTLLKALVRQQLPEKYKEIFFDQSKNGYAGYIDGGASQEEFYKFIKPILEKMDGTEELLVKLNREDLLRKQRTFDNGSIPHQIHLGELHAILRRQEDFYPFLKDNREKIEKILTFRIPYYVGPLARGNSRFAWMTRKSEETITPWNFEEVVDKGASAQSFIERMTNFDKNLPNEKVLPKHSLLYEYFTVYNELTKVKYVTEGMRKPAFLSGEQKKAIVDLLFKTNRKVTVKQLKEDYFKKIECFDSVEISGVEDRFNASLGTYHDLLKIIKDKDFLDNEENEDILEDIVLTLTLFEDREMIEERLKTYAHLFDDKVMKQLKRRRYTGWGRLSRKLINGIRDKQSGKTILDFLKSDGFANRNFMQLIHDDSLTFKEDIQKAQVSGQGDSLHEHIANLAGSPAIKKGILQTVKVVDELVKVMGRHKPENIVIEMARENQTTQKGQKNSRERMKRIEEGIKELGSQILKEHPVENTQLQNEKLYLYYLQNGRDMYVDQELDINRLSDYDVDHIVPQSFLKDDSIDNKVLTRSDKARGKSDNVPSEEVVKKMKNYWRQLLNAKLITQRKFDNLTKAERGGLSELDKAGFIKRQLVETRQITKHVAQILDSRMNTKYDENDKLIREVKVITLKSKLVSDFRKDFQFYKVREINNYHHAHDAYLNAVVGTALIKKYPKLESEFVYGDYKVYDVRKMIAKSEQEIGKATAKYFFYSNIMNFFKTEITLANGEIRKRPLIETNGETGEIVWDKGRDFATVRKVLSMPQVNIVKKTEVQTGGFSKESILPKRNSDKLIARKKDWDPKKYGGFDSPTVAYSVLVVAKVEKGKSKKLKSVKELLGITIMERSSFEKNPIDFLEAKGYKEVKKDLIIKLPKYSLFELENGRKRMLASAGELQKGNELALPSKYVNFLYLASHYEKLKGSPEDNEQKQLFVEQHKHYLDEIIEQISEFSKRVILADANLDKVLSAYNKHRDKPIREQAENIIHLFTLTNLGAPAAFKYFDTTIDRKRYTSTKEVLDATLIHQSITGLYETRIDLSQLGGDGGPAPEAAAKGGSCQTKNTLNIDEYLLQFPDQLWASLPTDIGRMLVPPITIKIKDNASLPSIRQYPLPKDKTEGLRPLISSLENQGILIKCHSPCNTPIFPIKKAGRDEYRMIHDLRAINNIVAPLTAVVASPTTVLSNLAPSLHWFTVIDLSNAFFSVPIHKDSQYLFAFTFEGHQYTWTVLPQGFIHSPTLFSQALYQSLHKIKFKISSEICIYMDDVLIASKDRDTNLKDTAVMLQHLASEGHKVSKKKLQLCQQEVVYLGQLLTPEGRKILPDRKVTVSQFQQPTTIRQIRAFLGLVGYCRHWIPEFSIHSKFLEKQLKKDTAEPFQLDDQQVEAFNKLKHAITTAPVLVVPDPAKPFQLYTSHSEHASIAVLTQKHAGRTRPIAFLSSKFDAIESGLPPCLKACASIHRSLTQADSFILGAPLIIYTTHAICTLLQRDRSQLVTASRFSKWEADLLRPELTFVACSAVSPAHLYMQSCENNIPPHDCVLLTHTISRPRPDLSDLPIPDPDMTLFSDGSYTTGRGGAAVVMHRPVTDDFIIIHQQPGGASAQTAELLALAAACHLATDKTVNIYTDSRYAYGVVHDFGHLWMHRGFVTSAGTPIKNHKEIEYLLKQIMKPKQVSVIKIEAHTKGVSMEVRGNAAADEAAKNAVFLVQRAGKRTADGSEFEKRTADGSEFESPKKKAKVE

SEQ ID NO: 760 - protein, 2070 aa, synthetic construct
MPAAKRVKLDGGDKKYSIGLDIGTNSVGWAVITDEYKVPSKKFKVLGNTDRHSIKKNLIGALLFDSGETAEATRLKRTARRRYTRRKNRICYLQEIFSNEMAKVDDSFFHRLEESFLVEEDKKHERHPIFGNIVDEVAYHEKYPTIYHLRKKLVDSTDKADLRLIYLALAHMIKFRGHFLIEGDLNPDNSDVDKLFIQLVQTYNQLFEENPINASGVDAKAILSARLSKSRRLENLIAQLPGEKKNGLFGNLIALSLGLTPNFKSNFDLAEDAKLQLSKDTYDDDLDNLLAQIGDQYADLFLAAKNLSDAILLSDILRVNTEITKAPLSASMIKRYDEHHQDLTLLKALVRQQLPEKYKEIFFDQSKNGYAGYIDGGASQEEFYKFIKPILEKMDGTEELLVKLNREDLLRKQRTFDNGSIPHQIHLGELHAILRRQEDFYPFLKDNREKIEKILTFRIPYYVGPLARGNSRFAWMTRKSEETITPWNFEEVVDKGASAQSFIERMTNFDKNLPNEKVLPKHSLLYEYFTVYNELTKVKYVTEGMRKPAFLSGEQKKAIVDLLFKTNRKVTVKQLKEDYFKKIECFDSVEISGVEDRFNASLGTYHDLLKIIKDKDFLDNEENEDILEDIVLTLTLFEDREMIEERLKTYAHLFDDKVMKQLKRRRYTGWGRLSRKLINGIRDKQSGKTILDFLKSDGFANRNFMQLIHDDSLTFKEDIQKAQVSGQGDSLHEHIANLAGSPAIKKGILQTVKVVDELVKVMGRHKPENIVIEMARENQTTQKGQKNSRERMKRIEEGIKELGSQILKEHPVENTQLQNEKLYLYYLQNGRDMYVDQELDINRLSDYDVDHIVPQSFLKDDSIDNKVLTRSDKARGKSDNVPSEEVVKKMKNYWRQLLNAKLITQRKFDNLTKAERGGLSELDKAGFIKRQLVETRQITKHVAQILDSRMNTKYDENDKLIREVKVITLKSKLVSDFRKDFQFYKVREINNYHHAHDAYLNAVVGTALIKKYPKLESEFVYGDYKVYDVRKMIAKSEQEIGKATAKYFFYSNIMNFFKTEITLANGEIRKRPLIETNGETGEIVWDKGRDFATVRKVLSMPQVNIVKKTEVQTGGFSKESILPKRNSDKLIARKKDWDPKKYGGFDSPTVAYSVLVVAKVEKGKSKKLKSVKELLGITIMERSSFEKNPIDFLEAKGYKEVKKDLIIKLPKYSLFELENGRKRMLASAGELQKGNELALPSKYVNFLYLASHYEKLKGSPEDNEQKQLFVEQHKHYLDEIIEQISEFSKRVILADANLDKVLSAYNKHRDKPIREQAENIIHLFTLTNLGAPAAFKYFDTTIDRKRYTSTKEVLDATLIHQSITGLYETRIDLSQLGGDGGGGGGGGGGSCQTKNTLNIDEYLLQFPDQLWASLPTDIGRMLVPPITIKIKDNASLPSIRQYPLPKDKTEGLRPLISSLENQGILIKCHSPCNTPIFPIKKAGRDEYRMIHDLRAINNIVAPLTAVVASPTTVLSNLAPSLHWFTVIDLSNAFFSVPIHKDSQYLFAFTFEGHQYTWTVLPQGFIHSPTLFSQALYQSLHKIKFKISSEICIYMDDVLIASKDRDTNLKDTAVMLQHLASEGHKVSKKKLQLCQQEVVYLGQLLTPEGRKILPDRKVTVSQFQQPTTIRQIRAFLGLVGYCRHWIPEFSIHSKFLEKQLKKDTAEPFQLDDQQVEAFNKLKHAITTAPVLVVPDPAKPFQLYTSHSEHASIAVLTQKHAGRTRPIAFLSSKFDAIESGLPPCLKACASIHRSLTQADSFILGAPLIIYTTHAICTLLQRDRSQLVTASRFSKWEADLLRPELTFVACSAVSPAHLYMQSCENNIPPHDCVLLTHTISRPRPDLSDLPIPDPDMTLFSDGSYTTGRGGAAVVMHRPVTDDFIIIHQQPGGASAQTAELLALAAACHLATDKTVNIYTDSRYAYGVVHDFGHLWMHRGFVTSAGTPIKNHKEIEYLLKQIMKPKQVSVIKIEAHTKGVSMEVRGNAAADEAAKNAVFLVQRAGKRTADGSEFEKRTADGSEFESPKKKAKVE

SEQ ID NO: 761 - protein, 2077 aa, synthetic construct
MPAAKRVKLDGGDKKYSIGLDIGTNSVGWAVITDEYKVPSKKFKVLGNTDRHSIKKNLIGALLFDSGETAEATRLKRTARRRYTRRKNRICYLQEIFSNEMAKVDDSFFHRLEESFLVEEDKKHERHPIFGNIVDEVAYHEKYPTIYHLRKKLVDSTDKADLRLIYLALAHMIKFRGHFLIEGDLNPDNSDVDKLFIQLVQTYNQLFEENPINASGVDAKAILSARLSKSRRLENLIAQLPGEKKNGLFGNLIALSLGLTPNFKSNFDLAEDAKLQLSKDTYDDDLDNLLAQIGDQYADLFLAAKNLSDAILLSDILRVNTEITKAPLSASMIKRYDEHHQDLTLLKALVRQQLPEKYKEIFFDQSKNGYAGYIDGGASQEEFYKFIKPILEKMDGTEELLVKLNREDLLRKQRTFDNGSIPHQIHLGELHAILRRQEDFYPFLKDNREKIEKILTFRIPYYVGPLARGNSRFAWMTRKSEETITPWNFEEVVDKGASAQSFIERMTNFDKNLPNEKVLPKHSLLYEYFTVYNELTKVKYVTEGMRKPAFLSGEQKKAIVDLLFKTNRKVTVKQLKEDYFKKIECFDSVEISGVEDRFNASLGTYHDLLKIIKDKDFLDNEENEDILEDIVLTLTLFEDREMIEERLKTYAHLFDDKVMKQLKRRRYTGWGRLSRKLINGIRDKQSGKTILDFLKSDGFANRNFMQLIHDDSLTFKEDIQKAQVSGQGDSLHEHIANLAGSPAIKKGILQTVKVVDELVKVMGRHKPENIVIEMARENQTTQKGQKNSRERMKRIEEGIKELGSQILKEHPVENTQLQNEKLYLYYLQNGRDMYVDQELDINRLSDYDVDHIVPQSFLKDDSIDNKVLTRSDKARGKSDNVPSEEVVKKMKNYWRQLLNAKLITQRKFDNLTKAERGGLSELDKAGFIKRQLVETRQITKHVAQILDSRMNTKYDENDKLIREVKVITLKSKLVSDFRKDFQFYKVREINNYHHAHDAYLNAVVGTALIKKYPKLESEFVYGDYKVYDVRKMIAKSEQEIGKATAKYFFYSNIMNFFKTEITLANGEIRKRPLIETNGETGEIVWDKGRDFATVRKVLSMPQVNIVKKTEVQTGGFSKESILPKRNSDKLIARKKDWDPKKYGGFDSPTVAYSVLVVAKVEKGKSKKLKSVKELLGITIMERSSFEKNPIDFLEAKGYKEVKKDLIIKLPKYSLFELENGRKRMLASAGELQKGNELALPSKYVNFLYLASHYEKLKGSPEDNEQKQLFVEQHKHYLDEIIEQISEFSKRVILADANLDKVLSAYNKHRDKPIREQAENIIHLFTLTNLGAPAAFKYFDTTIDRKRYTSTKEVLDATLIHQSITGLYETRIDLSQLGGDGGPAPAPAPAPAPAPGGSCQTKNTLNIDEYLLQFPDQLWASLPTDIGRMLVPPITIKIKDNASLPSIRQYPLPKDKTEGLRPLISSLENQGILIKCHSPCNTPIFPIKKAGRDEYRMIHDLRAINNIVAPLTAVVASPTTVLSNLAPSLHWFTVIDLSNAFFSVPIHKDSQYLFAFTFEGHQYTWTVLPQGFIHSPTLFSQALYQSLHKIKFKISSEICIYMDDVLIASKDRDTNLKDTAVMLQHLASEGHKVSKKKLQLCQQEVVYLGQLLTPEGRKILPDRKVTVSQFQQPTTIRQIRAFLGLVGYCRHWIPEFSIHSKFLEKQLKKDTAEPFQLDDQQVEAFNKLKHAITTAPVLVVPDPAKPFQLYTSHSEHASIAVLTQKHAGRTRPIAFLSSKFDAIESGLPPCLKACASIHRSLTQADSFILGAPLIIYTTHAICTLLQRDRSQLVTASRFSKWEADLLRPELTFVACSAVSPAHLYMQSCENNIPPHDCVLLTHTISRPRPDLSDLPIPDPDMTLFSDGSYTTGRGGAAVVMHRPVTDDFIIIHQQPGGASAQTAELLALAAACHLATDKTVNIYTDSRYAYGVVHDFGHLWMHRGFVTSAGTPIKNHKEIEYLLKQIMKPKQVSVIKIEAHTKGVSMEVRGNAAADEAAKNAVFLVQRAGKRTADGSEFEKRTADGSEFESPKKKAKVE

SEQ ID NO: 762 - protein, 2079 aa, synthetic construct
MPAAKRVKLDGGDKKYSIGLDIGTNSVGWAVITDEYKVPSKKFKVLGNTDRHSIKKNLIGALLFDSGETAEATRLKRTARRRYTRRKNRICYLQEIFSNEMAKVDDSFFHRLEESFLVEEDKKHERHPIFGNIVDEVAYHEKYPTIYHLRKKLVDSTDKADLRLIYLALAHMIKFRGHFLIEGDLNPDNSDVDKLFIQLVQTYNQLFEENPINASGVDAKAILSARLSKSRRLENLIAQLPGEKKNGLFGNLIALSLGLTPNFKSNFDLAEDAKLQLSKDTYDDDLDNLLAQIGDQYADLFLAAKNLSDAILLSDILRVNTEITKAPLSASMIKRYDEHHQDLTLLKALVRQQLPEKYKEIFFDQSKNGYAGYIDGGASQEEFYKFIKPILEKMDGTEELLVKLNREDLLRKQRTFDNGSIPHQIHLGELHAILRRQEDFYPFLKDNREKIEKILTFRIPYYVGPLARGNSRFAWMTRKSEETITPWNFEEVVDKGASAQSFIERMTNFDKNLPNEKVLPKHSLLYEYFTVYNELTKVKYVTEGMRKPAFLSGEQKKAIVDLLFKTNRKVTVKQLKEDYFKKIECFDSVEISGVEDRFNASLGTYHDLLKIIKDKDFLDNEENEDILEDIVLTLTLFEDREMIEERLKTYAHLFDDKVMKQLKRRRYTGWGRLSRKLINGIRDKQSGKTILDFLKSDGFANRNFMQLIHDDSLTFKEDIQKAQVSGQGDSLHEHIANLAGSPAIKKGILQTVKVVDELVKVMGRHKPENIVIEMARENQTTQKGQKNSRERMKRIEEGIKELGSQILKEHPVENTQLQNEKLYLYYLQNGRDMYVDQELDINRLSDYDVDHIVPQSFLKDDSIDNKVLTRSDKARGKSDNVPSEEVVKKMKNYWRQLLNAKLITQRKFDNLTKAERGGLSELDKAGFIKRQLVETRQITKHVAQILDSRMNTKYDENDKLIREVKVITLKSKLVSDFRKDFQFYKVREINNYHHAHDAYLNAVVGTALIKKYPKLESEFVYGDYKVYDVRKMIAKSEQEIGKATAKYFFYSNIMNFFKTEITLANGEIRKRPLIETNGETGEIVWDKGRDFATVRKVLSMPQVNIVKKTEVQTGGFSKESILPKRNSDKLIARKKDWDPKKYGGFDSPTVAYSVLVVAKVEKGKSKKLKSVKELLGITIMERSSFEKNPIDFLEAKGYKEVKKDLIIKLPKYSLFELENGRKRMLASAGELQKGNELALPSKYVNFLYLASHYEKLKGSPEDNEQKQLFVEQHKHYLDEIIEQISEFSKRVILADANLDKVLSAYNKHRDKPIREQAENIIHLFTLTNLGAPAAFKYFDTTIDRKRYTSTKEVLDATLIHQSITGLYETRIDLSQLGGDGGGGGGSEAAAKGGGGSGGSCQTKNTLNIDEYLLQFPDQLWASLPTDIGRMLVPPITIKIKDNASLPSIRQYPLPKDKTEGLRPLISSLENQGILIKCHSPCNTPIFPIKKAGRDEYRMIHDLRAINNIVAPLTAVVASPTTVLSNLAPSLHWFTVIDLSNAFFSVPIHKDSQYLFAFTFEGHQYTWTVLPQGFIHSPTLFNQALYQSLHKIKFKISSEICIYMDDVLIASKDRDTNLKDTAVMLQHLASEGHKVSKKKLQLCQQEVVYLGQLLTPEGRKILPDRKVTVSQFQQPTTIRQIRAFLGLVGYCRHWIPEFSIHSKFLEKQLKPDTAEPFQLDDQQVEAFNKLKHAITTAPVLVVPDPAKPFQLYTSHSEHASIAVLTQKHAGRTRPIAFLSSKFDAIESGLPPCLKACASIHRSLTQADSFILGAPLIIYTTHAICTLLQRDRSQLVTASRFSKWEADLLRPELTFVACSAVSPAHLYMQSCENNIPPHDCVLLTHTISRPRPDLSDLPIPDPDMTLFSDGSYTTGRGGAAVVMHRPVTDDFIIIHQQPGGASAQTAELLALAAACHLATDKTVNIYTDSRYAYGVVHDFGHLWMHRGFVTSAGTPIKNHKEIEYLLKQIMKPKQVSVIKIEAHTKGVSMEVRGNAAADEAAKNAVFLVQRAGKRTADGSEFEKRTADGSEFESPKKKAKVE

SEQ ID NO: 763 - protein, 2110 aa, synthetic construct
MPAAKRVKLDGGDKKYSIGLDIGTNSVGWAVITDEYKVPSKKFKVLGNTDRHSIKKNLIGALLFDSGETAEATRLKRTARRRYTRRKNRICYLQEIFSNEMAKVDDSFFHRLEESFLVEEDKKHERHPIFGNIVDEVAYHEKYPTIYHLRKKLVDSTDKADLRLIYLALAHMIKFRGHFLIEGDLNPDNSDVDKLFIQLVQTYNQLFEENPINASGVDAKAILSARLSKSRRLENLIAQLPGEKKNGLFGNLIALSLGLTPNFKSNFDLAEDAKLQLSKDTYDDDLDNLLAQIGDQYADLFLAAKNLSDAILLSDILRVNTEITKAPLSASMIKRYDEHHQDLTLLKALVRQQLPEKYKEIFFDQSKNGYAGYIDGGASQEEFYKFIKPILEKMDGTEELLVKLNREDLLRKQRTFDNGSIPHQIHLGELHAILRRQEDFYPFLKDNREKIEKILTFRIPYYVGPLARGNSRFAWMTRKSEETITPWNFEEVVDKGASAQSFIERMTNFDKNLPNEKVLPKHSLLYEYFTVYNELTKVKYVTEGMRKPAFLSGEQKKAIVDLLFKTNRKVTVKQLKEDYFKKIECFDSVEISGVEDRFNASLGTYHDLLKIIKDKDFLDNEENEDILEDIVLTLTLFEDREMIEERLKTYAHLFDDKVMKQLKRRRYTGWGRLSRKLINGIRDKQSGKTILDFLKSDGFANRNFMQLIHDDSLTFKEDIQKAQVSGQGDSLHEHIANLAGSPAIKKGILQTVKVVDELVKVMGRHKPENIVIEMARENQTTQKGQKNSRERMKRIEEGIKELGSQILKEHPVENTQLQNEKLYLYYLQNGRDMYVDQELDINRLSDYDVDHIVPQSFLKDDSIDNKVLTRSDKARGKSDNVPSEEVVKKMKNYWRQLLNAKLITQRKFDNLTKAERGGLSELDKAGFIKRQLVETRQITKHVAQILDSRMNTKYDENDKLIREVKVITLKSKLVSDFRKDFQFYKVREINNYHHAHDAYLNAVVGTALIKKYPKLESEFVYGDYKVYDVRKMIAKSEQEIGKATAKYFFYSNIMNFFKTEITLANGEIRKRPLIETNGETGEIVWDKGRDFATVRKVLSMPQVNIVKKTEVQTGGFSKESILPKRNSDKLIARKKDWDPKKYGGFDSPTVAYSVLVVAKVEKGKSKKLKSVKELLGITIMERSSFEKNPIDFLEAKGYKEVKKDLIIKLPKYSLFELENGRKRMLASAGELQKGNELALPSKYVNFLYLASHYEKLKGSPEDNEQKQLFVEQHKHYLDEIIEQISEFSKRVILADANLDKVLSAYNKHRDKPIREQAENIIHLFTLTNLGAPAAFKYFDTTIDRKRYTSTKEVLDATLIHQSITGLYETRIDLSQLGGDGGAEAAAKEAAAKEAAAKEAAAKALEAEAAAKEAAAKEAAAKEAAAKAGGSCQTKNTLNIDEYLLQFPDQLWASLPTDIGRMLVPPITIKIKDNASLPSIRQYPLPKDKTEGLRPLISSLENQGILIKCHSPCNTPIFPIKKAGRDEYRMIHDLRAINNIVAPLTAVVASPTTVLSNLAPSLHWFTVIDLSNAFFSVPIHKDSQYLFAFTFEGHQYTWTVLPQGFIHSPTLFNQALYQSLHKIKFKISSEICIYMDDVLIASKDRDTNLKDTAVMLQHLASEGHKVSKKKLQLCQQEVVYLGQLLTPEGRKILPDRKVTVSQFQQPTTIRQIRAFLGLVGYCRHWIPEFSIHSKFLEKQLKPDTAEPFQLDDQQVEAFNKLKHAITTAPVLVVPDPAKPFQLYTSHSEHASIAVLTQKHAGRTRPIAFLSSKFDAIESGLPPCLKACASIHRSLTQADSFILGAPLIIYTTHAICTLLQRDRSQLVTASRFSKWEADLLRPELTFVACSAVSPAHLYMQSCENNIPPHDCVLLTHTISRPRPDLSDLPIPDPDMTLFSDGSYTTGRGGAAVVMHRPVTDDFIIIHQQPGGASAQTAELLALAAACHLATDKTVNIYTDSRYAYGVVHDFGHLWMHRGFVTSAGTPIKNHKEIEYLLKQIMKPKQVSVIKIEAHTKGVSMEVRGNAAADEAAKNAVFLVQRAGKRTADGSEFEKRTADGSEFESPKKKAKVE

SEQ ID NO: 764 - protein, 2073 aa, synthetic construct
MPAAKRVKLDGGDKKYSIGLDIGTNSVGWAVITDEYKVPSKKFKVLGNTDRHSIKKNLIGALLFDSGETAEATRLKRTARRRYTRRKNRICYLQEIFSNEMAKVDDSFFHRLEESFLVEEDKKHERHPIFGNIVDEVAYHEKYPTIYHLRKKLVDSTDKADLRLIYLALAHMIKFRGHFLIEGDLNPDNSDVDKLFIQLVQTYNQLFEENPINASGVDAKAILSARLSKSRRLENLIAQLPGEKKNGLFGNLIALSLGLTPNFKSNFDLAEDAKLQLSKDTYDDDLDNLLAQIGDQYADLFLAAKNLSDAILLSDILRVNTEITKAPLSASMIKRYDEHHQDLTLLKALVRQQLPEKYKEIFFDQSKNGYAGYIDGGASQEEFYKFIKPILEKMDGTEELLVKLNREDLLRKQRTFDNGSIPHQIHLGELHAILRRQEDFYPFLKDNREKIEKILTFRIPYYVGPLARGNSRFAWMTRKSEETITPWNFEEVVDKGASAQSFIERMTNFDKNLPNEKVLPKHSLLYEYFTVYNELTKVKYVTEGMRKPAFLSGEQKKAIVDLLFKTNRKVTVKQLKEDYFKKIECFDSVEISGVEDRFNASLGTYHDLLKIIKDKDFLDNEENEDILEDIVLTLTLFEDREMIEERLKTYAHLFDDKVMKQLKRRRYTGWGRLSRKLINGIRDKQSGKTILDFLKSDGFANRNFMQLIHDDSLTFKEDIQKAQVSGQGDSLHEHIANLAGSPAIKKGILQTVKVVDELVKVMGRHKPENIVIEMARENQTTQKGQKNSRERMKRIEEGIKELGSQILKEHPVENTQLQNEKLYLYYLQNGRDMYVDQELDINRLSDYDVDHIVPQSFLKDDSIDNKVLTRSDKARGKSDNVPSEEVVKKMKNYWRQLLNAKLITQRKFDNLTKAERGGLSELDKAGFIKRQLVETRQITKHVAQILDSRMNTKYDENDKLIREVKVITLKSKLVSDFRKDFQFYKVREINNYHHAHDAYLNAVVGTALIKKYPKLESEFVYGDYKVYDVRKMIAKSEQEIGKATAKYFFYSNIMNFFKTEITLANGEIRKRPLIETNGETGEIVWDKGRDFATVRKVLSMPQVNIVKKTEVQTGGFSKESILPKRNSDKLIARKKDWDPKKYGGFDSPTVAYSVLVVAKVEKGKSKKLKSVKELLGITIMERSSFEKNPIDFLEAKGYKEVKKDLIIKLPKYSLFELENGRKRMLASAGELQKGNELALPSKYVNFLYLASHYEKLKGSPEDNEQKQLFVEQHKHYLDEIIEQISEFSKRVILADANLDKVLSAYNKHRDKPIREQAENIIHLFTLTNLGAPAAFKYFDTTIDRKRYTSTKEVLDATLIHQSITGLYETRIDLSQLGGDGGGSSGGSGGGGGSCQTKNTLNIDEYLLQFPDQLWASLPTDIGRMLVPPITIKIKDNASLPSIRQYPLPKDKTEGLRPLISSLENQGILIKCHSPCNTPIFPIKKAGRDEYRMIHDLRAINNIVAPLTAVVASPTTVLSNLAPSLHWFTVIDLSNAFFSVPIHKDSQYLFAFTFEGHQYTWTVLPQGFIHSPTLFNQALYQSLHKIKFKISSEICIYMDDVLIASKDRDTNLKDTAVMLQHLASEGHKVSKKKLQLCQQEVVYLGQLLTPEGRKILPDRKVTVSQFQQPTTIRQIRAFLGLVGYCRHWIPEFSIHSKFLEKQLKPDTAEPFQLDDQQVEAFNKLKHAITTAPVLVVPDPAKPFQLYTSHSEHASIAVLTQKHAGRTRPIAFLSSKFDAIESGLPPCLKACASIHRSLTQADSFILGAPLIIYTTHAICTLLQRDRSQLVTASRFSKWEADLLRPELTFVACSAVSPAHLYMQSCENNIPPHDCVLLTHTISRPRPDLSDLPIPDPDMTLFSDGSYTTGRGGAAVVMHRPVTDDFIIIHQQPGGASAQTAELLALAAACHLATDKTVNIYTDSRYAYGVVHDFGHLWMHRGFVTSAGTPIKNHKEIEYLLKQIMKPKQVSVIKIEAHTKGVSMEVRGNAAADEAAKNAVFLVQRAGKRTADGSEFEKRTADGSEFESPKKKAKVE

SEQ ID NO: 765 - protein, 2087 aa, synthetic construct
MPAAKRVKLDGGDKKYSIGLDIGTNSVGWAVITDEYKVPSKKFKVLGNTDRHSIKKNLIGALLFDSGETAEATRLKRTARRRYTRRKNRICYLQEIFSNEMAKVDDSFFHRLEESFLVEEDKKHERHPIFGNIVDEVAYHEKYPTIYHLRKKLVDSTDKADLRLIYLALAHMIKFRGHFLIEGDLNPDNSDVDKLFIQLVQTYNQLFEENPINASGVDAKAILSARLSKSRRLENLIAQLPGEKKNGLFGNLIALSLGLTPNFKSNFDLAEDAKLQLSKDTYDDDLDNLLAQIGDQYADLFLAAKNLSDAILLSDILRVNTEITKAPLSASMIKRYDEHHQDLTLLKALVRQQLPEKYKEIFFDQSKNGYAGYIDGGASQEEFYKFIKPILEKMDGTEELLVKLNREDLLRKQRTFDNGSIPHQIHLGELHAILRRQEDFYPFLKDNREKIEKILTFRIPYYVGPLARGNSRFAWMTRKSEETITPWNFEEVVDKGASAQSFIERMTNFDKNLPNEKVLPKHSLLYEYFTVYNELTKVKYVTEGMRKPAFLSGEQKKAIVDLLFKTNRKVTVKQLKEDYFKKIECFDSVEISGVEDRFNASLGTYHDLLKIIKDKDFLDNEENEDILEDIVLTLTLFEDREMIEERLKTYAHLFDDKVMKQLKRRRYTGWGRLSRKLINGIRDKQSGKTILDFLKSDGFANRNFMQLIHDDSLTFKEDIQKAQVSGQGDSLHEHIANLAGSPAIKKGILQTVKVVDELVKVMGRHKPENIVIEMARENQTTQKGQKNSRERMKRIEEGIKELGSQILKEHPVENTQLQNEKLYLYYLQNGRDMYVDQELDINRLSDYDVDHIVPQSFLKDDSIDNKVLTRSDKARGKSDNVPSEEVVKKMKNYWRQLLNAKLITQRKFDNLTKAERGGLSELDKAGFIKRQLVETRQITKHVAQILDSRMNTKYDENDKLIREVKVITLKSKLVSDFRKDFQFYKVREINNYHHAHDAYLNAVVGTALIKKYPKLESEFVYGDYKVYDVRKMIAKSEQEIGKATAKYFFYSNIMNFFKTEITLANGEIRKRPLIETNGETGEIVWDKGRDFATVRKVLSMPQVNIVKKTEVQTGGFSKESILPKRNSDKLIARKKDWDPKKYGGFDSPTVAYSVLVVAKVEKGKSKKLKSVKELLGITIMERSSFEKNPIDFLEAKGYKEVKKDLIIKLPKYSLFELENGRKRMLASAGELQKGNELALPSKYVNFLYLASHYEKLKGSPEDNEQKQLFVEQHKHYLDEIIEQISEFSKRVILADANLDKVLSAYNKHRDKPIREQAENIIHLFTLTNLGAPAAFKYFDTTIDRKRYTSTKEVLDATLIHQSITGLYETRIDLSQLGGDGGEAAAKGGSPAPGGVPWILKKPLELTIKLDLEEQQGTLLNNSILSKKGKEELKQLFEKYSALWQSWENQVGHRRIRPHKIATGTVKPTPQKQYHINPKAKPDIQIVINDLLKQGVLIQKESTMNTPVYPVPKPNGRWRMVLDYRAVNKVTPLIAVQNQHSYGILGSLFKGRYKTTIDLSNGFWAHPIVPEDYWITAFTWQGKQYCWTVLPQGFLNSPGLFTGDVVDLLQGIPNVEVYVDDVYISHDSEKEHLEYLDILFNRLKEAGYIISLKKSNIANSIVDFLGFQITNEGRGLTDTFKEKLENITAPTTLKQLQSILGLLNFARNFIPDFTELIAPLYALIPKSTKNYVPWQIEHSTTLETLITKLNGAEYLQGRKGDKTLIMKVNASYTTGYIRYYNEGEKKPISYVSIVFSKTELKFTELEKLLTTVHKGLLKALDLSMGQNIHVYSPIVSMQNIQKTPQTAKKALASRWLSWLSYLEDPRIRFFYDPQMPALKDLPAVDTGKDNKKHPSNFQHIFYTDGSAITSPTKEGHLNAGMGIVYFINKDGNLQKQQEWSISLGNHTAQFAEIAAFEFALKKCLPLGGNILVVTDSNYVAKAYNEELDVWASNGFVNNRKKPLKHISKWKSVADLKRLRPDVVVTHEPGHQKLDSSPHAYGNNLADQLATQASFKVHAGKRTADGSEFEKRTADGSEFESPKKKAKVE

SEQ ID NO: 766 - protein, 2085 aa, synthetic construct
MPAAKRVKLDGGDKKYSIGLDIGTNSVGWAVITDEYKVPSKKFKVLGNTDRHSIKKNLIGALLFDSGETAEATRLKRTARRRYTRRKNRICYLQEIFSNEMAKVDDSFFHRLEESFLVEEDKKHERHPIFGNIVDEVAYHEKYPTIYHLRKKLVDSTDKADLRLIYLALAHMIKFRGHFLIEGDLNPDNSDVDKLFIQLVQTYNQLFEENPINASGVDAKAILSARLSKSRRLENLIAQLPGEKKNGLFGNLIALSLGLTPNFKSNFDLAEDAKLQLSKDTYDDDLDNLLAQIGDQYADLFLAAKNLSDAILLSDILRVNTEITKAPLSASMIKRYDEHHQDLTLLKALVRQQLPEKYKEIFFDQSKNGYAGYIDGGASQEEFYKFIKPILEKMDGTEELLVKLNREDLLRKQRTFDNGSIPHQIHLGELHAILRRQEDFYPFLKDNREKIEKILTFRIPYYVGPLARGNSRFAWMTRKSEETITPWNFEEVVDKGASAQSFIERMTNFDKNLPNEKVLPKHSLLYEYFTVYNELTKVKYVTEGMRKPAFLSGEQKKAIVDLLFKTNRKVTVKQLKEDYFKKIECFDSVEISGVEDRFNASLGTYHDLLKIIKDKDFLDNEENEDILEDIVLTLTLFEDREMIEERLKTYAHLFDDKVMKQLKRRRYTGWGRLSRKLINGIRDKQSGKTILDFLKSDGFANRNFMQLIHDDSLTFKEDIQKAQVSGQGDSLHEHIANLAGSPAIKKGILQTVKVVDELVKVMGRHKPENIVIEMARENQTTQKGQKNSRERMKRIEEGIKELGSQILKEHPVENTQLQNEKLYLYYLQNGRDMYVDQELDINRLSDYDVDHIVPQSFLKDDSIDNKVLTRSDKARGKSDNVPSEEVVKKMKNYWRQLLNAKLITQRKFDNLTKAERGGLSELDKAGFIKRQLVETRQITKHVAQILDSRMNTKYDENDKLIREVKVITLKSKLVSDFRKDFQFYKVREINNYHHAHDAYLNAVVGTALIKKYPKLESEFVYGDYKVYDVRKMIAKSEQEIGKATAKYFFYSNIMNFFKTEITLANGEIRKRPLIETNGETGEIVWDKGRDFATVRKVLSMPQVNIVKKTEVQTGGFSKESILPKRNSDKLIARKKDWDPKKYGGFDSPTVAYSVLVVAKVEKGKSKKLKSVKELLGITIMERSSFEKNPIDFLEAKGYKEVKKDLIIKLPKYSLFELENGRKRMLASAGELQKGNELALPSKYVNFLYLASHYEKLKGSPEDNEQKQLFVEQHKHYLDEIIEQISEFSKRVILADANLDKVLSAYNKHRDKPIREQAENIIHLFTLTNLGAPAAFKYFDTTIDRKRYTSTKEVLDATLIHQSITGLYETRIDLSQLGGDGGGSSGGGGGSGGVPWILKKPLELTIKLDLEEQQGTLLNNSILSKKGKEELKQLFEKYSALWQSWENQVGHRRIRPHKIATGTVKPTPQKQYHINPKAKPDIQIVINDLLKQGVLIQKESTMNTPVYPVPKPNGRWRMVLDYRAVNKVTPLIAVQNQHSYGILGSLFKGRYKTTIDLSNGFWAHPIVPEDYWITAFTWQGKQYCWTVLPQGFLNSPGLFTGDVVDLLQGIPNVEVYVDDVYISHDSEKEHLEYLDILFNRLKEAGYIISLKKSNIANSIVDFLGFQITNEGRGLTDTFKEKLENITAPTTLKQLQSILGLLNFARNFIPDFTELIAPLYALIPKSTKNYVPWQIEHSTTLETLITKLNGAEYLQGRKGDKTLIMKVNASYTTGYIRYYNEGEKKPISYVSIVFSKTELKFTELEKLLTTVHKGLLKALDLSMGQNIHVYSPIVSMQNIQKTPQTAKKALASRWLSWLSYLEDPRIRFFYDPQMPALKDLPAVDTGKDNKKHPSNFQHIFYTDGSAITSPTKEGHLNAGMGIVYFINKDGNLQKQQEWSISLGNHTAQFAEIAAFEFALKKCLPLGGNILVVTDSNYVAKAYNEELDVWASNGFVNNRKKPLKHISKWKSVADLKRLRPDVVVTHEPGHQKLDSSPHAYGNNLADQLATQASFKVHAGKRTADGSEFEKRTADGSEFESPKKKAKVE

SEQ ID NO: 767 - protein, 2087 aa, synthetic construct
MPAAKRVKLDGGDKKYSIGLDIGTNSVGWAVITDEYKVPSKKFKVLGNTDRHSIKKNLIGALLFDSGETAEATRLKRTARRRYTRRKNRICYLQEIFSNEMAKVDDSFFHRLEESFLVEEDKKHERHPIFGNIVDEVAYHEKYPTIYHLRKKLVDSTDKADLRLIYLALAHMIKFRGHFLIEGDLNPDNSDVDKLFIQLVQTYNQLFEENPINASGVDAKAILSARLSKSRRLENLIAQLPGEKKNGLFGNLIALSLGLTPNFKSNFDLAEDAKLQLSKDTYDDDLDNLLAQIGDQYADLFLAAKNLSDAILLSDILRVNTEITKAPLSASMIKRYDEHHQDLTLLKALVRQQLPEKYKEIFFDQSKNGYAGYIDGGASQEEFYKFIKPILEKMDGTEELLVKLNREDLLRKQRTFDNGSIPHQIHLGELHAILRRQEDFYPFLKDNREKIEKILTFRIPYYVGPLARGNSRFAWMTRKSEETITPWNFEEVVDKGASAQSFIERMTNFDKNLPNEKVLPKHSLLYEYFTVYNELTKVKYVTEGMRKPAFLSGEQKKAIVDLLFKTNRKVTVKQLKEDYFKKIECFDSVEISGVEDRFNASLGTYHDLLKIIKDKDFLDNEENEDILEDIVLTLTLFEDREMIEERLKTYAHLFDDKVMKQLKRRRYTGWGRLSRKLINGIRDKQSGKTILDFLKSDGFANRNFMQLIHDDSLTFKEDIQKAQVSGQGDSLHEHIANLAGSPAIKKGILQTVKVVDELVKVMGRHKPENIVIEMARENQTTQKGQKNSRERMKRIEEGIKELGSQILKEHPVENTQLQNEKLYLYYLQNGRDMYVDQELDINRLSDYDVDHIVPQSFLKDDSIDNKVLTRSDKARGKSDNVPSEEVVKKMKNYWRQLLNAKLITQRKFDNLTKAERGGLSELDKAGFIKRQLVETRQITKHVAQILDSRMNTKYDENDKLIREVKVITLKSKLVSDFRKDFQFYKVREINNYHHAHDAYLNAVVGTALIKKYPKLESEFVYGDYKVYDVRKMIAKSEQEIGKATAKYFFYSNIMNFFKTEITLANGEIRKRPLIETNGETGEIVWDKGRDFATVRKVLSMPQVNIVKKTEVQTGGFSKESILPKRNSDKLIARKKDWDPKKYGGFDSPTVAYSVLVVAKVEKGKSKKLKSVKELLGITIMERSSFEKNPIDFLEAKGYKEVKKDLIIKLPKYSLFELENGRKRMLASAGELQKGNELALPSKYVNFLYLASHYEKLKGSPEDNEQKQLFVEQHKHYLDEIIEQISEFSKRVILADANLDKVLSAYNKHRDKPIREQAENIIHLFTLTNLGAPAAFKYFDTTIDRKRYTSTKEVLDATLIHQSITGLYETRIDLSQLGGDGGPAPEAAAKGSSGGVPWILKKPLELTIKLDLEEQQGTLLNNSILSKKGKEELKQLFEKYSALWQSWENQVGHRRIRPHKIATGTVKPTPQKQYHINPKAKPDIQIVINDLLKQGVLIQKESTMNTPVYPVPKPNGRWRMVLDYRAVNKVTPLIAVQNQHSYGILGSLFKGRYKTTIDLSNGFWAHPIVPEDYWITAFTWQGKQYCWTVLPQGFLNSPGLFTGDVVDLLQGIPNVEVYVDDVYISHDSEKEHLEYLDILFNRLKEAGYIISLKKSNIANSIVDFLGFQITNEGRGLTDTFKEKLENITAPTTLKQLQSILGLLNFARNFIPDFTELIAPLYALIPKSTKNYVPWQIEHSTTLETLITKLNGAEYLQGRKGDKTLIMKVNASYTTGYIRYYNEGEKKPISYVSIVFSKTELKFTELEKLLTTVHKGLLKALDLSMGQNIHVYSPIVSMQNIQKTPQTAKKALASRWLSWLSYLEDPRIRFFYDPQMPALKDLPAVDTGKDNKKHPSNFQHIFYTDGSAITSPTKEGHLNAGMGIVYFINKDGNLQKQQEWSISLGNHTAQFAEIAAFEFALKKCLPLGGNILVVTDSNYVAKAYNEELDVWASNGFVNNRKKPLKHISKWKSVADLKRLRPDVVVTHEPGHQKLDSSPHAYGNNLADQLATQASFKVHAGKRTADGSEFEKRTADGSEFESPKKKAKVE

SEQ ID NO: 768 - protein, 2091 aa, synthetic construct
MPAAKRVKLDGGDKKYSIGLDIGTNSVGWAVITDEYKVPSKKFKVLGNTDRHSIKKNLIGALLFDSGETAEATRLKRTARRRYTRRKNRICYLQEIFSNEMAKVDDSFFHRLEESFLVEEDKKHERHPIFGNIVDEVAYHEKYPTIYHLRKKLVDSTDKADLRLIYLALAHMIKFRGHFLIEGDLNPDNSDVDKLFIQLVQTYNQLFEENPINASGVDAKAILSARLSKSRRLENLIAQLPGEKKNGLFGNLIALSLGLTPNFKSNFDLAEDAKLQLSKDTYDDDLDNLLAQIGDQYADLFLAAKNLSDAILLSDILRVNTEITKAPLSASMIKRYDEHHQDLTLLKALVRQQLPEKYKEIFFDQSKNGYAGYIDGGASQEEFYKFIKPILEKMDGTEELLVKLNREDLLRKQRTFDNGSIPHQIHLGELHAILRRQEDFYPFLKDNREKIEKILTFRIPYYVGPLARGNSRFAWMTRKSEETITPWNFEEVVDKGASAQSFIERMTNFDKNLPNEKVLPKHSLLYEYFTVYNELTKVKYVTEGMRKPAFLSGEQKKAIVDLLFKTNRKVTVKQLKEDYFKKIECFDSVEISGVEDRFNASLGTYHDLLKIIKDKDFLDNEENEDILEDIVLTLTLFEDREMIEERLKTYAHLFDDKVMKQLKRRRYTGWGRLSRKLINGIRDKQSGKTILDFLKSDGFANRNFMQLIHDDSLTFKEDIQKAQVSGQGDSLHEHIANLAGSPAIKKGILQTVKVVDELVKVMGRHKPENIVIEMARENQTTQKGQKNSRERMKRIEEGIKELGSQILKEHPVENTQLQNEKLYLYYLQNGRDMYVDQELDINRLSDYDVDHIVPQSFLKDDSIDNKVLTRSDKARGKSDNVPSEEVVKKMKNYWRQLLNAKLITQRKFDNLTKAERGGLSELDKAGFIKRQLVETRQITKHVAQILDSRMNTKYDENDKLIREVKVITLKSKLVSDFRKDFQFYKVREINNYHHAHDAYLNAVVGTALIKKYPKLESEFVYGDYKVYDVRKMIAKSEQEIGKATAKYFFYSNIMNFFKTEITLANGEIRKRPLIETNGETGEIVWDKGRDFATVRKVLSMPQVNIVKKTEVQTGGFSKESILPKRNSDKLIARKKDWDPKKYGGFDSPTVAYSVLVVAKVEKGKSKKLKSVKELLGITIMERSSFEKNPIDFLEAKGYKEVKKDLIIKLPKYSLFELENGRKRMLASAGELQKGNELALPSKYVNFLYLASHYEKLKGSPEDNEQKQLFVEQHKHYLDEIIEQISEFSKRVILADANLDKVLSAYNKHRDKPIREQAENIIHLFTLTNLGAPAAFKYFDTTIDRKRYTSTKEVLDATLIHQSITGLYETRIDLSQLGGDGGGGGGSEAAAKGGGGSGGVPWILKKPLELTIKLDLEEQQGTLLNNSILSKKGKEELKQLFEKYSALWQSWENQVGHRRIRPHKIATGTVKPTPQKQYHINPKAKPDIQIVINDLLKQGVLIQKESTMNTPVYPVPKPNGRWRMVLDYRAVNKVTPLIAVQNQHSYGILGSLFKGRYKTTIDLSNGFWAHPIVPEDYWITAFTWQGKQYCWTVLPQGFLNSPGLFTGDVVDLLQGIPNVEVYVDDVYISHDSEKEHLEYLDILFNRLKEAGYIISLKKSNIANSIVDFLGFQITNEGRGLTDTFKEKLENITAPTTLKQLQSILGLLNFARNFIPDFTELIAPLYALIPKSTKNYVPWQIEHSTTLETLITKLNGAEYLQGRKGDKTLIMKVNASYTTGYIRYYNEGEKKPISYVSIVFSKTELKFTELEKLLTTVHKGLLKALDLSMGQNIHVYSPIVSMQNIQKTPQTAKKALASRWLSWLSYLEDPRIRFFYDPQMPALKDLPAVDTGKDNKKHPSNFQHIFYTDGSAITSPTKEGHLNAGMGIVYFINKDGNLQKQQEWSISLGNHTAQFAEIAAFEFALKKCLPLGGNILVVTDSNYVAKAYNEELDVWASNGFVNNRKKPLKHISKWKSVADLKRLRPDVVVTHEPGHQKLDSSPHAYGNNLADQLATQASFKVHAGKRTADGSEFEKRTADGSEFESPKKKAKVE

SEQ ID NO: 769 - protein, 2087 aa, synthetic construct
MPAAKRVKLDGGDKKYSIGLDIGTNSVGWAVITDEYKVPSKKFKVLGNTDRHSIKKNLIGALLFDSGETAEATRLKRTARRRYTRRKNRICYLQEIFSNEMAKVDDSFFHRLEESFLVEEDKKHERHPIFGNIVDEVAYHEKYPTIYHLRKKLVDSTDKADLRLIYLALAHMIKFRGHFLIEGDLNPDNSDVDKLFIQLVQTYNQLFEENPINASGVDAKAILSARLSKSRRLENLIAQLPGEKKNGLFGNLIALSLGLTPNFKSNFDLAEDAKLQLSKDTYDDDLDNLLAQIGDQYADLFLAAKNLSDAILLSDILRVNTEITKAPLSASMIKRYDEHHQDLTLLKALVRQQLPEKYKEIFFDQSKNGYAGYIDGGASQEEFYKFIKPILEKMDGTEELLVKLNREDLLRKQRTFDNGSIPHQIHLGELHAILRRQEDFYPFLKDNREKIEKILTFRIPYYVGPLARGNSRFAWMTRKSEETITPWNFEEVVDKGASAQSFIERMTNFDKNLPNEKVLPKHSLLYEYFTVYNELTKVKYVTEGMRKPAFLSGEQKKAIVDLLFKTNRKVTVKQLKEDYFKKIECFDSVEISGVEDRFNASLGTYHDLLKIIKDKDFLDNEENEDILEDIVLTLTLFEDREMIEERLKTYAHLFDDKVMKQLKRRRYTGWGRLSRKLINGIRDKQSGKTILDFLKSDGFANRNFMQLIHDDSLTFKEDIQKAQVSGQGDSLHEHIANLAGSPAIKKGILQTVKVVDELVKVMGRHKPENIVIEMARENQTTQKGQKNSRERMKRIEEGIKELGSQILKEHPVENTQLQNEKLYLYYLQNGRDMYVDQELDINRLSDYDVDHIVPQSFLKDDSIDNKVLTRSDKARGKSDNVPSEEVVKKMKNYWRQLLNAKLITQRKFDNLTKAERGGLSELDKAGFIKRQLVETRQITKHVAQILDSRMNTKYDENDKLIREVKVITLKSKLVSDFRKDFQFYKVREINNYHHAHDAYLNAVVGTALIKKYPKLESEFVYGDYKVYDVRKMIAKSEQEIGKATAKYFFYSNIMNFFKTEITLANGEIRKRPLIETNGETGEIVWDKGRDFATVRKVLSMPQVNIVKKTEVQTGGFSKESILPKRNSDKLIARKKDWDPKKYGGFDSPTVAYSVLVVAKVEKGKSKKLKSVKELLGITIMERSSFEKNPIDFLEAKGYKEVKKDLIIKLPKYSLFELENGRKRMLASAGELQKGNELALPSKYVNFLYLASHYEKLKGSPEDNEQKQLFVEQHKHYLDEIIEQISEFSKRVILADANLDKVLSAYNKHRDKPIREQAENIIHLFTLTNLGAPAAFKYFDTTIDRKRYTSTKEVLDATLIHQSITGLYETRIDLSQLGGDGGGGGGSSEAAAKGGVPWILKKPLELTIKLDLEEQQGTLLNNSILSKKGKEELKQLFEKYSALWQSWENQVGHRRIRPHKIATGTVKPTPQKQYHINPKAKPDIQIVINDLLKQGVLIQKESTMNTPVYPVPKPNGRWRMVLDYRAVNKVTPLIAVQNQHSYGILGSLFKGRYKTTIDLSNGFWAHPIVPEDYWITAFTWQGKQYCWTVLPQGFLNSPGLFTGDVVDLLQGIPNVEVYVDDVYISHDSEKEHLEYLDILFNRLKEAGYIISLKKSNIANSIVDFLGFQITNEGRGLTDTFKEKLENITAPTTLKQLQSILGLLNFARNFIPDFTELIAPLYALIPKSTKNYVPWQIEHSTTLETLITKLNGAEYLQGRKGDKTLIMKVNASYTTGYIRYYNEGEKKPISYVSIVFSKTELKFTELEKLLTTVHKGLLKALDLSMGQNIHVYSPIVSMQNIQKTPQTAKKALASRWLSWLSYLEDPRIRFFYDPQMPALKDLPAVDTGKDNKKHPSNFQHIFYTDGSAITSPTKEGHLNAGMGIVYFINKDGNLQKQQEWSISLGNHTAQFAEIAAFEFALKKCLPLGGNILVVTDSNYVAKAYNEELDVWASNGFVNNRKKPLKHISKWKSVADLKRLRPDVVVTHEPGHQKLDSSPHAYGNNLADQLATQASFKVHAGKRTADGSEFEKRTADGSEFESPKKKAKVE

SEQ ID NO: 770 - protein, 2087 aa, synthetic construct
MPAAKRVKLDGGDKKYSIGLDIGTNSVGWAVITDEYKVPSKKFKVLGNTDRHSIKKNLIGALLFDSGETAEATRLKRTARRRYTRRKNRICYLQEIFSNEMAKVDDSFFHRLEESFLVEEDKKHERHPIFGNIVDEVAYHEKYPTIYHLRKKLVDSTDKADLRLIYLALAHMIKFRGHFLIEGDLNPDNSDVDKLFIQLVQTYNQLFEENPINASGVDAKAILSARLSKSRRLENLIAQLPGEKKNGLFGNLIALSLGLTPNFKSNFDLAEDAKLQLSKDTYDDDLDNLLAQIGDQYADLFLAAKNLSDAILLSDILRVNTEITKAPLSASMIKRYDEHHQDLTLLKALVRQQLPEKYKEIFFDQSKNGYAGYIDGGASQEEFYKFIKPILEKMDGTEELLVKLNREDLLRKQRTFDNGSIPHQIHLGELHAILRRQEDFYPFLKDNREKIEKILTFRIPYYVGPLARGNSRFAWMTRKSEETITPWNFEEVVDKGASAQSFIERMTNFDKNLPNEKVLPKHSLLYEYFTVYNELTKVKYVTEGMRKPAFLSGEQKKAIVDLLFKTNRKVTVKQLKEDYFKKIECFDSVEISGVEDRFNASLGTYHDLLKIIKDKDFLDNEENEDILEDIVLTLTLFEDREMIEERLKTYAHLFDDKVMKQLKRRRYTGWGRLSRKLINGIRDKQSGKTILDFLKSDGFANRNFMQLIHDDSLTFKEDIQKAQVSGQGDSLHEHIANLAGSPAIKKGILQTVKVVDELVKVMGRHKPENIVIEMARENQTTQKGQKNSRERMKRIEEGIKELGSQILKEHPVENTQLQNEKLYLYYLQNGRDMYVDQELDINRLSDYDVDHIVPQSFLKDDSIDNKVLTRSDKARGKSDNVPSEEVVKKMKNYWRQLLNAKLITQRKFDNLTKAERGGLSELDKAGFIKRQLVETRQITKHVAQILDSRMNTKYDENDKLIREVKVITLKSKLVSDFRKDFQFYKVREINNYHHAHDAYLNAVVGTALIKKYPKLESEFVYGDYKVYDVRKMIAKSEQEIGKATAKYFFYSNIMNFFKTEITLANGEIRKRPLIETNGETGEIVWDKGRDFATVRKVLSMPQVNIVKKTEVQTGGFSKESILPKRNSDKLIARKKDWDPKKYGGFDSPTVAYSVLVVAKVEKGKSKKLKSVKELLGITIMERSSFEKNPIDFLEAKGYKEVKKDLIIKLPKYSLFELENGRKRMLASAGELQKGNELALPSKYVNFLYLASHYEKLKGSPEDNEQKQLFVEQHKHYLDEIIEQISEFSKRVILADANLDKVLSAYNKHRDKPIREQAENIIHLFTLTNLGAPAAFKYFDTTIDRKRYTSTKEVLDATLIHQSITGLYETRIDLSQLGGDGGGGGEAAAKGSSGGVPWILKKPLELTIKLDLEEQQGTLLNNSILSKKGKEELKQLFEKYSALWQSWENQVGHRRIRPHKIATGTVKPTPQKQYHINPKAKPDIQIVINDLLKQGVLIQKESTMNTPVYPVPKPNGRWRMVLDYRAVNKVTPLIAVQNQHSYGILGSLFKGRYKTTIDLSNGFWAHPIVPEDYWITAFTWQGKQYCWTVLPQGFLNSPGLFTGDVVDLLQGIPNVEVYVDDVYISHDSEKEHLEYLDILFNRLKEAGYIISLKKSNIANSIVDFLGFQITNEGRGLTDTFKEKLENITAPTTLKQLQSILGLLNFARNFIPDFTELIAPLYALIPKSTKNYVPWQIEHSTTLETLITKLNGAEYLQGRKGDKTLIMKVNASYTTGYIRYYNEGEKKPISYVSIVFSKTELKFTELEKLLTTVHKGLLKALDLSMGQNIHVYSPIVSMQNIQKTPQTAKKALASRWLSWLSYLEDPRIRFFYDPQMPALKDLPAVDTGKDNKKHPSNFQHIFYTDGSAITSPTKEGHLNAGMGIVYFINKDGNLQKQQEWSISLGNHTAQFAEIAAFEFALKKCLPLGGNILVVTDSNYVAKAYNEELDVWASNGFVNNRKKPLKHISKWKSVADLKRLRPDVVVTHEPGHQKLDSSPHAYGNNLADQLATQASFKVHAGKRTADGSEFEKRTADGSEFESPKKKAKVE

SEQ ID NO: 771 - protein, 2082 aa, synthetic construct
MPAAKRVKLDGGDKKYSIGLDIGTNSVGWAVITDEYKVPSKKFKVLGNTDRHSIKKNLIGALLFDSGETAEATRLKRTARRRYTRRKNRICYLQEIFSNEMAKVDDSFFHRLEESFLVEEDKKHERHPIFGNIVDEVAYHEKYPTIYHLRKKLVDSTDKADLRLIYLALAHMIKFRGHFLIEGDLNPDNSDVDKLFIQLVQTYNQLFEENPINASGVDAKAILSARLSKSRRLENLIAQLPGEKKNGLFGNLIALSLGLTPNFKSNFDLAEDAKLQLSKDTYDDDLDNLLAQIGDQYADLFLAAKNLSDAILLSDILRVNTEITKAPLSASMIKRYDEHHQDLTLLKALVRQQLPEKYKEIFFDQSKNGYAGYIDGGASQEEFYKFIKPILEKMDGTEELLVKLNREDLLRKQRTFDNGSIPHQIHLGELHAILRRQEDFYPFLKDNREKIEKILTFRIPYYVGPLARGNSRFAWMTRKSEETITPWNFEEVVDKGASAQSFIERMTNFDKNLPNEKVLPKHSLLYEYFTVYNELTKVKYVTEGMRKPAFLSGEQKKAIVDLLFKTNRKVTVKQLKEDYFKKIECFDSVEISGVEDRFNASLGTYHDLLKIIKDKDFLDNEENEDILEDIVLTLTLFEDREMIEERLKTYAHLFDDKVMKQLKRRRYTGWGRLSRKLINGIRDKQSGKTILDFLKSDGFANRNFMQLIHDDSLTFKEDIQKAQVSGQGDSLHEHIANLAGSPAIKKGILQTVKVVDELVKVMGRHKPENIVIEMARENQTTQKGQKNSRERMKRIEEGIKELGSQILKEHPVENTQLQNEKLYLYYLQNGRDMYVDQELDINRLSDYDVDHIVPQSFLKDDSIDNKVLTRSDKARGKSDNVPSEEVVKKMKNYWRQLLNAKLITQRKFDNLTKAERGGLSELDKAGFIKRQLVETRQITKHVAQILDSRMNTKYDENDKLIREVKVITLKSKLVSDFRKDFQFYKVREINNYHHAHDAYLNAVVGTALIKKYPKLESEFVYGDYKVYDVRKMIAKSEQEIGKATAKYFFYSNIMNFFKTEITLANGEIRKRPLIETNGETGEIVWDKGRDFATVRKVLSMPQVNIVKKTEVQTGGFSKESILPKRNSDKLIARKKDWDPKKYGGFDSPTVAYSVLVVAKVEKGKSKKLKSVKELLGITIMERSSFEKNPIDFLEAKGYKEVKKDLIIKLPKYSLFELENGRKRMLASAGELQKGNELALPSKYVNFLYLASHYEKLKGSPEDNEQKQLFVEQHKHYLDEIIEQISEFSKRVILADANLDKVLSAYNKHRDKPIREQAENIIHLFTLTNLGAPAAFKYFDTTIDRKRYTSTKEVLDATLIHQSITGLYETRIDLSQLGGDGGGSSGGGGGVPWILKKPLELTIKLDLEEQQGTLLNNSILSKKGKEELKQLFEKYSALWQSWENQVGHRRIRPHKIATGTVKPTPQKQYHINPKAKPDIQIVINDLLKQGVLIQKESTMNTPVYPVPKPNGRWRMVLDYRAVNKVTPLIAVQNQHSYGILGSLFKGRYKTTIDLSNGFWAHPIVPEDYWITAFTWQGKQYCWTVLPQGFLNSPGLFTGDVVDLLQGIPNVEVYVDDVYISHDSEKEHLEYLDILFNRLKEAGYIISLKKSNIANSIVDFLGFQITNEGRGLTDTFKEKLENITAPTTLKQLQSILGLLNFARNFIPDFTELIAPLYALIPKSTKNYVPWQIEHSTTLETLITKLNGAEYLQGRKGDKTLIMKVNASYTTGYIRYYNEGEKKPISYVSIVFSKTELKFTELEKLLTTVHKGLLKALDLSMGQNIHVYSPIVSMQNIQKTPQTAKKALASRWLSWLSYLEDPRIRFFYDPQMPALKDLPAVDTGKDNKKHPSNFQHIFYTDGSAITSPTKEGHLNAGMGIVYFINKDGNLQKQQEWSISLGNHTAQFAEIAAFEFALKKCLPLGGNILVVTDSNYVAKAYNEELDVWASNGFVNNRKKPLKHISKWKSVADLKRLRPDVVVTHEPGHQKLDSSPHAYGNNLADQLATQASFKVHAGKRTADGSEFEKRTADGSEFESPKKKAKVE

SEQ ID NO: 772 - protein, 2087 aa, synthetic construct
MPAAKRVKLDGGDKKYSIGLDIGTNSVGWAVITDEYKVPSKKFKVLGNTDRHSIKKNLIGALLFDSGETAEATRLKRTARRRYTRRKNRICYLQEIFSNEMAKVDDSFFHRLEESFLVEEDKKHERHPIFGNIVDEVAYHEKYPTIYHLRKKLVDSTDKADLRLIYLALAHMIKFRGHFLIEGDLNPDNSDVDKLFIQLVQTYNQLFEENPINASGVDAKAILSARLSKSRRLENLIAQLPGEKKNGLFGNLIALSLGLTPNFKSNFDLAEDAKLQLSKDTYDDDLDNLLAQIGDQYADLFLAAKNLSDAILLSDILRVNTEITKAPLSASMIKRYDEHHQDLTLLKALVRQQLPEKYKEIFFDQSKNGYAGYIDGGASQEEFYKFIKPILEKMDGTEELLVKLNREDLLRKQRTFDNGSIPHQIHLGELHAILRRQEDFYPFLKDNREKIEKILTFRIPYYVGPLARGNSRFAWMTRKSEETITPWNFEEVVDKGASAQSFIERMTNFDKNLPNEKVLPKHSLLYEYFTVYNELTKVKYVTEGMRKPAFLSGEQKKAIVDLLFKTNRKVTVKQLKEDYFKKIECFDSVEISGVEDRFNASLGTYHDLLKIIKDKDFLDNEENEDILEDIVLTLTLFEDREMIEERLKTYAHLFDDKVMKQLKRRRYTGWGRLSRKLINGIRDKQSGKTILDFLKSDGFANRNFMQLIHDDSLTFKEDIQKAQVSGQGDSLHEHIANLAGSPAIKKGILQTVKVVDELVKVMGRHKPENIVIEMARENQTTQKGQKNSRERMKRIEEGIKELGSQILKEHPVENTQLQNEKLYLYYLQNGRDMYVDQELDINRLSDYDVDHIVPQSFLKDDSIDNKVLTRSDKARGKSDNVPSEEVVKKMKNYWRQLLNAKLITQRKFDNLTKAERGGLSELDKAGFIKRQLVETRQITKHVAQILDSRMNTKYDENDKLIREVKVITLKSKLVSDFRKDFQFYKVREINNYHHAHDAYLNAVVGTALIKKYPKLESEFVYGDYKVYDVRKMIAKSEQEIGKATAKYFFYSNIMNFFKTEITLANGEIRKRPLIETNGETGEIVWDKGRDFATVRKVLSMPQVNIVKKTEVQTGGFSKESILPKRNSDKLIARKKDWDPKKYGGFDSPTVAYSVLVVAKVEKGKSKKLKSVKELLGITIMERSSFEKNPIDFLEAKGYKEVKKDLIIKLPKYSLFELENGRKRMLASAGELQKGNELALPSKYVNFLYLASHYEKLKGSPEDNEQKQLFVEQHKHYLDEIIEQISEFSKRVILADANLDKVLSAYNKHRDKPIREQAENIIHLFTLTNLGAPAAFKYFDTTIDRKRYTSTKEVLDATLIHQSITGLYETRIDLSQLGGDGGEAAAKPAPGGSGGVPWILKKPLELTIKLDLEEQQGTLLNNSILSKKGKEELKQLFEKYSALWQSWENQVGHRRIRPHKIATGTVKPTPQKQYHINPKAKPDIQIVINDLLKQGVLIQKESTMNTPVYPVPKPNGRWRMVLDYRAVNKVTPLIAVQNQHSYGILGSLFKGRYKTTIDLSNGFWAHPIVPEDYWITAFTWQGKQYCWTVLPQGFLNSPGLFTGDVVDLLQGIPNVEVYVDDVYISHDSEKEHLEYLDILFNRLKEAGYIISLKKSNIANSIVDFLGFQITNEGRGLTDTFKEKLENITAPTTLKQLQSILGLLNFARNFIPDFTELIAPLYALIPKSTKNYVPWQIEHSTTLETLITKLNGAEYLQGRKGDKTLIMKVNASYTTGYIRYYNEGEKKPISYVSIVFSKTELKFTELEKLLTTVHKGLLKALDLSMGQNIHVYSPIVSMQNIQKTPQTAKKALASRWLSWLSYLEDPRIRFFYDPQMPALKDLPAVDTGKDNKKHPSNFQHIFYTDGSAITSPTKEGHLNAGMGIVYFINKDGNLQKQQEWSISLGNHTAQFAEIAAFEFALKKCLPLGGNILVVTDSNYVAKAYNEELDVWASNGFVNNRKKPLKHISKWKSVADLKRLRPDVVVTHEPGHQKLDSSPHAYGNNLADQLATQASFKVHAGKRTADGSEFEKRTADGSEFESPKKKAKVE

SEQ ID NO: 773 - protein, 2088 aa, synthetic construct
MPAAKRVKLDGGDKKYSIGLDIGTNSVGWAVITDEYKVPSKKFKVLGNTDRHSIKKNLIGALLFDSGETAEATRLKRTARRRYTRRKNRICYLQEIFSNEMAKVDDSFFHRLEESFLVEEDKKHERHPIFGNIVDEVAYHEKYPTIYHLRKKLVDSTDKADLRLIYLALAHMIKFRGHFLIEGDLNPDNSDVDKLFIQLVQTYNQLFEENPINASGVDAKAILSARLSKSRRLENLIAQLPGEKKNGLFGNLIALSLGLTPNFKSNFDLAEDAKLQLSKDTYDDDLDNLLAQIGDQYADLFLAAKNLSDAILLSDILRVNTEITKAPLSASMIKRYDEHHQDLTLLKALVRQQLPEKYKEIFFDQSKNGYAGYIDGGASQEEFYKFIKPILEKMDGTEELLVKLNREDLLRKQRTFDNGSIPHQIHLGELHAILRRQEDFYPFLKDNREKIEKILTFRIPYYVGPLARGNSRFAWMTRKSEETITPWNFEEVVDKGASAQSFIERMTNFDKNLPNEKVLPKHSLLYEYFTVYNELTKVKYVTEGMRKPAFLSGEQKKAIVDLLFKTNRKVTVKQLKEDYFKKIECFDSVEISGVEDRFNASLGTYHDLLKIIKDKDFLDNEENEDILEDIVLTLTLFEDREMIEERLKTYAHLFDDKVMKQLKRRRYTGWGRLSRKLINGIRDKQSGKTILDFLKSDGFANRNFMQLIHDDSLTFKEDIQKAQVSGQGDSLHEHIANLAGSPAIKKGILQTVKVVDELVKVMGRHKPENIVIEMARENQTTQKGQKNSRERMKRIEEGIKELGSQILKEHPVENTQLQNEKLYLYYLQNGRDMYVDQELDINRLSDYDVDHIVPQSFLKDDSIDNKVLTRSDKARGKSDNVPSEEVVKKMKNYWRQLLNAKLITQRKFDNLTKAERGGLSELDKAGFIKRQLVETRQITKHVAQILDSRMNTKYDENDKLIREVKVITLKSKLVSDFRKDFQFYKVREINNYHHAHDAYLNAVVGTALIKKYPKLESEFVYGDYKVYDVRKMIAKSEQEIGKATAKYFFYSNIMNFFKTEITLANGEIRKRPLIETNGETGEIVWDKGRDFATVRKVLSMPQVNIVKKTEVQTGGFSKESILPKRNSDKLIARKKDWDPKKYGGFDSPTVAYSVLVVAKVEKGKSKKLKSVKELLGITIMERSSFEKNPIDFLEAKGYKEVKKDLIIKLPKYSLFELENGRKRMLASAGELQKGNELALPSKYVNFLYLASHYEKLKGSPEDNEQKQLFVEQHKHYLDEIIEQISEFSKRVILADANLDKVLSAYNKHRDKPIREQAENIIHLFTLTNLGAPAAFKYFDTTIDRKRYTSTKEVLDATLIHQSITGLYETRIDLSQLGGDGGGSSGSSGSSGSSGGVPWILKKPLELTIKLDLEEQQGTLLNNSILSKKGKEELKQLFEKYSALWQSWENQVGHRRIRPHKIATGTVKPTPQKQYHINPKAKPDIQIVINDLLKQGVLIQKESTMNTPVYPVPKPNGRWRMVLDYRAVNKVTPLIAVQNQHSYGILGSLFKGRYKTTIDLSNGFWAHPIVPEDYWITAFTWQGKQYCWTVLPQGFLNSPGLFTGDVVDLLQGIPNVEVYVDDVYISHDSEKEHLEYLDILFNRLKEAGYIISLKKSNIANSIVDFLGFQITNEGRGLTDTFKEKLENITAPTTLKQLQSILGLLNFARNFIPDFTELIAPLYALIPKSTKNYVPWQIEHSTTLETLITKLNGAEYLQGRKGDKTLIMKVNASYTTGYIRYYNEGEKKPISYVSIVFSKTELKFTELEKLLTTVHKGLLKALDLSMGQNIHVYSPIVSMQNIQKTPQTAKKALASRWLSWLSYLEDPRIRFFYDPQMPALKDLPAVDTGKDNKKHPSNFQHIFYTDGSAITSPTKEGHLNAGMGIVYFINKDGNLQKQQEWSISLGNHTAQFAEIAAFEFALKKCLPLGGNILVVTDSNYVAKAYNEELDVWASNGFVNNRKKPLKHISKWKSVADLKRLRPDVVVTHEPGHQKLDSSPHAYGNNLADQLATQASFKVHAGKRTADGSEFEKRTADGSEFESPKKKAKVE

SEQ ID NO: 774 - protein, 2085 aa, synthetic construct
MPAAKRVKLDGGDKKYSIGLDIGTNSVGWAVITDEYKVPSKKFKVLGNTDRHSIKKNLIGALLFDSGETAEATRLKRTARRRYTRRKNRICYLQEIFSNEMAKVDDSFFHRLEESFLVEEDKKHERHPIFGNIVDEVAYHEKYPTIYHLRKKLVDSTDKADLRLIYLALAHMIKFRGHFLIEGDLNPDNSDVDKLFIQLVQTYNQLFEENPINASGVDAKAILSARLSKSRRLENLIAQLPGEKKNGLFGNLIALSLGLTPNFKSNFDLAEDAKLQLSKDTYDDDLDNLLAQIGDQYADLFLAAKNLSDAILLSDILRVNTEITKAPLSASMIKRYDEHHQDLTLLKALVRQQLPEKYKEIFFDQSKNGYAGYIDGGASQEEFYKFIKPILEKMDGTEELLVKLNREDLLRKQRTFDNGSIPHQIHLGELHAILRRQEDFYPFLKDNREKIEKILTFRIPYYVGPLARGNSRFAWMTRKSEETITPWNFEEVVDKGASAQSFIERMTNFDKNLPNEKVLPKHSLLYEYFTVYNELTKVKYVTEGMRKPAFLSGEQKKAIVDLLFKTNRKVTVKQLKEDYFKKIECFDSVEISGVEDRFNASLGTYHDLLKIIKDKDFLDNEENEDILEDIVLTLTLFEDREMIEERLKTYAHLFDDKVMKQLKRRRYTGWGRLSRKLINGIRDKQSGKTILDFLKSDGFANRNFMQLIHDDSLTFKEDIQKAQVSGQGDSLHEHIANLAGSPAIKKGILQTVKVVDELVKVMGRHKPENIVIEMARENQTTQKGQKNSRERMKRIEEGIKELGSQILKEHPVENTQLQNEKLYLYYLQNGRDMYVDQELDINRLSDYDVDHIVPQSFLKDDSIDNKVLTRSDKARGKSDNVPSEEVVKKMKNYWRQLLNAKLITQRKFDNLTKAERGGLSELDKAGFIKRQLVETRQITKHVAQILDSRMNTKYDENDKLIREVKVITLKSKLVSDFRKDFQFYKVREINNYHHAHDAYLNAVVGTALIKKYPKLESEFVYGDYKVYDVRKMIAKSEQEIGKATAKYFFYSNIMNFFKTEITLANGEIRKRPLIETNGETGEIVWDKGRDFATVRKVLSMPQVNIVKKTEVQTGGFSKESILPKRNSDKLIARKKDWDPKKYGGFDSPTVAYSVLVVAKVEKGKSKKLKSVKELLGITIMERSSFEKNPIDFLEAKGYKEVKKDLIIKLPKYSLFELENGRKRMLASAGELQKGNELALPSKYVNFLYLASHYEKLKGSPEDNEQKQLFVEQHKHYLDEIIEQISEFSKRVILADANLDKVLSAYNKHRDKPIREQAENIIHLFTLTNLGAPAAFKYFDTTIDRKRYTSTKEVLDATLIHQSITGLYETRIDLSQLGGDGGGGGGGSGSSGGVPWILKKPLELTIKLDLEEQQGTLLNNSILSKKGKEELKQLFEKYSALWQSWENQVGHRRIRPHKIATGTVKPTPQKQYHINPKAKPDIQIVINDLLKQGVLIQKESTMNTPVYPVPKPNGRWRMVLDYRAVNKVTPLIAVQNQHSYGILGSLFKGRYKTTIDLSNGFWAHPIVPEDYWITAFTWQGKQYCWTVLPQGFLNSPGLFTGDVVDLLQGIPNVEVYVDDVYISHDSEKEHLEYLDILFNRLKEAGYIISLKKSNIANSIVDFLGFQITNEGRGLTDTFKEKLENITAPTTLKQLQSILGLLNFARNFIPDFTELIAPLYALIPKSTKNYVPWQIEHSTTLETLITKLNGAEYLQGRKGDKTLIMKVNASYTTGYIRYYNEGEKKPISYVSIVFSKTELKFTELEKLLTTVHKGLLKALDLSMGQNIHVYSPIVSMQNIQKTPQTAKKALASRWLSWLSYLEDPRIRFFYDPQMPALKDLPAVDTGKDNKKHPSNFQHIFYTDGSAITSPTKEGHLNAGMGIVYFINKDGNLQKQQEWSISLGNHTAQFAEIAAFEFALKKCLPLGGNILVVTDSNYVAKAYNEELDVWASNGFVNNRKKPLKHISKWKSVADLKRLRPDVVVTHEPGHQKLDSSPHAYGNNLADQLATQASFKVHAGKRTADGSEFEKRTADGSEFESPKKKAKVE

SEQ ID NO: 775 - protein, 2085 aa, synthetic construct
MPAAKRVKLDGGDKKYSIGLDIGTNSVGWAVITDEYKVPSKKFKVLGNTDRHSIKKNLIGALLFDSGETAEATRLKRTARRRYTRRKNRICYLQEIFSNEMAKVDDSFFHRLEESFLVEEDKKHERHPIFGNIVDEVAYHEKYPTIYHLRKKLVDSTDKADLRLIYLALAHMIKFRGHFLIEGDLNPDNSDVDKLFIQLVQTYNQLFEENPINASGVDAKAILSARLSKSRRLENLIAQLPGEKKNGLFGNLIALSLGLTPNFKSNFDLAEDAKLQLSKDTYDDDLDNLLAQIGDQYADLFLAAKNLSDAILLSDILRVNTEITKAPLSASMIKRYDEHHQDLTLLKALVRQQLPEKYKEIFFDQSKNGYAGYIDGGASQEEFYKFIKPILEKMDGTEELLVKLNREDLLRKQRTFDNGSIPHQIHLGELHAILRRQEDFYPFLKDNREKIEKILTFRIPYYVGPLARGNSRFAWMTRKSEETITPWNFEEVVDKGASAQSFIERMTNFDKNLPNEKVLPKHSLLYEYFTVYNELTKVKYVTEGMRKPAFLSGEQKKAIVDLLFKTNRKVTVKQLKEDYFKKIECFDSVEISGVEDRFNASLGTYHDLLKIIKDKDFLDNEENEDILEDIVLTLTLFEDREMIEERLKTYAHLFDDKVMKQLKRRRYTGWGRLSRKLINGIRDKQSGKTILDFLKSDGFANRNFMQLIHDDSLTFKEDIQKAQVSGQGDSLHEHIANLAGSPAIKKGILQTVKVVDELVKVMGRHKPENIVIEMARENQTTQKGQKNSRERMKRIEEGIKELGSQILKEHPVENTQLQNEKLYLYYLQNGRDMYVDQELDINRLSDYDVDHIVPQSFLKDDSIDNKVLTRSDKARGKSDNVPSEEVVKKMKNYWRQLLNAKLITQRKFDNLTKAERGGLSELDKAGFIKRQLVETRQITKHVAQILDSRMNTKYDENDKLIREVKVITLKSKLVSDFRKDFQFYKVREINNYHHAHDAYLNAVVGTALIKKYPKLESEFVYGDYKVYDVRKMIAKSEQEIGKATAKYFFYSNIMNFFKTEITLANGEIRKRPLIETNGETGEIVWDKGRDFATVRKVLSMPQVNIVKKTEVQTGGFSKESILPKRNSDKLIARKKDWDPKKYGGFDSPTVAYSVLVVAKVEKGKSKKLKSVKELLGITIMERSSFEKNPIDFLEAKGYKEVKKDLIIKLPKYSLFELENGRKRMLASAGELQKGNELALPSKYVNFLYLASHYEKLKGSPEDNEQKQLFVEQHKHYLDEIIEQISEFSKRVILADANLDKVLSAYNKHRDKPIREQAENIIHLFTLTNLGAPAAFKYFDTTIDRKRYTSTKEVLDATLIHQSITGLYETRIDLSQLGGDGGGSSGGSPAPGGVPWILKKPLELTIKLDLEEQQGTLLNNSILSKKGKEELKQLFEKYSALWQSWENQVGHRRIRPHKIATGTVKPTPQKQYHINPKAKPDIQIVINDLLKQGVLIQKESTMNTPVYPVPKPNGRWRMVLDYRAVNKVTPLIAVQNQHSYGILGSLFKGRYKTTIDLSNGFWAHPIVPEDYWITAFTWQGKQYCWTVLPQGFLNSPGLFTGDVVDLLQGIPNVEVYVDDVYISHDSEKEHLEYLDILFNRLKEAGYIISLKKSNIANSIVDFLGFQITNEGRGLTDTFKEKLENITAPTTLKQLQSILGLLNFARNFIPDFTELIAPLYALIPKSTKNYVPWQIEHSTTLETLITKLNGAEYLQGRKGDKTLIMKVNASYTTGYIRYYNEGEKKPISYVSIVFSKTELKFTELEKLLTTVHKGLLKALDLSMGQNIHVYSPIVSMQNIQKTPQTAKKALASRWLSWLSYLEDPRIRFFYDPQMPALKDLPAVDTGKDNKKHPSNFQHIFYTDGSAITSPTKEGHLNAGMGIVYFINKDGNLQKQQEWSISLGNHTAQFAEIAAFEFALKKCLPLGGNILVVTDSNYVAKAYNEELDVWASNGFVNNRKKPLKHISKWKSVADLKRLRPDVVVTHEPGHQKLDSSPHAYGNNLADQLATQASFKVHAGKRTADGSEFEKRTADGSEFESPKKKAKVE

SEQ ID NO: 776 - protein, 2084 aa, synthetic construct
MPAAKRVKLDGGDKKYSIGLDIGTNSVGWAVITDEYKVPSKKFKVLGNTDRHSIKKNLIGALLFDSGETAEATRLKRTARRRYTRRKNRICYLQEIFSNEMAKVDDSFFHRLEESFLVEEDKKHERHPIFGNIVDEVAYHEKYPTIYHLRKKLVDSTDKADLRLIYLALAHMIKFRGHFLIEGDLNPDNSDVDKLFIQLVQTYNQLFEENPINASGVDAKAILSARLSKSRRLENLIAQLPGEKKNGLFGNLIALSLGLTPNFKSNFDLAEDAKLQLSKDTYDDDLDNLLAQIGDQYADLFLAAKNLSDAILLSDILRVNTEITKAPLSASMIKRYDEHHQDLTLLKALVRQQLPEKYKEIFFDQSKNGYAGYIDGGASQEEFYKFIKPILEKMDGTEELLVKLNREDLLRKQRTFDNGSIPHQIHLGELHAILRRQEDFYPFLKDNREKIEKILTFRIPYYVGPLARGNSRFAWMTRKSEETITPWNFEEVVDKGASAQSFIERMTNFDKNLPNEKVLPKHSLLYEYFTVYNELTKVKYVTEGMRKPAFLSGEQKKAIVDLLFKTNRKVTVKQLKEDYFKKIECFDSVEISGVEDRFNASLGTYHDLLKIIKDKDFLDNEENEDILEDIVLTLTLFEDREMIEERLKTYAHLFDDKVMKQLKRRRYTGWGRLSRKLINGIRDKQSGKTILDFLKSDGFANRNFMQLIHDDSLTFKEDIQKAQVSGQGDSLHEHIANLAGSPAIKKGILQTVKVVDELVKVMGRHKPENIVIEMARENQTTQKGQKNSRERMKRIEEGIKELGSQILKEHPVENTQLQNEKLYLYYLQNGRDMYVDQELDINRLSDYDVDHIVPQSFLKDDSIDNKVLTRSDKARGKSDNVPSEEVVKKMKNYWRQLLNAKLITQRKFDNLTKAERGGLSELDKAGFIKRQLVETRQITKHVAQILDSRMNTKYDENDKLIREVKVITLKSKLVSDFRKDFQFYKVREINNYHHAHDAYLNAVVGTALIKKYPKLESEFVYGDYKVYDVRKMIAKSEQEIGKATAKYFFYSNIMNFFKTEITLANGEIRKRPLIETNGETGEIVWDKGRDFATVRKVLSMPQVNIVKKTEVQTGGFSKESILPKRNSDKLIARKKDWDPKKYGGFDSPTVAYSVLVVAKVEKGKSKKLKSVKELLGITIMERSSFEKNPIDFLEAKGYKEVKKDLIIKLPKYSLFELENGRKRMLASAGELQKGNELALPSKYVNFLYLASHYEKLKGSPEDNEQKQLFVEQHKHYLDEIIEQISEFSKRVILADANLDKVLSAYNKHRDKPIREQAENIIHLFTLTNLGAPAAFKYFDTTIDRKRYTSTKEVLDATLIHQSITGLYETRIDLSQLGGDGGGGSEAAAKGGVPWILKKPLELTIKLDLEEQQGTLLNNSILSKKGKEELKQLFEKYSALWQSWENQVGHRRIRPHKIATGTVKPTPQKQYHINPKAKPDIQIVINDLLKQGVLIQKESTMNTPVYPVPKPNGRWRMVLDYRAVNKVTPLIAVQNQHSYGILGSLFKGRYKTTIDLSNGFWAHPIVPEDYWITAFTWQGKQYCWTVLPQGFLNSPGLFTGDVVDLLQGIPNVEVYVDDVYISHDSEKEHLEYLDILFNRLKEAGYIISLKKSNIANSIVDFLGFQITNEGRGLTDTFKEKLENITAPTTLKQLQSILGLLNFARNFIPDFTELIAPLYALIPKSTKNYVPWQIEHSTTLETLITKLNGAEYLQGRKGDKTLIMKVNASYTTGYIRYYNEGEKKPISYVSIVFSKTELKFTELEKLLTTVHKGLLKALDLSMGQNIHVYSPIVSMQNIQKTPQTAKKALASRWLSWLSYLEDPRIRFFYDPQMPALKDLPAVDTGKDNKKHPSNFQHIFYTDGSAITSPTKEGHLNAGMGIVYFINKDGNLQKQQEWSISLGNHTAQFAEIAAFEFALKKCLPLGGNILVVTDSNYVAKAYNEELDVWASNGFVNNRKKPLKHISKWKSVADLKRLRPDVVVTHEPGHQKLDSSPHAYGNNLADQLATQASFKVHAGKRTADGSEFEKRTADGSEFESPKKKAKVE

SEQ ID NO: 777 - protein, 2085 aa, synthetic construct
MPAAKRVKLDGGDKKYSIGLDIGTNSVGWAVITDEYKVPSKKFKVLGNTDRHSIKKNLIGALLFDSGETAEATRLKRTARRRYTRRKNRICYLQEIFSNEMAKVDDSFFHRLEESFLVEEDKKHERHPIFGNIVDEVAYHEKYPTIYHLRKKLVDSTDKADLRLIYLALAHMIKFRGHFLIEGDLNPDNSDVDKLFIQLVQTYNQLFEENPINASGVDAKAILSARLSKSRRLENLIAQLPGEKKNGLFGNLIALSLGLTPNFKSNFDLAEDAKLQLSKDTYDDDLDNLLAQIGDQYADLFLAAKNLSDAILLSDILRVNTEITKAPLSASMIKRYDEHHQDLTLLKALVRQQLPEKYKEIFFDQSKNGYAGYIDGGASQEEFYKFIKPILEKMDGTEELLVKLNREDLLRKQRTFDNGSIPHQIHLGELHAILRRQEDFYPFLKDNREKIEKILTFRIPYYVGPLARGNSRFAWMTRKSEETITPWNFEEVVDKGASAQSFIERMTNFDKNLPNEKVLPKHSLLYEYFTVYNELTKVKYVTEGMRKPAFLSGEQKKAIVDLLFKTNRKVTVKQLKEDYFKKIECFDSVEISGVEDRFNASLGTYHDLLKIIKDKDFLDNEENEDILEDIVLTLTLFEDREMIEERLKTYAHLFDDKVMKQLKRRRYTGWGRLSRKLINGIRDKQSGKTILDFLKSDGFANRNFMQLIHDDSLTFKEDIQKAQVSGQGDSLHEHIANLAGSPAIKKGILQTVKVVDELVKVMGRHKPENIVIEMARENQTTQKGQKNSRERMKRIEEGIKELGSQILKEHPVENTQLQNEKLYLYYLQNGRDMYVDQELDINRLSDYDVDHIVPQSFLKDDSIDNKVLTRSDKARGKSDNVPSEEVVKKMKNYWRQLLNAKLITQRKFDNLTKAERGGLSELDKAGFIKRQLVETRQITKHVAQILDSRMNTKYDENDKLIREVKVITLKSKLVSDFRKDFQFYKVREINNYHHAHDAYLNAVVGTALIKKYPKLESEFVYGDYKVYDVRKMIAKSEQEIGKATAKYFFYSNIMNFFKTEITLANGEIRKRPLIETNGETGEIVWDKGRDFATVRKVLSMPQVNIVKKTEVQTGGFSKESILPKRNSDKLIARKKDWDPKKYGGFDSPTVAYSVLVVAKVEKGKSKKLKSVKELLGITIMERSSFEKNPIDFLEAKGYKEVKKDLIIKLPKYSLFELENGRKRMLASAGELQKGNELALPSKYVNFLYLASHYEKLKGSPEDNEQKQLFVEQHKHYLDEIIEQISEFSKRVILADANLDKVLSAYNKHRDKPIREQAENIIHLFTLTNLGAPAAFKYFDTTIDRKRYTSTKEVLDATLIHQSITGLYETRIDLSQLGGDGGGGGGSSPAPGGVPWILKKPLELTIKLDLEEQQGTLLNNSILSKKGKEELKQLFEKYSALWQSWENQVGHRRIRPHKIATGTVKPTPQKQYHINPKAKPDIQIVINDLLKQGVLIQKESTMNTPVYPVPKPNGRWRMVLDYRAVNKVTPLIAVQNQHSYGILGSLFKGRYKTTIDLSNGFWAHPIVPEDYWITAFTWQGKQYCWTVLPQGFLNSPGLFTGDVVDLLQGIPNVEVYVDDVYISHDSEKEHLEYLDILFNRLKEAGYIISLKKSNIANSIVDFLGFQITNEGRGLTDTFKEKLENITAPTTLKQLQSILGLLNFARNFIPDFTELIAPLYALIPKSTKNYVPWQIEHSTTLETLITKLNGAEYLQGRKGDKTLIMKVNASYTTGYIRYYNEGEKKPISYVSIVFSKTELKFTELEKLLTTVHKGLLKALDLSMGQNIHVYSPIVSMQNIQKTPQTAKKALASRWLSWLSYLEDPRIRFFYDPQMPALKDLPAVDTGKDNKKHPSNFQHIFYTDGSAITSPTKEGHLNAGMGIVYFINKDGNLQKQQEWSISLGNHTAQFAEIAAFEFALKKCLPLGGNILVVTDSNYVAKAYNEELDVWASNGFVNNRKKPLKHISKWKSVADLKRLRPDVVVTHEPGHQKLDSSPHAYGNNLADQLATQASFKVHAGKRTADGSEFEKRTADGSEFESPKKKAKVE

SEQ ID NO: 778 - protein, 2091 aa, synthetic construct
MPAAKRVKLDGGDKKYSIGLDIGTNSVGWAVITDEYKVPSKKFKVLGNTDRHSIKKNLIGALLFDSGETAEATRLKRTARRRYTRRKNRICYLQEIFSNEMAKVDDSFFHRLEESFLVEEDKKHERHPIFGNIVDEVAYHEKYPTIYHLRKKLVDSTDKADLRLIYLALAHMIKFRGHFLIEGDLNPDNSDVDKLFIQLVQTYNQLFEENPINASGVDAKAILSARLSKSRRLENLIAQLPGEKKNGLFGNLIALSLGLTPNFKSNFDLAEDAKLQLSKDTYDDDLDNLLAQIGDQYADLFLAAKNLSDAILLSDILRVNTEITKAPLSASMIKRYDEHHQDLTLLKALVRQQLPEKYKEIFFDQSKNGYAGYIDGGASQEEFYKFIKPILEKMDGTEELLVKLNREDLLRKQRTFDNGSIPHQIHLGELHAILRRQEDFYPFLKDNREKIEKILTFRIPYYVGPLARGNSRFAWMTRKSEETITPWNFEEVVDKGASAQSFIERMTNFDKNLPNEKVLPKHSLLYEYFTVYNELTKVKYVTEGMRKPAFLSGEQKKAIVDLLFKTNRKVTVKQLKEDYFKKIECFDSVEISGVEDRFNASLGTYHDLLKIIKDKDFLDNEENEDILEDIVLTLTLFEDREMIEERLKTYAHLFDDKVMKQLKRRRYTGWGRLSRKLINGIRDKQSGKTILDFLKSDGFANRNFMQLIHDDSLTFKEDIQKAQVSGQGDSLHEHIANLAGSPAIKKGILQTVKVVDELVKVMGRHKPENIVIEMARENQTTQKGQKNSRERMKRIEEGIKELGSQILKEHPVENTQLQNEKLYLYYLQNGRDMYVDQELDINRLSDYDVDHIVPQSFLKDDSIDNKVLTRSDKARGKSDNVPSEEVVKKMKNYWRQLLNAKLITQRKFDNLTKAERGGLSELDKAGFIKRQLVETRQITKHVAQILDSRMNTKYDENDKLIREVKVITLKSKLVSDFRKDFQFYKVREINNYHHAHDAYLNAVVGTALIKKYPKLESEFVYGDYKVYDVRKMIAKSEQEIGKATAKYFFYSNIMNFFKTEITLANGEIRKRPLIETNGETGEIVWDKGRDFATVRKVLSMPQVNIVKKTEVQTGGFSKESILPKRNSDKLIARKKDWDPKKYGGFDSPTVAYSVLVVAKVEKGKSKKLKSVKELLGITIMERSSFEKNPIDFLEAKGYKEVKKDLIIKLPKYSLFELENGRKRMLASAGELQKGNELALPSKYVNFLYLASHYEKLKGSPEDNEQKQLFVEQHKHYLDEIIEQISEFSKRVILADANLDKVLSAYNKHRDKPIREQAENIIHLFTLTNLGAPAAFKYFDTTIDRKRYTSTKEVLDATLIHQSITGLYETRIDLSQLGGDGGEAAAKGGGGSEAAAKGGVPWILKKPLELTIKLDLEEQQGTLLNNSILSKKGKEELKQLFEKYSALWQSWENQVGHRRIRPHKIATGTVKPTPQKQYHINPKAKPDIQIVINDLLKQGVLIQKESTMNTPVYPVPKPNGRWRMVLDYRAVNKVTPLIAVQNQHSYGILGSLFKGRYKTTIDLSNGFWAHPIVPEDYWITAFTWQGKQYCWTVLPQGFLNSPGLFTGDVVDLLQGIPNVEVYVDDVYISHDSEKEHLEYLDILFNRLKEAGYIISLKKSNIANSIVDFLGFQITNEGRGLTDTFKEKLENITAPTTLKQLQSILGLLNFARNFIPDFTELIAPLYALIPKSTKNYVPWQIEHSTTLETLITKLNGAEYLQGRKGDKTLIMKVNASYTTGYIRYYNEGEKKPISYVSIVFSKTELKFTELEKLLTTVHKGLLKALDLSMGQNIHVYSPIVSMQNIQKTPQTAKKALASRWLSWLSYLEDPRIRFFYDPQMPALKDLPAVDTGKDNKKHPSNFQHIFYTDGSAITSPTKEGHLNAGMGIVYFINKDGNLQKQQEWSISLGNHTAQFAEIAAFEFALKKCLPLGGNILVVTDSNYVAKAYNEELDVWASNGFVNNRKKPLKHISKWKSVADLKRLRPDVVVTHEPGHQKLDSSPHAYGNNLADQLATQASFKVHAGKRTADGSEFEKRTADGSEFESPKKKAKVE

SEQ ID NO: 779 - protein, 2087 aa, synthetic construct
MPAAKRVKLDGGDKKYSIGLDIGTNSVGWAVITDEYKVPSKKFKVLGNTDRHSIKKNLIGALLFDSGETAEATRLKRTARRRYTRRKNRICYLQEIFSNEMAKVDDSFFHRLEESFLVEEDKKHERHPIFGNIVDEVAYHEKYPTIYHLRKKLVDSTDKADLRLIYLALAHMIKFRGHFLIEGDLNPDNSDVDKLFIQLVQTYNQLFEENPINASGVDAKAILSARLSKSRRLENLIAQLPGEKKNGLFGNLIALSLGLTPNFKSNFDLAEDAKLQLSKDTYDDDLDNLLAQIGDQYADLFLAAKNLSDAILLSDILRVNTEITKAPLSASMIKRYDEHHQDLTLLKALVRQQLPEKYKEIFFDQSKNGYAGYIDGGASQEEFYKFIKPILEKMDGTEELLVKLNREDLLRKQRTFDNGSIPHQIHLGELHAILRRQEDFYPFLKDNREKIEKILTFRIPYYVGPLARGNSRFAWMTRKSEETITPWNFEEVVDKGASAQSFIERMTNFDKNLPNEKVLPKHSLLYEYFTVYNELTKVKYVTEGMRKPAFLSGEQKKAIVDLLFKTNRKVTVKQLKEDYFKKIECFDSVEISGVEDRFNASLGTYHDLLKIIKDKDFLDNEENEDILEDIVLTLTLFEDREMIEERLKTYAHLFDDKVMKQLKRRRYTGWGRLSRKLINGIRDKQSGKTILDFLKSDGFANRNFMQLIHDDSLTFKEDIQKAQVSGQGDSLHEHIANLAGSPAIKKGILQTVKVVDELVKVMGRHKPENIVIEMARENQTTQKGQKNSRERMKRIEEGIKELGSQILKEHPVENTQLQNEKLYLYYLQNGRDMYVDQELDINRLSDYDVDHIVPQSFLKDDSIDNKVLTRSDKARGKSDNVPSEEVVKKMKNYWRQLLNAKLITQRKFDNLTKAERGGLSELDKAGFIKRQLVETRQITKHVAQILDSRMNTKYDENDKLIREVKVITLKSKLVSDFRKDFQFYKVREINNYHHAHDAYLNAVVGTALIKKYPKLESEFVYGDYKVYDVRKMIAKSEQEIGKATAKYFFYSNIMNFFKTEITLANGEIRKRPLIETNGETGEIVWDKGRDFATVRKVLSMPQVNIVKKTEVQTGGFSKESILPKRNSDKLIARKKDWDPKKYGGFDSPTVAYSVLVVAKVEKGKSKKLKSVKELLGITIMERSSFEKNPIDFLEAKGYKEVKKDLIIKLPKYSLFELENGRKRMLASAGELQKGNELALPSKYVNFLYLASHYEKLKGSPEDNEQKQLFVEQHKHYLDEIIEQISEFSKRVILADANLDKVLSAYNKHRDKPIREQAENIIHLFTLTNLGAPAAFKYFDTTIDRKRYTSTKEVLDATLIHQSITGLYETRIDLSQLGGDGGEAAAKGGSGSSGGVPWILKKPLELTIKLDLEEQQGTLLNNSILSKKGKEELKQLFEKYSALWQSWENQVGHRRIRPHKIATGTVKPTPQKQYHINPKAKPDIQIVINDLLKQGVLIQKESTMNTPVYPVPKPNGRWRMVLDYRAVNKVTPLIAVQNQHSYGILGSLFKGRYKTTIDLSNGFWAHPIVPEDYWITAFTWQGKQYCWTVLPQGFLNSPGLFTGDVVDLLQGIPNVEVYVDDVYISHDSEKEHLEYLDILFNRLKEAGYIISLKKSNIANSIVDFLGFQITNEGRGLTDTFKEKLENITAPTTLKQLQSILGLLNFARNFIPDFTELIAPLYALIPKSTKNYVPWQIEHSTTLETLITKLNGAEYLQGRKGDKTLIMKVNASYTTGYIRYYNEGEKKPISYVSIVFSKTELKFTELEKLLTTVHKGLLKALDLSMGQNIHVYSPIVSMQNIQKTPQTAKKALASRWLSWLSYLEDPRIRFFYDPQMPALKDLPAVDTGKDNKKHPSNFQHIFYTDGSAITSPTKEGHLNAGMGIVYFINKDGNLQKQQEWSISLGNHTAQFAEIAAFEFALKKCLPLGGNILVVTDSNYVAKAYNEELDVWASNGFVNNRKKPLKHISKWKSVADLKRLRPDVVVTHEPGHQKLDSSPHAYGNNLADQLATQASFKVHAGKRTADGSEFEKRTADGSEFESPKKKAKVE

SEQ ID NO: 780 - protein, 2085 aa, synthetic construct
MPAAKRVKLDGGDKKYSIGLDIGTNSVGWAVITDEYKVPSKKFKVLGNTDRHSIKKNLIGALLFDSGETAEATRLKRTARRRYTRRKNRICYLQEIFSNEMAKVDDSFFHRLEESFLVEEDKKHERHPIFGNIVDEVAYHEKYPTIYHLRKKLVDSTDKADLRLIYLALAHMIKFRGHFLIEGDLNPDNSDVDKLFIQLVQTYNQLFEENPINASGVDAKAILSARLSKSRRLENLIAQLPGEKKNGLFGNLIALSLGLTPNFKSNFDLAEDAKLQLSKDTYDDDLDNLLAQIGDQYADLFLAAKNLSDAILLSDILRVNTEITKAPLSASMIKRYDEHHQDLTLLKALVRQQLPEKYKEIFFDQSKNGYAGYIDGGASQEEFYKFIKPILEKMDGTEELLVKLNREDLLRKQRTFDNGSIPHQIHLGELHAILRRQEDFYPFLKDNREKIEKILTFRIPYYVGPLARGNSRFAWMTRKSEETITPWNFEEVVDKGASAQSFIERMTNFDKNLPNEKVLPKHSLLYEYFTVYNELTKVKYVTEGMRKPAFLSGEQKKAIVDLLFKTNRKVTVKQLKEDYFKKIECFDSVEISGVEDRFNASLGTYHDLLKIIKDKDFLDNEENEDILEDIVLTLTLFEDREMIEERLKTYAHLFDDKVMKQLKRRRYTGWGRLSRKLINGIRDKQSGKTILDFLKSDGFANRNFMQLIHDDSLTFKEDIQKAQVSGQGDSLHEHIANLAGSPAIKKGILQTVKVVDELVKVMGRHKPENIVIEMARENQTTQKGQKNSRERMKRIEEGIKELGSQILKEHPVENTQLQNEKLYLYYLQNGRDMYVDQELDINRLSDYDVDHIVPQSFLKDDSIDNKVLTRSDKARGKSDNVPSEEVVKKMKNYWRQLLNAKLITQRKFDNLTKAERGGLSELDKAGFIKRQLVETRQITKHVAQILDSRMNTKYDENDKLIREVKVITLKSKLVSDFRKDFQFYKVREINNYHHAHDAYLNAVVGTALIKKYPKLESEFVYGDYKVYDVRKMIAKSEQEIGKATAKYFFYSNIMNFFKTEITLANGEIRKRPLIETNGETGEIVWDKGRDFATVRKVLSMPQVNIVKKTEVQTGGFSKESILPKRNSDKLIARKKDWDPKKYGGFDSPTVAYSVLVVAKVEKGKSKKLKSVKELLGITIMERSSFEKNPIDFLEAKGYKEVKKDLIIKLPKYSLFELENGRKRMLASAGELQKGNELALPSKYVNFLYLASHYEKLKGSPEDNEQKQLFVEQHKHYLDEIIEQISEFSKRVILADANLDKVLSAYNKHRDKPIREQAENIIHLFTLTNLGAPAAFKYFDTTIDRKRYTSTKEVLDATLIHQSITGLYETRIDLSQLGGDGGGGSGGGPAPGGVPWILKKPLELTIKLDLEEQQGTLLNNSILSKKGKEELKQLFEKYSALWQSWENQVGHRRIRPHKIATGTVKPTPQKQYHINPKAKPDIQIVINDLLKQGVLIQKESTMNTPVYPVPKPNGRWRMVLDYRAVNKVTPLIAVQNQHSYGILGSLFKGRYKTTIDLSNGFWAHPIVPEDYWITAFTWQGKQYCWTVLPQGFLNSPGLFTGDVVDLLQGIPNVEVYVDDVYISHDSEKEHLEYLDILFNRLKEAGYIISLKKSNIANSIVDFLGFQITNEGRGLTDTFKEKLENITAPTTLKQLQSILGLLNFARNFIPDFTELIAPLYALIPKSTKNYVPWQIEHSTTLETLITKLNGAEYLQGRKGDKTLIMKVNASYTTGYIRYYNEGEKKPISYVSIVFSKTELKFTELEKLLTTVHKGLLKALDLSMGQNIHVYSPIVSMQNIQKTPQTAKKALASRWLSWLSYLEDPRIRFFYDPQMPALKDLPAVDTGKDNKKHPSNFQHIFYTDGSAITSPTKEGHLNAGMGIVYFINKDGNLQKQQEWSISLGNHTAQFAEIAAFEFALKKCLPLGGNILVVTDSNYVAKAYNEELDVWASNGFVNNRKKPLKHISKWKSVADLKRLRPDVVVTHEPGHQKLDSSPHAYGNNLADQLATQASFKVHAGKRTADGSEFEKRTADGSEFESPKKKAKVE

SEQ ID NO: 781 - protein, 2086 aa, synthetic construct
MPAAKRVKLDGGDKKYSIGLDIGTNSVGWAVITDEYKVPSKKFKVLGNTDRHSIKKNLIGALLFDSGETAEATRLKRTARRRYTRRKNRICYLQEIFSNEMAKVDDSFFHRLEESFLVEEDKKHERHPIFGNIVDEVAYHEKYPTIYHLRKKLVDSTDKADLRLIYLALAHMIKFRGHFLIEGDLNPDNSDVDKLFIQLVQTYNQLFEENPINASGVDAKAILSARLSKSRRLENLIAQLPGEKKNGLFGNLIALSLGLTPNFKSNFDLAEDAKLQLSKDTYDDDLDNLLAQIGDQYADLFLAAKNLSDAILLSDILRVNTEITKAPLSASMIKRYDEHHQDLTLLKALVRQQLPEKYKEIFFDQSKNGYAGYIDGGASQEEFYKFIKPILEKMDGTEELLVKLNREDLLRKQRTFDNGSIPHQIHLGELHAILRRQEDFYPFLKDNREKIEKILTFRIPYYVGPLARGNSRFAWMTRKSEETITPWNFEEVVDKGASAQSFIERMTNFDKNLPNEKVLPKHSLLYEYFTVYNELTKVKYVTEGMRKPAFLSGEQKKAIVDLLFKTNRKVTVKQLKEDYFKKIECFDSVEISGVEDRFNASLGTYHDLLKIIKDKDFLDNEENEDILEDIVLTLTLFEDREMIEERLKTYAHLFDDKVMKQLKRRRYTGWGRLSRKLINGIRDKQSGKTILDFLKSDGFANRNFMQLIHDDSLTFKEDIQKAQVSGQGDSLHEHIANLAGSPAIKKGILQTVKVVDELVKVMGRHKPENIVIEMARENQTTQKGQKNSRERMKRIEEGIKELGSQILKEHPVENTQLQNEKLYLYYLQNGRDMYVDQELDINRLSDYDVDHIVPQSFLKDDSIDNKVLTRSDKARGKSDNVPSEEVVKKMKNYWRQLLNAKLITQRKFDNLTKAERGGLSELDKAGFIKRQLVETRQITKHVAQILDSRMNTKYDENDKLIREVKVITLKSKLVSDFRKDFQFYKVREINNYHHAHDAYLNAVVGTALIKKYPKLESEFVYGDYKVYDVRKMIAKSEQEIGKATAKYFFYSNIMNFFKTEITLANGEIRKRPLIETNGETGEIVWDKGRDFATVRKVLSMPQVNIVKKTEVQTGGFSKESILPKRNSDKLIARKKDWDPKKYGGFDSPTVAYSVLVVAKVEKGKSKKLKSVKELLGITIMERSSFEKNPIDFLEAKGYKEVKKDLIIKLPKYSLFELENGRKRMLASAGELQKGNELALPSKYVNFLYLASHYEKLKGSPEDNEQKQLFVEQHKHYLDEIIEQISEFSKRVILADANLDKVLSAYNKHRDKPIREQAENIIHLFTLTNLGAPAAFKYFDTTIDRKRYTSTKEVLDATLIHQSITGLYETRIDLSQLGGDGGGGGGSGGGGSGGVPWILKKPLELTIKLDLEEQQGTLLNNSILSKKGKEELKQLFEKYSALWQSWENQVGHRRIRPHKIATGTVKPTPQKQYHINPKAKPDIQIVINDLLKQGVLIQKESTMNTPVYPVPKPNGRWRMVLDYRAVNKVTPLIAVQNQHSYGILGSLFKGRYKTTIDLSNGFWAHPIVPEDYWITAFTWQGKQYCWTVLPQGFLNSPGLFTGDVVDLLQGIPNVEVYVDDVYISHDSEKEHLEYLDILFNRLKEAGYIISLKKSNIANSIVDFLGFQITNEGRGLTDTFKEKLENITAPTTLKQLQSILGLLNFARNFIPDFTELIAPLYALIPKSTKNYVPWQIEHSTTLETLITKLNGAEYLQGRKGDKTLIMKVNASYTTGYIRYYNEGEKKPISYVSIVFSKTELKFTELEKLLTTVHKGLLKALDLSMGQNIHVYSPIVSMQNIQKTPQTAKKALASRWLSWLSYLEDPRIRFFYDPQMPALKDLPAVDTGKDNKKHPSNFQHIFYTDGSAITSPTKEGHLNAGMGIVYFINKDGNLQKQQEWSISLGNHTAQFAEIAAFEFALKKCLPLGGNILVVTDSNYVAKAYNEELDVWASNGFVNNRKKPLKHISKWKSVADLKRLRPDVVVTHEPGHQKLDSSPHAYGNNLADQLATQASFKVHAGKRTADGSEFEKRTADGSEFESPKKKAKVE

SEQ ID NO: 782 - protein, 2085 aa, synthetic construct
MPAAKRVKLDGGDKKYSIGLDIGTNSVGWAVITDEYKVPSKKFKVLGNTDRHSIKKNLIGALLFDSGETAEATRLKRTARRRYTRRKNRICYLQEIFSNEMAKVDDSFFHRLEESFLVEEDKKHERHPIFGNIVDEVAYHEKYPTIYHLRKKLVDSTDKADLRLIYLALAHMIKFRGHFLIEGDLNPDNSDVDKLFIQLVQTYNQLFEENPINASGVDAKAILSARLSKSRRLENLIAQLPGEKKNGLFGNLIALSLGLTPNFKSNFDLAEDAKLQLSKDTYDDDLDNLLAQIGDQYADLFLAAKNLSDAILLSDILRVNTEITKAPLSASMIKRYDEHHQDLTLLKALVRQQLPEKYKEIFFDQSKNGYAGYIDGGASQEEFYKFIKPILEKMDGTEELLVKLNREDLLRKQRTFDNGSIPHQIHLGELHAILRRQEDFYPFLKDNREKIEKILTFRIPYYVGPLARGNSRFAWMTRKSEETITPWNFEEVVDKGASAQSFIERMTNFDKNLPNEKVLPKHSLLYEYFTVYNELTKVKYVTEGMRKPAFLSGEQKKAIVDLLFKTNRKVTVKQLKEDYFKKIECFDSVEISGVEDRFNASLGTYHDLLKIIKDKDFLDNEENEDILEDIVLTLTLFEDREMIEERLKTYAHLFDDKVMKQLKRRRYTGWGRLSRKLINGIRDKQSGKTILDFLKSDGFANRNFMQLIHDDSLTFKEDIQKAQVSGQGDSLHEHIANLAGSPAIKKGILQTVKVVDELVKVMGRHKPENIVIEMARENQTTQKGQKNSRERMKRIEEGIKELGSQILKEHPVENTQLQNEKLYLYYLQNGRDMYVDQELDINRLSDYDVDHIVPQSFLKDDSIDNKVLTRSDKARGKSDNVPSEEVVKKMKNYWRQLLNAKLITQRKFDNLTKAERGGLSELDKAGFIKRQLVETRQITKHVAQILDSRMNTKYDENDKLIREVKVITLKSKLVSDFRKDFQFYKVREINNYHHAHDAYLNAVVGTALIKKYPKLESEFVYGDYKVYDVRKMIAKSEQEIGKATAKYFFYSNIMNFFKTEITLANGEIRKRPLIETNGETGEIVWDKGRDFATVRKVLSMPQVNIVKKTEVQTGGFSKESILPKRNSDKLIARKKDWDPKKYGGFDSPTVAYSVLVVAKVEKGKSKKLKSVKELLGITIMERSSFEKNPIDFLEAKGYKEVKKDLIIKLPKYSLFELENGRKRMLASAGELQKGNELALPSKYVNFLYLASHYEKLKGSPEDNEQKQLFVEQHKHYLDEIIEQISEFSKRVILADANLDKVLSAYNKHRDKPIREQAENIIHLFTLTNLGAPAAFKYFDTTIDRKRYTSTKEVLDATLIHQSITGLYETRIDLSQLGGDGGPAPAPAPAPGGVPWILKKPLELTIKLDLEEQQGTLLNNSILSKKGKEELKQLFEKYSALWQSWENQVGHRRIRPHKIATGTVKPTPQKQYHINPKAKPDIQIVINDLLKQGVLIQKESTMNTPVYPVPKPNGRWRMVLDYRAVNKVTPLIAVQNQHSYGILGSLFKGRYKTTIDLSNGFWAHPIVPEDYWITAFTWQGKQYCWTVLPQGFLNSPGLFTGDVVDLLQGIPNVEVYVDDVYISHDSEKEHLEYLDILFNRLKEAGYIISLKKSNIANSIVDFLGFQITNEGRGLTDTFKEKLENITAPTTLKQLQSILGLLNFARNFIPDFTELIAPLYALIPKSTKNYVPWQIEHSTTLETLITKLNGAEYLQGRKGDKTLIMKVNASYTTGYIRYYNEGEKKPISYVSIVFSKTELKFTELEKLLTTVHKGLLKALDLSMGQNIHVYSPIVSMQNIQKTPQTAKKALASRWLSWLSYLEDPRIRFFYDPQMPALKDLPAVDTGKDNKKHPSNFQHIFYTDGSAITSPTKEGHLNAGMGIVYFINKDGNLQKQQEWSISLGNHTAQFAEIAAFEFALKKCLPLGGNILVVTDSNYVAKAYNEELDVWASNGFVNNRKKPLKHISKWKSVADLKRLRPDVVVTHEPGHQKLDSSPHAYGNNLADQLATQASFKVHAGKRTADGSEFEKRTADGSEFESPKKKAKVE

SEQ ID NO: 783 - protein, 2091 aa, synthetic construct
MPAAKRVKLDGGDKKYSIGLDIGTNSVGWAVITDEYKVPSKKFKVLGNTDRHSIKKNLIGALLFDSGETAEATRLKRTARRRYTRRKNRICYLQEIFSNEMAKVDDSFFHRLEESFLVEEDKKHERHPIFGNIVDEVAYHEKYPTIYHLRKKLVDSTDKADLRLIYLALAHMIKFRGHFLIEGDLNPDNSDVDKLFIQLVQTYNQLFEENPINASGVDAKAILSARLSKSRRLENLIAQLPGEKKNGLFGNLIALSLGLTPNFKSNFDLAEDAKLQLSKDTYDDDLDNLLAQIGDQYADLFLAAKNLSDAILLSDILRVNTEITKAPLSASMIKRYDEHHQDLTLLKALVRQQLPEKYKEIFFDQSKNGYAGYIDGGASQEEFYKFIKPILEKMDGTEELLVKLNREDLLRKQRTFDNGSIPHQIHLGELHAILRRQEDFYPFLKDNREKIEKILTFRIPYYVGPLARGNSRFAWMTRKSEETITPWNFEEVVDKGASAQSFIERMTNFDKNLPNEKVLPKHSLLYEYFTVYNELTKVKYVTEGMRKPAFLSGEQKKAIVDLLFKTNRKVTVKQLKEDYFKKIECFDSVEISGVEDRFNASLGTYHDLLKIIKDKDFLDNEENEDILEDIVLTLTLFEDREMIEERLKTYAHLFDDKVMKQLKRRRYTGWGRLSRKLINGIRDKQSGKTILDFLKSDGFANRNFMQLIHDDSLTFKEDIQKAQVSGQGDSLHEHIANLAGSPAIKKGILQTVKVVDELVKVMGRHKPENIVIEMARENQTTQKGQKNSRERMKRIEEGIKELGSQILKEHPVENTQLQNEKLYLYYLQNGRDMYVDQELDINRLSDYDVDHIVPQSFLKDDSIDNKVLTRSDKARGKSDNVPSEEVVKKMKNYWRQLLNAKLITQRKFDNLTKAERGGLSELDKAGFIKRQLVETRQITKHVAQILDSRMNTKYDENDKLIREVKVITLKSKLVSDFRKDFQFYKVREINNYHHAHDAYLNAVVGTALIKKYPKLESEFVYGDYKVYDVRKMIAKSEQEIGKATAKYFFYSNIMNFFKTEITLANGEIRKRPLIETNGETGEIVWDKGRDFATVRKVLSMPQVNIVKKTEVQTGGFSKESILPKRNSDKLIARKKDWDPKKYGGFDSPTVAYSVLVVAKVEKGKSKKLKSVKELLGITIMERSSFEKNPIDFLEAKGYKEVKKDLIIKLPKYSLFELENGRKRMLASAGELQKGNELALPSKYVNFLYLASHYEKLKGSPEDNEQKQLFVEQHKHYLDEIIEQISEFSKRVILADANLDKVLSAYNKHRDKPIREQAENIIHLFTLTNLGAPAAFKYFDTTIDRKRYTSTKEVLDATLIHQSITGLYETRIDLSQLGGDGGGGSGGSGGSGGSGGSGGVPWILKKPLELTIKLDLEEQQGTLLNNSILSKKGKEELKQLFEKYSALWQSWENQVGHRRIRPHKIATGTVKPTPQKQYHINPKAKPDIQIVINDLLKQGVLIQKESTMNTPVYPVPKPNGRWRMVLDYRAVNKVTPLIAVQNQHSYGILGSLFKGRYKTTIDLSNGFWAHPIVPEDYWITAFTWQGKQYCWTVLPQGFLNSPGLFTGDVVDLLQGIPNVEVYVDDVYISHDSEKEHLEYLDILFNRLKEAGYIISLKKSNIANSIVDFLGFQITNEGRGLTDTFKEKLENITAPTTLKQLQSILGLLNFARNFIPDFTELIAPLYALIPKSTKNYVPWQIEHSTTLETLITKLNGAEYLQGRKGDKTLIMKVNASYTTGYIRYYNEGEKKPISYVSIVFSKTELKFTELEKLLTTVHKGLLKALDLSMGQNIHVYSPIVSMQNIQKTPQTAKKALASRWLSWLSYLEDPRIRFFYDPQMPALKDLPAVDTGKDNKKHPSNFQHIFYTDGSAITSPTKEGHLNAGMGIVYFINKDGNLQKQQEWSISLGNHTAQFAEIAAFEFALKKCLPLGGNILVVTDSNYVAKAYNEELDVWASNGFVNNRKKPLKHISKWKSVADLKRLRPDVVVTHEPGHQKLDSSPHAYGNNLADQLATQASFKVHAGKRTADGSEFEKRTADGSEFESPKKKAKVE

SEQ ID NO: 784 - protein, 2084 aa, synthetic construct
MPAAKRVKLDGGDKKYSIGLDIGTNSVGWAVITDEYKVPSKKFKVLGNTDRHSIKKNLIGALLFDSGETAEATRLKRTARRRYTRRKNRICYLQEIFSNEMAKVDDSFFHRLEESFLVEEDKKHERHPIFGNIVDEVAYHEKYPTIYHLRKKLVDSTDKADLRLIYLALAHMIKFRGHFLIEGDLNPDNSDVDKLFIQLVQTYNQLFEENPINASGVDAKAILSARLSKSRRLENLIAQLPGEKKNGLFGNLIALSLGLTPNFKSNFDLAEDAKLQLSKDTYDDDLDNLLAQIGDQYADLFLAAKNLSDAILLSDILRVNTEITKAPLSASMIKRYDEHHQDLTLLKALVRQQLPEKYKEIFFDQSKNGYAGYIDGGASQEEFYKFIKPILEKMDGTEELLVKLNREDLLRKQRTFDNGSIPHQIHLGELHAILRRQEDFYPFLKDNREKIEKILTFRIPYYVGPLARGNSRFAWMTRKSEETITPWNFEEVVDKGASAQSFIERMTNFDKNLPNEKVLPKHSLLYEYFTVYNELTKVKYVTEGMRKPAFLSGEQKKAIVDLLFKTNRKVTVKQLKEDYFKKIECFDSVEISGVEDRFNASLGTYHDLLKIIKDKDFLDNEENEDILEDIVLTLTLFEDREMIEERLKTYAHLFDDKVMKQLKRRRYTGWGRLSRKLINGIRDKQSGKTILDFLKSDGFANRNFMQLIHDDSLTFKEDIQKAQVSGQGDSLHEHIANLAGSPAIKKGILQTVKVVDELVKVMGRHKPENIVIEMARENQTTQKGQKNSRERMKRIEEGIKELGSQILKEHPVENTQLQNEKLYLYYLQNGRDMYVDQELDINRLSDYDVDHIVPQSFLKDDSIDNKVLTRSDKARGKSDNVPSEEVVKKMKNYWRQLLNAKLITQRKFDNLTKAERGGLSELDKAGFIKRQLVETRQITKHVAQILDSRMNTKYDENDKLIREVKVITLKSKLVSDFRKDFQFYKVREINNYHHAHDAYLNAVVGTALIKKYPKLESEFVYGDYKVYDVRKMIAKSEQEIGKATAKYFFYSNIMNFFKTEITLANGEIRKRPLIETNGETGEIVWDKGRDFATVRKVLSMPQVNIVKKTEVQTGGFSKESILPKRNSDKLIARKKDWDPKKYGGFDSPTVAYSVLVVAKVEKGKSKKLKSVKELLGITIMERSSFEKNPIDFLEAKGYKEVKKDLIIKLPKYSLFELENGRKRMLASAGELQKGNELALPSKYVNFLYLASHYEKLKGSPEDNEQKQLFVEQHKHYLDEIIEQISEFSKRVILADANLDKVLSAYNKHRDKPIREQAENIIHLFTLTNLGAPAAFKYFDTTIDRKRYTSTKEVLDATLIHQSITGLYETRIDLSQLGGDGGEAAAKGGGGGVPWILKKPLELTIKLDLEEQQGTLLNNSILSKKGKEELKQLFEKYSALWQSWENQVGHRRIRPHKIATGTVKPTPQKQYHINPKAKPDIQIVINDLLKQGVLIQKESTMNTPVYPVPKPNGRWRMVLDYRAVNKVTPLIAVQNQHSYGILGSLFKGRYKTTIDLSNGFWAHPIVPEDYWITAFTWQGKQYCWTVLPQGFLNSPGLFTGDVVDLLQGIPNVEVYVDDVYISHDSEKEHLEYLDILFNRLKEAGYIISLKKSNIANSIVDFLGFQITNEGRGLTDTFKEKLENITAPTTLKQLQSILGLLNFARNFIPDFTELIAPLYALIPKSTKNYVPWQIEHSTTLETLITKLNGAEYLQGRKGDKTLIMKVNASYTTGYIRYYNEGEKKPISYVSIVFSKTELKFTELEKLLTTVHKGLLKALDLSMGQNIHVYSPIVSMQNIQKTPQTAKKALASRWLSWLSYLEDPRIRFFYDPQMPALKDLPAVDTGKDNKKHPSNFQHIFYTDGSAITSPTKEGHLNAGMGIVYFINKDGNLQKQQEWSISLGNHTAQFAEIAAFEFALKKCLPLGGNILVVTDSNYVAKAYNEELDVWASNGFVNNRKKPLKHISKWKSVADLKRLRPDVVVTHEPGHQKLDSSPHAYGNNLADQLATQASFKVHAGKRTADGSEFEKRTADGSEFESPKKKAKVE

SEQ ID NO: 785 - protein, 2087 aa, synthetic construct
MPAAKRVKLDGGDKKYSIGLDIGTNSVGWAVITDEYKVPSKKFKVLGNTDRHSIKKNLIGALLFDSGETAEATRLKRTARRRYTRRKNRICYLQEIFSNEMAKVDDSFFHRLEESFLVEEDKKHERHPIFGNIVDEVAYHEKYPTIYHLRKKLVDSTDKADLRLIYLALAHMIKFRGHFLIEGDLNPDNSDVDKLFIQLVQTYNQLFEENPINASGVDAKAILSARLSKSRRLENLIAQLPGEKKNGLFGNLIALSLGLTPNFKSNFDLAEDAKLQLSKDTYDDDLDNLLAQIGDQYADLFLAAKNLSDAILLSDILRVNTEITKAPLSASMIKRYDEHHQDLTLLKALVRQQLPEKYKEIFFDQSKNGYAGYIDGGASQEEFYKFIKPILEKMDGTEELLVKLNREDLLRKQRTFDNGSIPHQIHLGELHAILRRQEDFYPFLKDNREKIEKILTFRIPYYVGPLARGNSRFAWMTRKSEETITPWNFEEVVDKGASAQSFIERMTNFDKNLPNEKVLPKHSLLYEYFTVYNELTKVKYVTEGMRKPAFLSGEQKKAIVDLLFKTNRKVTVKQLKEDYFKKIECFDSVEISGVEDRFNASLGTYHDLLKIIKDKDFLDNEENEDILEDIVLTLTLFEDREMIEERLKTYAHLFDDKVMKQLKRRRYTGWGRLSRKLINGIRDKQSGKTILDFLKSDGFANRNFMQLIHDDSLTFKEDIQKAQVSGQGDSLHEHIANLAGSPAIKKGILQTVKVVDELVKVMGRHKPENIVIEMARENQTTQKGQKNSRERMKRIEEGIKELGSQILKEHPVENTQLQNEKLYLYYLQNGRDMYVDQELDINRLSDYDVDHIVPQSFLKDDSIDNKVLTRSDKARGKSDNVPSEEVVKKMKNYWRQLLNAKLITQRKFDNLTKAERGGLSELDKAGFIKRQLVETRQITKHVAQILDSRMNTKYDENDKLIREVKVITLKSKLVSDFRKDFQFYKVREINNYHHAHDAYLNAVVGTALIKKYPKLESEFVYGDYKVYDVRKMIAKSEQEIGKATAKYFFYSNIMNFFKTEITLANGEIRKRPLIETNGETGEIVWDKGRDFATVRKVLSMPQVNIVKKTEVQTGGFSKESILPKRNSDKLIARKKDWDPKKYGGFDSPTVAYSVLVVAKVEKGKSKKLKSVKELLGITIMERSSFEKNPIDFLEAKGYKEVKKDLIIKLPKYSLFELENGRKRMLASAGELQKGNELALPSKYVNFLYLASHYEKLKGSPEDNEQKQLFVEQHKHYLDEIIEQISEFSKRVILADANLDKVLSAYNKHRDKPIREQAENIIHLFTLTNLGAPAAFKYFDTTIDRKRYTSTKEVLDATLIHQSITGLYETRIDLSQLGGDGGPAPAPAPAPAPGGVPWILKKPLELTIKLDLEEQQGTLLNNSILSKKGKEELKQLFEKYSALWQSWENQVGHRRIRPHKIATGTVKPTPQKQYHINPKAKPDIQIVINDLLKQGVLIQKESTMNTPVYPVPKPNGRWRMVLDYRAVNKVTPLIAVQNQHSYGILGSLFKGRYKTTIDLSNGFWAHPIVPEDYWITAFTWQGKQYCWTVLPQGFLNSPGLFTGDVVDLLQGIPNVEVYVDDVYISHDSEKEHLEYLDILFNRLKEAGYIISLKKSNIANSIVDFLGFQITNEGRGLTDTFKEKLENITAPTTLKQLQSILGLLNFARNFIPDFTELIAPLYALIPKSTKNYVPWQIEHSTTLETLITKLNGAEYLQGRKGDKTLIMKVNASYTTGYIRYYNEGEKKPISYVSIVFSKTELKFTELEKLLTTVHKGLLKALDLSMGQNIHVYSPIVSMQNIQKTPQTAKKALASRWLSWLSYLEDPRIRFFYDPQMPALKDLPAVDTGKDNKKHPSNFQHIFYTDGSAITSPTKEGHLNAGMGIVYFINKDGNLQKQQEWSISLGNHTAQFAEIAAFEFALKKCLPLGGNILVVTDSNYVAKAYNEELDVWASNGFVNNRKKPLKHISKWKSVADLKRLRPDVVVTHEPGHQKLDSSPHAYGNNLADQLATQASFKVHAGKRTADGSEFEKRTADGSEFESPKKKAKVE

SEQ ID NO: 786 - protein, 2085 aa, synthetic construct
MPAAKRVKLDGGDKKYSIGLDIGTNSVGWAVITDEYKVPSKKFKVLGNTDRHSIKKNLIGALLFDSGETAEATRLKRTARRRYTRRKNRICYLQEIFSNEMAKVDDSFFHRLEESFLVEEDKKHERHPIFGNIVDEVAYHEKYPTIYHLRKKLVDSTDKADLRLIYLALAHMIKFRGHFLIEGDLNPDNSDVDKLFIQLVQTYNQLFEENPINASGVDAKAILSARLSKSRRLENLIAQLPGEKKNGLFGNLIALSLGLTPNFKSNFDLAEDAKLQLSKDTYDDDLDNLLAQIGDQYADLFLAAKNLSDAILLSDILRVNTEITKAPLSASMIKRYDEHHQDLTLLKALVRQQLPEKYKEIFFDQSKNGYAGYIDGGASQEEFYKFIKPILEKMDGTEELLVKLNREDLLRKQRTFDNGSIPHQIHLGELHAILRRQEDFYPFLKDNREKIEKILTFRIPYYVGPLARGNSRFAWMTRKSEETITPWNFEEVVDKGASAQSFIERMTNFDKNLPNEKVLPKHSLLYEYFTVYNELTKVKYVTEGMRKPAFLSGEQKKAIVDLLFKTNRKVTVKQLKEDYFKKIECFDSVEISGVEDRFNASLGTYHDLLKIIKDKDFLDNEENEDILEDIVLTLTLFEDREMIEERLKTYAHLFDDKVMKQLKRRRYTGWGRLSRKLINGIRDKQSGKTILDFLKSDGFANRNFMQLIHDDSLTFKEDIQKAQVSGQGDSLHEHIANLAGSPAIKKGILQTVKVVDELVKVMGRHKPENIVIEMARENQTTQKGQKNSRERMKRIEEGIKELGSQILKEHPVENTQLQNEKLYLYYLQNGRDMYVDQELDINRLSDYDVDHIVPQSFLKDDSIDNKVLTRSDKARGKSDNVPSEEVVKKMKNYWRQLLNAKLITQRKFDNLTKAERGGLSELDKAGFIKRQLVETRQITKHVAQILDSRMNTKYDENDKLIREVKVITLKSKLVSDFRKDFQFYKVREINNYHHAHDAYLNAVVGTALIKKYPKLESEFVYGDYKVYDVRKMIAKSEQEIGKATAKYFFYSNIMNFFKTEITLANGEIRKRPLIETNGETGEIVWDKGRDFATVRKVLSMPQVNIVKKTEVQTGGFSKESILPKRNSDKLIARKKDWDPKKYGGFDSPTVAYSVLVVAKVEKGKSKKLKSVKELLGITIMERSSFEKNPIDFLEAKGYKEVKKDLIIKLPKYSLFELENGRKRMLASAGELQKGNELALPSKYVNFLYLASHYEKLKGSPEDNEQKQLFVEQHKHYLDEIIEQISEFSKRVILADANLDKVLSAYNKHRDKPIREQAENIIHLFTLTNLGAPAAFKYFDTTIDRKRYTSTKEVLDATLIHQSITGLYETRIDLSQLGGDGGGGSGGSGGSGGVPWILKKPLELTIKLDLEEQQGTLLNNSILSKKGKEELKQLFEKYSALWQSWENQVGHRRIRPHKIATGTVKPTPQKQYHINPKAKPDIQIVINDLLKQGVLIQKESTMNTPVYPVPKPNGRWRMVLDYRAVNKVTPLIAVQNQHSYGILGSLFKGRYKTTIDLSNGFWAHPIVPEDYWITAFTWQGKQYCWTVLPQGFLNSPGLFTGDVVDLLQGIPNVEVYVDDVYISHDSEKEHLEYLDILFNRLKEAGYIISLKKSNIANSIVDFLGFQITNEGRGLTDTFKEKLENITAPTTLKQLQSILGLLNFARNFIPDFTELIAPLYALIPKSTKNYVPWQIEHSTTLETLITKLNGAEYLQGRKGDKTLIMKVNASYTTGYIRYYNEGEKKPISYVSIVFSKTELKFTELEKLLTTVHKGLLKALDLSMGQNIHVYSPIVSMQNIQKTPQTAKKALASRWLSWLSYLEDPRIRFFYDPQMPALKDLPAVDTGKDNKKHPSNFQHIFYTDGSAITSPTKEGHLNAGMGIVYFINKDGNLQKQQEWSISLGNHTAQFAEIAAFEFALKKCLPLGGNILVVTDSNYVAKAYNEELDVWASNGFVNNRKKPLKHISKWKSVADLKRLRPDVVVTHEPGHQKLDSSPHAYGNNLADQLATQASFKVHAGKRTADGSEFEKRTADGSEFESPKKKAKVE

SEQ ID NO: 787 - protein, 2085 aa, synthetic construct
MPAAKRVKLDGGDKKYSIGLDIGTNSVGWAVITDEYKVPSKKFKVLGNTDRHSIKKNLIGALLFDSGETAEATRLKRTARRRYTRRKNRICYLQEIFSNEMAKVDDSFFHRLEESFLVEEDKKHERHPIFGNIVDEVAYHEKYPTIYHLRKKLVDSTDKADLRLIYLALAHMIKFRGHFLIEGDLNPDNSDVDKLFIQLVQTYNQLFEENPINASGVDAKAILSARLSKSRRLENLIAQLPGEKKNGLFGNLIALSLGLTPNFKSNFDLAEDAKLQLSKDTYDDDLDNLLAQIGDQYADLFLAAKNLSDAILLSDILRVNTEITKAPLSASMIKRYDEHHQDLTLLKALVRQQLPEKYKEIFFDQSKNGYAGYIDGGASQEEFYKFIKPILEKMDGTEELLVKLNREDLLRKQRTFDNGSIPHQIHLGELHAILRRQEDFYPFLKDNREKIEKILTFRIPYYVGPLARGNSRFAWMTRKSEETITPWNFEEVVDKGASAQSFIERMTNFDKNLPNEKVLPKHSLLYEYFTVYNELTKVKYVTEGMRKPAFLSGEQKKAIVDLLFKTNRKVTVKQLKEDYFKKIECFDSVEISGVEDRFNASLGTYHDLLKIIKDKDFLDNEENEDILEDIVLTLTLFEDREMIEERLKTYAHLFDDKVMKQLKRRRYTGWGRLSRKLINGIRDKQSGKTILDFLKSDGFANRNFMQLIHDDSLTFKEDIQKAQVSGQGDSLHEHIANLAGSPAIKKGILQTVKVVDELVKVMGRHKPENIVIEMARENQTTQKGQKNSRERMKRIEEGIKELGSQILKEHPVENTQLQNEKLYLYYLQNGRDMYVDQELDINRLSDYDVDHIVPQSFLKDDSIDNKVLTRSDKARGKSDNVPSEEVVKKMKNYWRQLLNAKLITQRKFDNLTKAERGGLSELDKAGFIKRQLVETRQITKHVAQILDSRMNTKYDENDKLIREVKVITLKSKLVSDFRKDFQFYKVREINNYHHAHDAYLNAVVGTALIKKYPKLESEFVYGDYKVYDVRKMIAKSEQEIGKATAKYFFYSNIMNFFKTEITLANGEIRKRPLIETNGETGEIVWDKGRDFATVRKVLSMPQVNIVKKTEVQTGGFSKESILPKRNSDKLIARKKDWDPKKYGGFDSPTVAYSVLVVAKVEKGKSKKLKSVKELLGITIMERSSFEKNPIDFLEAKGYKEVKKDLIIKLPKYSLFELENGRKRMLASAGELQKGNELALPSKYVNFLYLASHYEKLKGSPEDNEQKQLFVEQHKHYLDEIIEQISEFSKRVILADANLDKVLSAYNKHRDKPIREQAENIIHLFTLTNLGAPAAFKYFDTTIDRKRYTSTKEVLDATLIHQSITGLYETRIDLSQLGGDGGGSSGGSGGGGGVPWILKKPLELTIKLDLEEQQGTLLNNSILSKKGKEELKQLFEKYSALWQSWENQVGHRRIRPHKIATGTVKPTPQKQYHINPKAKPDIQIVINDLLKQGVLIQKESTMNTPVYPVPKPNGRWRMVLDYRAVNKVTPLIAVQNQHSYGILGSLFKGRYKTTIDLSNGFWAHPIVPEDYWITAFTWQGKQYCWTVLPQGFLNSPGLFTGDVVDLLQGIPNVEVYVDDVYISHDSEKEHLEYLDILFNRLKEAGYIISLKKSNIANSIVDFLGFQITNEGRGLTDTFKEKLENITAPTTLKQLQSILGLLNFARNFIPDFTELIAPLYALIPKSTKNYVPWQIEHSTTLETLITKLNGAEYLQGRKGDKTLIMKVNASYTTGYIRYYNEGEKKPISYVSIVFSKTELKFTELEKLLTTVHKGLLKALDLSMGQNIHVYSPIVSMQNIQKTPQTAKKALASRWLSWLSYLEDPRIRFFYDPQMPALKDLPAVDTGKDNKKHPSNFQHIFYTDGSAITSPTKEGHLNAGMGIVYFINKDGNLQKQQEWSISLGNHTAQFAEIAAFEFALKKCLPLGGNILVVTDSNYVAKAYNEELDVWASNGFVNNRKKPLKHISKWKSVADLKRLRPDVVVTHEPGHQKLDSSPHAYGNNLADQLATQASFKVHAGKRTADGSEFEKRTADGSEFESPKKKAKVE

SEQ ID NO: 788 - protein, 2082 aa, synthetic construct
MPAAKRVKLDGGDKKYSIGLDIGTNSVGWAVITDEYKVPSKKFKVLGNTDRHSIKKNLIGALLFDSGETAEATRLKRTARRRYTRRKNRICYLQEIFSNEMAKVDDSFFHRLEESFLVEEDKKHERHPIFGNIVDEVAYHEKYPTIYHLRKKLVDSTDKADLRLIYLALAHMIKFRGHFLIEGDLNPDNSDVDKLFIQLVQTYNQLFEENPINASGVDAKAILSARLSKSRRLENLIAQLPGEKKNGLFGNLIALSLGLTPNFKSNFDLAEDAKLQLSKDTYDDDLDNLLAQIGDQYADLFLAAKNLSDAILLSDILRVNTEITKAPLSASMIKRYDEHHQDLTLLKALVRQQLPEKYKEIFFDQSKNGYAGYIDGGASQEEFYKFIKPILEKMDGTEELLVKLNREDLLRKQRTFDNGSIPHQIHLGELHAILRRQEDFYPFLKDNREKIEKILTFRIPYYVGPLARGNSRFAWMTRKSEETITPWNFEEVVDKGASAQSFIERMTNFDKNLPNEKVLPKHSLLYEYFTVYNELTKVKYVTEGMRKPAFLSGEQKKAIVDLLFKTNRKVTVKQLKEDYFKKIECFDSVEISGVEDRFNASLGTYHDLLKIIKDKDFLDNEENEDILEDIVLTLTLFEDREMIEERLKTYAHLFDDKVMKQLKRRRYTGWGRLSRKLINGIRDKQSGKTILDFLKSDGFANRNFMQLIHDDSLTFKEDIQKAQVSGQGDSLHEHIANLAGSPAIKKGILQTVKVVDELVKVMGRHKPENIVIEMARENQTTQKGQKNSRERMKRIEEGIKELGSQILKEHPVENTQLQNEKLYLYYLQNGRDMYVDQELDINRLSDYDVDHIVPQSFLKDDSIDNKVLTRSDKARGKSDNVPSEEVVKKMKNYWRQLLNAKLITQRKFDNLTKAERGGLSELDKAGFIKRQLVETRQITKHVAQILDSRMNTKYDENDKLIREVKVITLKSKLVSDFRKDFQFYKVREINNYHHAHDAYLNAVVGTALIKKYPKLESEFVYGDYKVYDVRKMIAKSEQEIGKATAKYFFYSNIMNFFKTEITLANGEIRKRPLIETNGETGEIVWDKGRDFATVRKVLSMPQVNIVKKTEVQTGGFSKESILPKRNSDKLIARKKDWDPKKYGGFDSPTVAYSVLVVAKVEKGKSKKLKSVKELLGITIMERSSFEKNPIDFLEAKGYKEVKKDLIIKLPKYSLFELENGRKRMLASAGELQKGNELALPSKYVNFLYLASHYEKLKGSPEDNEQKQLFVEQHKHYLDEIIEQISEFSKRVILADANLDKVLSAYNKHRDKPIREQAENIIHLFTLTNLGAPAAFKYFDTTIDRKRYTSTKEVLDATLIHQSITGLYETRIDLSQLGGDGGGGSGGSGGVPWILKKPLELTIKLDLEEQQGTLLNNSILSKKGKEELKQLFEKYSALWQSWENQVGHRRIRPHKIATGTVKPTPQKQYHINPKAKPDIQIVINDLLKQGVLIQKESTMNTPVYPVPKPNGRWRMVLDYRAVNKVTPLIAVQNQHSYGILGSLFKGRYKTTIDLSNGFWAHPIVPEDYWITAFTWQGKQYCWTVLPQGFLNSPGLFTGDVVDLLQGIPNVEVYVDDVYISHDSEKEHLEYLDILFNRLKEAGYIISLKKSNIANSIVDFLGFQITNEGRGLTDTFKEKLENITAPTTLKQLQSILGLLNFARNFIPDFTELIAPLYALIPKSTKNYVPWQIEHSTTLETLITKLNGAEYLQGRKGDKTLIMKVNASYTTGYIRYYNEGEKKPISYVSIVFSKTELKFTELEKLLTTVHKGLLKALDLSMGQNIHVYSPIVSMQNIQKTPQTAKKALASRWLSWLSYLEDPRIRFFYDPQMPALKDLPAVDTGKDNKKHPSNFQHIFYTDGSAITSPTKEGHLNAGMGIVYFINKDGNLQKQQEWSISLGNHTAQFAEIAAFEFALKKCLPLGGNILVVTDSNYVAKAYNEELDVWASNGFVNNRKKPLKHISKWKSVADLKRLRPDVVVTHEPGHQKLDSSPHAYGNNLADQLATQASFKVHAGKRTADGSEFEKRTADGSEFESPKKKAKVE

SEQ ID NO: 789 - protein, 2073 aa, synthetic construct
MPAAKRVKLDGGDKKYSIGLDIGTNSVGWAVITDEYKVPSKKFKVLGNTDRHSIKKNLIGALLFDSGETAEATRLKRTARRRYTRRKNRICYLQEIFSNEMAKVDDSFFHRLEESFLVEEDKKHERHPIFGNIVDEVAYHEKYPTIYHLRKKLVDSTDKADLRLIYLALAHMIKFRGHFLIEGDLNPDNSDVDKLFIQLVQTYNQLFEENPINASGVDAKAILSARLSKSRRLENLIAQLPGEKKNGLFGNLIALSLGLTPNFKSNFDLAEDAKLQLSKDTYDDDLDNLLAQIGDQYADLFLAAKNLSDAILLSDILRVNTEITKAPLSASMIKRYDEHHQDLTLLKALVRQQLPEKYKEIFFDQSKNGYAGYIDGGASQEEFYKFIKPILEKMDGTEELLVKLNREDLLRKQRTFDNGSIPHQIHLGELHAILRRQEDFYPFLKDNREKIEKILTFRIPYYVGPLARGNSRFAWMTRKSEETITPWNFEEVVDKGASAQSFIERMTNFDKNLPNEKVLPKHSLLYEYFTVYNELTKVKYVTEGMRKPAFLSGEQKKAIVDLLFKTNRKVTVKQLKEDYFKKIECFDSVEISGVEDRFNASLGTYHDLLKIIKDKDFLDNEENEDILEDIVLTLTLFEDREMIEERLKTYAHLFDDKVMKQLKRRRYTGWGRLSRKLINGIRDKQSGKTILDFLKSDGFANRNFMQLIHDDSLTFKEDIQKAQVSGQGDSLHEHIANLAGSPAIKKGILQTVKVVDELVKVMGRHKPENIVIEMARENQTTQKGQKNSRERMKRIEEGIKELGSQILKEHPVENTQLQNEKLYLYYLQNGRDMYVDQELDINRLSDYDVDHIVPQSFLKDDSIDNKVLTRSDKARGKSDNVPSEEVVKKMKNYWRQLLNAKLITQRKFDNLTKAERGGLSELDKAGFIKRQLVETRQITKHVAQILDSRMNTKYDENDKLIREVKVITLKSKLVSDFRKDFQFYKVREINNYHHAHDAYLNAVVGTALIKKYPKLESEFVYGDYKVYDVRKMIAKSEQEIGKATAKYFFYSNIMNFFKTEITLANGEIRKRPLIETNGETGEIVWDKGRDFATVRKVLSMPQVNIVKKTEVQTGGFSKESILPKRNSDKLIARKKDWDPKKYGGFDSPTVAYSVLVVAKVEKGKSKKLKSVKELLGITIMERSSFEKNPIDFLEAKGYKEVKKDLIIKLPKYSLFELENGRKRMLASAGELQKGNELALPSKYVNFLYLASHYEKLKGSPEDNEQKQLFVEQHKHYLDEIIEQISEFSKRVILADANLDKVLSAYNKHRDKPIREQAENIIHLFTLTNLGAPAAFKYFDTTIDRKRYTSTKEVLDATLIHQSITGLYETRIDLSQLGGDGGPAPGGGGSSGGSCQTKNTLNIDEYLLQFPDQLWASLPTDIGRMLVPPITIKIKDNASLPSIRQYPLPKDKTEGLRPLISSLENQGILIKCHSPCNTPIFPIKKAGRDEYRMIHDLRAINNIVAPLTAVVASPTTVLSNLAPSLHWFTVIDLSNAFFSVPIHKDSQYLFAFTFEGHQYTWTVLPQGFIHSPTLFNQALYQSLHKIKFKISSEICIYMDDVLIASKDRDTNLKDTAVMLQHLASEGHKVSKKKLQLCQQEVVYLGQLLTPEGRKILPDRKVTVSQFQQPTTIRQIRAFLGKVGYCRHFIPEFSIHSKFLEKQLKPDTAEPFQLDDQQVEAFNKLKHAITTAPVLVVPDPAKPFQLYTSHSEHASIAVLTQKHAGRTRPIAFLSSKFDAIESGLPPCLKACASIHRSLTQADSFILGAPLIIYTTHAICTLLQRDRSQLVTASRFSKWEADLLRPELTFVACSAVSPAHLYMQSCENNIPPHDCVLLTHTISRPRPDLSDLPIPDPDMTLFSDGSYTTGRGGAAVVMHRPVTDDFIIIHQQPGGASAQTAELLALAAACHLATDKTVNIYTDSRYAYGVVHDFGHLWMHRGFVTSAGTPIKNHKEIEYLLKQIMKPKQVSVIKIEAHTKGVSMEVRGNAAADEAAKNAVFLVQRAGKRTADGSEFEKRTADGSEFESPKKKAKVE

SEQ ID NO: 790 - protein, 2094 aa, synthetic construct
MPAAKRVKLDGGDKKYSIGLDIGTNSVGWAVITDEYKVPSKKFKVLGNTDRHSIKKNLIGALLFDSGETAEATRLKRTARRRYTRRKNRICYLQEIFSNEMAKVDDSFFHRLEESFLVEEDKKHERHPIFGNIVDEVAYHEKYPTIYHLRKKLVDSTDKADLRLIYLALAHMIKFRGHFLIEGDLNPDNSDVDKLFIQLVQTYNQLFEENPINASGVDAKAILSARLSKSRRLENLIAQLPGEKKNGLFGNLIALSLGLTPNFKSNFDLAEDAKLQLSKDTYDDDLDNLLAQIGDQYADLFLAAKNLSDAILLSDILRVNTEITKAPLSASMIKRYDEHHQDLTLLKALVRQQLPEKYKEIFFDQSKNGYAGYIDGGASQEEFYKFIKPILEKMDGTEELLVKLNREDLLRKQRTFDNGSIPHQIHLGELHAILRRQEDFYPFLKDNREKIEKILTFRIPYYVGPLARGNSRFAWMTRKSEETITPWNFEEVVDKGASAQSFIERMTNFDKNLPNEKVLPKHSLLYEYFTVYNELTKVKYVTEGMRKPAFLSGEQKKAIVDLLFKTNRKVTVKQLKEDYFKKIECFDSVEISGVEDRFNASLGTYHDLLKIIKDKDFLDNEENEDILEDIVLTLTLFEDREMIEERLKTYAHLFDDKVMKQLKRRRYTGWGRLSRKLINGIRDKQSGKTILDFLKSDGFANRNFMQLIHDDSLTFKEDIQKAQVSGQGDSLHEHIANLAGSPAIKKGILQTVKVVDELVKVMGRHKPENIVIEMARENQTTQKGQKNSRERMKRIEEGIKELGSQILKEHPVENTQLQNEKLYLYYLQNGRDMYVDQELDINRLSDYDVDHIVPQSFLKDDSIDNKVLTRSDKARGKSDNVPSEEVVKKMKNYWRQLLNAKLITQRKFDNLTKAERGGLSELDKAGFIKRQLVETRQITKHVAQILDSRMNTKYDENDKLIREVKVITLKSKLVSDFRKDFQFYKVREINNYHHAHDAYLNAVVGTALIKKYPKLESEFVYGDYKVYDVRKMIAKSEQEIGKATAKYFFYSNIMNFFKTEITLANGEIRKRPLIETNGETGEIVWDKGRDFATVRKVLSMPQVNIVKKTEVQTGGFSKESILPKRNSDKLIARKKDWDPKKYGGFDSPTVAYSVLVVAKVEKGKSKKLKSVKELLGITIMERSSFEKNPIDFLEAKGYKEVKKDLIIKLPKYSLFELENGRKRMLASAGELQKGNELALPSKYVNFLYLASHYEKLKGSPEDNEQKQLFVEQHKHYLDEIIEQISEFSKRVILADANLDKVLSAYNKHRDKPIREQAENIIHLFTLTNLGAPAAFKYFDTTIDRKRYTSTKEVLDATLIHQSITGLYETRIDLSQLGGDGGGGGEAAAKPAPGGVLNLEEEYRLHEKPVPSSIDPSWLQLFPTVWAERAGMGLANQVPPVVVELRSGASPVAVRQYPMSKEAREGIRPHIQRFLDLGVLVPCQSPWNTPLLPVKKPGTNDYRPVQDLREINKRVQDIHPTVPNPYNLLSSLPPSHTWYSVLDLKDAFFCLKLHPNSQPLFAFEWRDPEKGNTGQLTWTRLPQGFKNSPTLFDEALHRDLAPFRALNPQVVLLQYVDDLLVAAPTYRDCKEGTQKLLQELSKLGYRVSAKKAQLCQKEVTYLGYLLKEGKRWLTPARKATVMKIPPPTTPRQVREFLGTAGFCRLWIPGFASLAAPLYPLTKESIPFIWTEEHQKAFDRIKEALLSAPALALPDLTKPFTLYVDERAGVARGVLTQTLGPWRRPVAYLSKKLDPVASGWPTCLKAVAAVALLLKDADKLTLGQNVTVIASHSLESIVRQPPDRWMTNARMTHYQSLLLNERVSFAPPAVLNPATLLPVESEATPVHRCSEILAEETGTRRDLKDQPLPGVPAWYTDGSSFIAEGKRRAGAAIVDGKRTVWASSLPEGTSAQKAELVALTQALRLAEGKDINIYTDSRYAFATAHIHGAIYKQRGLLTSAGKDIKNKEEILALLEAIHLPKRVAIIHCPGHQKGNDPVATGNRRADEAAKQAALSTRVLAETTKPAGKRTADGSEFEKRTADGSEFESPKKKAKVE

SEQ ID NO: 791 - protein, 2094 aa, synthetic construct
MPAAKRVKLDGGDKKYSIGLDIGTNSVGWAVITDEYKVPSKKFKVLGNTDRHSIKKNLIGALLFDSGETAEATRLKRTARRRYTRRKNRICYLQEIFSNEMAKVDDSFFHRLEESFLVEEDKKHERHPIFGNIVDEVAYHEKYPTIYHLRKKLVDSTDKADLRLIYLALAHMIKFRGHFLIEGDLNPDNSDVDKLFIQLVQTYNQLFEENPINASGVDAKAILSARLSKSRRLENLIAQLPGEKKNGLFGNLIALSLGLTPNFKSNFDLAEDAKLQLSKDTYDDDLDNLLAQIGDQYADLFLAAKNLSDAILLSDILRVNTEITKAPLSASMIKRYDEHHQDLTLLKALVRQQLPEKYKEIFFDQSKNGYAGYIDGGASQEEFYKFIKPILEKMDGTEELLVKLNREDLLRKQRTFDNGSIPHQIHLGELHAILRRQEDFYPFLKDNREKIEKILTFRIPYYVGPLARGNSRFAWMTRKSEETITPWNFEEVVDKGASAQSFIERMTNFDKNLPNEKVLPKHSLLYEYFTVYNELTKVKYVTEGMRKPAFLSGEQKKAIVDLLFKTNRKVTVKQLKEDYFKKIECFDSVEISGVEDRFNASLGTYHDLLKIIKDKDFLDNEENEDILEDIVLTLTLFEDREMIEERLKTYAHLFDDKVMKQLKRRRYTGWGRLSRKLINGIRDKQSGKTILDFLKSDGFANRNFMQLIHDDSLTFKEDIQKAQVSGQGDSLHEHIANLAGSPAIKKGILQTVKVVDELVKVMGRHKPENIVIEMARENQTTQKGQKNSRERMKRIEEGIKELGSQILKEHPVENTQLQNEKLYLYYLQNGRDMYVDQELDINRLSDYDVDHIVPQSFLKDDSIDNKVLTRSDKARGKSDNVPSEEVVKKMKNYWRQLLNAKLITQRKFDNLTKAERGGLSELDKAGFIKRQLVETRQITKHVAQILDSRMNTKYDENDKLIREVKVITLKSKLVSDFRKDFQFYKVREINNYHHAHDAYLNAVVGTALIKKYPKLESEFVYGDYKVYDVRKMIAKSEQEIGKATAKYFFYSNIMNFFKTEITLANGEIRKRPLIETNGETGEIVWDKGRDFATVRKVLSMPQVNIVKKTEVQTGGFSKESILPKRNSDKLIARKKDWDPKKYGGFDSPTVAYSVLVVAKVEKGKSKKLKSVKELLGITIMERSSFEKNPIDFLEAKGYKEVKKDLIIKLPKYSLFELENGRKRMLASAGELQKGNELALPSKYVNFLYLASHYEKLKGSPEDNEQKQLFVEQHKHYLDEIIEQISEFSKRVILADANLDKVLSAYNKHRDKPIREQAENIIHLFTLTNLGAPAAFKYFDTTIDRKRYTSTKEVLDATLIHQSITGLYETRIDLSQLGGDGGGSSGGGEAAAKGGVLNLEEEYRLHEKPVPSSIDPSWLQLFPTVWAERAGMGLANQVPPVVVELRSGASPVAVRQYPMSKEAREGIRPHIQRFLDLGVLVPCQSPWNTPLLPVKKPGTNDYRPVQDLREINKRVQDIHPTVPNPYNLLSSLPPSHTWYSVLDLKDAFFCLKLHPNSQPLFAFEWRDPEKGNTGQLTWTRLPQGFKNSPTLFDEALHRDLAPFRALNPQVVLLQYVDDLLVAAPTYRDCKEGTQKLLQELSKLGYRVSAKKAQLCQKEVTYLGYLLKEGKRWLTPARKATVMKIPPPTTPRQVREFLGTAGFCRLWIPGFASLAAPLYPLTKESIPFIWTEEHQKAFDRIKEALLSAPALALPDLTKPFTLYVDERAGVARGVLTQTLGPWRRPVAYLSKKLDPVASGWPTCLKAVAAVALLLKDADKLTLGQNVTVIASHSLESIVRQPPDRWMTNARMTHYQSLLLNERVSFAPPAVLNPATLLPVESEATPVHRCSEILAEETGTRRDLKDQPLPGVPAWYTDGSSFIAEGKRRAGAAIVDGKRTVWASSLPEGTSAQKAELVALTQALRLAEGKDINIYTDSRYAFATAHIHGAIYKQRGLLTSAGKDIKNKEEILALLEAIHLPKRVAIIHCPGHQKGNDPVATGNRRADEAAKQAALSTRVLAETTKPAGKRTADGSEFEKRTADGSEFESPKKKAKVE

SEQ ID NO: 792 - protein, 2092 aa, synthetic construct
MPAAKRVKLDGGDKKYSIGLDIGTNSVGWAVITDEYKVPSKKFKVLGNTDRHSIKKNLIGALLFDSGETAEATRLKRTARRRYTRRKNRICYLQEIFSNEMAKVDDSFFHRLEESFLVEEDKKHERHPIFGNIVDEVAYHEKYPTIYHLRKKLVDSTDKADLRLIYLALAHMIKFRGHFLIEGDLNPDNSDVDKLFIQLVQTYNQLFEENPINASGVDAKAILSARLSKSRRLENLIAQLPGEKKNGLFGNLIALSLGLTPNFKSNFDLAEDAKLQLSKDTYDDDLDNLLAQIGDQYADLFLAAKNLSDAILLSDILRVNTEITKAPLSASMIKRYDEHHQDLTLLKALVRQQLPEKYKEIFFDQSKNGYAGYIDGGASQEEFYKFIKPILEKMDGTEELLVKLNREDLLRKQRTFDNGSIPHQIHLGELHAILRRQEDFYPFLKDNREKIEKILTFRIPYYVGPLARGNSRFAWMTRKSEETITPWNFEEVVDKGASAQSFIERMTNFDKNLPNEKVLPKHSLLYEYFTVYNELTKVKYVTEGMRKPAFLSGEQKKAIVDLLFKTNRKVTVKQLKEDYFKKIECFDSVEISGVEDRFNASLGTYHDLLKIIKDKDFLDNEENEDILEDIVLTLTLFEDREMIEERLKTYAHLFDDKVMKQLKRRRYTGWGRLSRKLINGIRDKQSGKTILDFLKSDGFANRNFMQLIHDDSLTFKEDIQKAQVSGQGDSLHEHIANLAGSPAIKKGILQTVKVVDELVKVMGRHKPENIVIEMARENQTTQKGQKNSRERMKRIEEGIKELGSQILKEHPVENTQLQNEKLYLYYLQNGRDMYVDQELDINRLSDYDVDHIVPQSFLKDDSIDNKVLTRSDKARGKSDNVPSEEVVKKMKNYWRQLLNAKLITQRKFDNLTKAERGGLSELDKAGFIKRQLVETRQITKHVAQILDSRMNTKYDENDKLIREVKVITLKSKLVSDFRKDFQFYKVREINNYHHAHDAYLNAVVGTALIKKYPKLESEFVYGDYKVYDVRKMIAKSEQEIGKATAKYFFYSNIMNFFKTEITLANGEIRKRPLIETNGETGEIVWDKGRDFATVRKVLSMPQVNIVKKTEVQTGGFSKESILPKRNSDKLIARKKDWDPKKYGGFDSPTVAYSVLVVAKVEKGKSKKLKSVKELLGITIMERSSFEKNPIDFLEAKGYKEVKKDLIIKLPKYSLFELENGRKRMLASAGELQKGNELALPSKYVNFLYLASHYEKLKGSPEDNEQKQLFVEQHKHYLDEIIEQISEFSKRVILADANLDKVLSAYNKHRDKPIREQAENIIHLFTLTNLGAPAAFKYFDTTIDRKRYTSTKEVLDATLIHQSITGLYETRIDLSQLGGDGGGGSGGGGSSGGVLNLEEEYRLHEKPVPSSIDPSWLQLFPTVWAERAGMGLANQVPPVVVELRSGASPVAVRQYPMSKEAREGIRPHIQRFLDLGVLVPCQSPWNTPLLPVKKPGTNDYRPVQDLREINKRVQDIHPTVPNPYNLLSSLPPSHTWYSVLDLKDAFFCLKLHPNSQPLFAFEWRDPEKGNTGQLTWTRLPQGFKNSPTLFDEALHRDLAPFRALNPQVVLLQYVDDLLVAAPTYRDCKEGTQKLLQELSKLGYRVSAKKAQLCQKEVTYLGYLLKEGKRWLTPARKATVMKIPPPTTPRQVREFLGTAGFCRLWIPGFASLAAPLYPLTKESIPFIWTEEHQKAFDRIKEALLSAPALALPDLTKPFTLYVDERAGVARGVLTQTLGPWRRPVAYLSKKLDPVASGWPTCLKAVAAVALLLKDADKLTLGQNVTVIASHSLESIVRQPPDRWMTNARMTHYQSLLLNERVSFAPPAVLNPATLLPVESEATPVHRCSEILAEETGTRRDLKDQPLPGVPAWYTDGSSFIAEGKRRAGAAIVDGKRTVWASSLPEGTSAQKAELVALTQALRLAEGKDINIYTDSRYAFATAHIHGAIYKQRGLLTSAGKDIKNKEEILALLEAIHLPKRVAIIHCPGHQKGNDPVATGNRRADEAAKQAALSTRVLAETTKPAGKRTADGSEFEKRTADGSEFESPKKKAKVE

SEQ ID NO: 793 - protein, 2094 aa, synthetic construct
MPAAKRVKLDGGDKKYSIGLDIGTNSVGWAVITDEYKVPSKKFKVLGNTDRHSIKKNLIGALLFDSGETAEATRLKRTARRRYTRRKNRICYLQEIFSNEMAKVDDSFFHRLEESFLVEEDKKHERHPIFGNIVDEVAYHEKYPTIYHLRKKLVDSTDKADLRLIYLALAHMIKFRGHFLIEGDLNPDNSDVDKLFIQLVQTYNQLFEENPINASGVDAKAILSARLSKSRRLENLIAQLPGEKKNGLFGNLIALSLGLTPNFKSNFDLAEDAKLQLSKDTYDDDLDNLLAQIGDQYADLFLAAKNLSDAILLSDILRVNTEITKAPLSASMIKRYDEHHQDLTLLKALVRQQLPEKYKEIFFDQSKNGYAGYIDGGASQEEFYKFIKPILEKMDGTEELLVKLNREDLLRKQRTFDNGSIPHQIHLGELHAILRRQEDFYPFLKDNREKIEKILTFRIPYYVGPLARGNSRFAWMTRKSEETITPWNFEEVVDKGASAQSFIERMTNFDKNLPNEKVLPKHSLLYEYFTVYNELTKVKYVTEGMRKPAFLSGEQKKAIVDLLFKTNRKVTVKQLKEDYFKKIECFDSVEISGVEDRFNASLGTYHDLLKIIKDKDFLDNEENEDILEDIVLTLTLFEDREMIEERLKTYAHLFDDKVMKQLKRRRYTGWGRLSRKLINGIRDKQSGKTILDFLKSDGFANRNFMQLIHDDSLTFKEDIQKAQVSGQGDSLHEHIANLAGSPAIKKGILQTVKVVDELVKVMGRHKPENIVIEMARENQTTQKGQKNSRERMKRIEEGIKELGSQILKEHPVENTQLQNEKLYLYYLQNGRDMYVDQELDINRLSDYDVDHIVPQSFLKDDSIDNKVLTRSDKARGKSDNVPSEEVVKKMKNYWRQLLNAKLITQRKFDNLTKAERGGLSELDKAGFIKRQLVETRQITKHVAQILDSRMNTKYDENDKLIREVKVITLKSKLVSDFRKDFQFYKVREINNYHHAHDAYLNAVVGTALIKKYPKLESEFVYGDYKVYDVRKMIAKSEQEIGKATAKYFFYSNIMNFFKTEITLANGEIRKRPLIETNGETGEIVWDKGRDFATVRKVLSMPQVNIVKKTEVQTGGFSKESILPKRNSDKLIARKKDWDPKKYGGFDSPTVAYSVLVVAKVEKGKSKKLKSVKELLGITIMERSSFEKNPIDFLEAKGYKEVKKDLIIKLPKYSLFELENGRKRMLASAGELQKGNELALPSKYVNFLYLASHYEKLKGSPEDNEQKQLFVEQHKHYLDEIIEQISEFSKRVILADANLDKVLSAYNKHRDKPIREQAENIIHLFTLTNLGAPAAFKYFDTTIDRKRYTSTKEVLDATLIHQSITGLYETRIDLSQLGGDGGPAPGSSEAAAKGGVLNLEEEYRLHEKPVPSSIDPSWLQLFPTVWAERAGMGLANQVPPVVVELRSGASPVAVRQYPMSKEAREGIRPHIQRFLDLGVLVPCQSPWNTPLLPVKKPGTNDYRPVQDLREINKRVQDIHPTVPNPYNLLSSLPPSHTWYSVLDLKDAFFCLKLHPNSQPLFAFEWRDPEKGNTGQLTWTRLPQGFKNSPTLFDEALHRDLAPFRALNPQVVLLQYVDDLLVAAPTYRDCKEGTQKLLQELSKLGYRVSAKKAQLCQKEVTYLGYLLKEGKRWLTPARKATVMKIPPPTTPRQVREFLGTAGFCRLWIPGFASLAAPLYPLTKESIPFIWTEEHQKAFDRIKEALLSAPALALPDLTKPFTLYVDERAGVARGVLTQTLGPWRRPVAYLSKKLDPVASGWPTCLKAVAAVALLLKDADKLTLGQNVTVIASHSLESIVRQPPDRWMTNARMTHYQSLLLNERVSFAPPAVLNPATLLPVESEATPVHRCSEILAEETGTRRDLKDQPLPGVPAWYTDGSSFIAEGKRRAGAAIVDGKRTVWASSLPEGTSAQKAELVALTQALRLAEGKDINIYTDSRYAFATAHIHGAIYKQRGLLTSAGKDIKNKEEILALLEAIHLPKRVAIIHCPGHQKGNDPVATGNRRADEAAKQAALSTRVLAETTKPAGKRTADGSEFEKRTADGSEFESPKKKAKVE

SEQ ID NO: 794 - protein, 2092 aa, synthetic construct
MPAAKRVKLDGGDKKYSIGLDIGTNSVGWAVITDEYKVPSKKFKVLGNTDRHSIKKNLIGALLFDSGETAEATRLKRTARRRYTRRKNRICYLQEIFSNEMAKVDDSFFHRLEESFLVEEDKKHERHPIFGNIVDEVAYHEKYPTIYHLRKKLVDSTDKADLRLIYLALAHMIKFRGHFLIEGDLNPDNSDVDKLFIQLVQTYNQLFEENPINASGVDAKAILSARLSKSRRLENLIAQLPGEKKNGLFGNLIALSLGLTPNFKSNFDLAEDAKLQLSKDTYDDDLDNLLAQIGDQYADLFLAAKNLSDAILLSDILRVNTEITKAPLSASMIKRYDEHHQDLTLLKALVRQQLPEKYKEIFFDQSKNGYAGYIDGGASQEEFYKFIKPILEKMDGTEELLVKLNREDLLRKQRTFDNGSIPHQIHLGELHAILRRQEDFYPFLKDNREKIEKILTFRIPYYVGPLARGNSRFAWMTRKSEETITPWNFEEVVDKGASAQSFIERMTNFDKNLPNEKVLPKHSLLYEYFTVYNELTKVKYVTEGMRKPAFLSGEQKKAIVDLLFKTNRKVTVKQLKEDYFKKIECFDSVEISGVEDRFNASLGTYHDLLKIIKDKDFLDNEENEDILEDIVLTLTLFEDREMIEERLKTYAHLFDDKVMKQLKRRRYTGWGRLSRKLINGIRDKQSGKTILDFLKSDGFANRNFMQLIHDDSLTFKEDIQKAQVSGQGDSLHEHIANLAGSPAIKKGILQTVKVVDELVKVMGRHKPENIVIEMARENQTTQKGQKNSRERMKRIEEGIKELGSQILKEHPVENTQLQNEKLYLYYLQNGRDMYVDQELDINRLSDYDVDHIVPQSFLKDDSIDNKVLTRSDKARGKSDNVPSEEVVKKMKNYWRQLLNAKLITQRKFDNLTKAERGGLSELDKAGFIKRQLVETRQITKHVAQILDSRMNTKYDENDKLIREVKVITLKSKLVSDFRKDFQFYKVREINNYHHAHDAYLNAVVGTALIKKYPKLESEFVYGDYKVYDVRKMIAKSEQEIGKATAKYFFYSNIMNFFKTEITLANGEIRKRPLIETNGETGEIVWDKGRDFATVRKVLSMPQVNIVKKTEVQTGGFSKESILPKRNSDKLIARKKDWDPKKYGGFDSPTVAYSVLVVAKVEKGKSKKLKSVKELLGITIMERSSFEKNPIDFLEAKGYKEVKKDLIIKLPKYSLFELENGRKRMLASAGELQKGNELALPSKYVNFLYLASHYEKLKGSPEDNEQKQLFVEQHKHYLDEIIEQISEFSKRVILADANLDKVLSAYNKHRDKPIREQAENIIHLFTLTNLGAPAAFKYFDTTIDRKRYTSTKEVLDATLIHQSITGLYETRIDLSQLGGDGGGGSGSSPAPGGVLNLEEEYRLHEKPVPSSIDPSWLQLFPTVWAERAGMGLANQVPPVVVELRSGASPVAVRQYPMSKEAREGIRPHIQRFLDLGVLVPCQSPWNTPLLPVKKPGTNDYRPVQDLREINKRVQDIHPTVPNPYNLLSSLPPSHTWYSVLDLKDAFFCLKLHPNSQPLFAFEWRDPEKGNTGQLTWTRLPQGFKNSPTLFDEALHRDLAPFRALNPQVVLLQYVDDLLVAAPTYRDCKEGTQKLLQELSKLGYRVSAKKAQLCQKEVTYLGYLLKEGKRWLTPARKATVMKIPPPTTPRQVREFLGTAGFCRLWIPGFASLAAPLYPLTKESIPFIWTEEHQKAFDRIKEALLSAPALALPDLTKPFTLYVDERAGVARGVLTQTLGPWRRPVAYLSKKLDPVASGWPTCLKAVAAVALLLKDADKLTLGQNVTVIASHSLESIVRQPPDRWMTNARMTHYQSLLLNERVSFAPPAVLNPATLLPVESEATPVHRCSEILAEETGTRRDLKDQPLPGVPAWYTDGSSFIAEGKRRAGAAIVDGKRTVWASSLPEGTSAQKAELVALTQALRLAEGKDINIYTDSRYAFATAHIHGAIYKQRGLLTSAGKDIKNKEEILALLEAIHLPKRVAIIHCPGHQKGNDPVATGNRRADEAAKQAALSTRVLAETTKPAGKRTADGSEFEKRTADGSEFESPKKKAKVE

SEQ ID NO: 795 - protein, 2096 aa, synthetic construct
MPAAKRVKLDGGDKKYSIGLDIGTNSVGWAVITDEYKVPSKKFKVLGNTDRHSIKKNLIGALLFDSGETAEATRLKRTARRRYTRRKNRICYLQEIFSNEMAKVDDSFFHRLEESFLVEEDKKHERHPIFGNIVDEVAYHEKYPTIYHLRKKLVDSTDKADLRLIYLALAHMIKFRGHFLIEGDLNPDNSDVDKLFIQLVQTYNQLFEENPINASGVDAKAILSARLSKSRRLENLIAQLPGEKKNGLFGNLIALSLGLTPNFKSNFDLAEDAKLQLSKDTYDDDLDNLLAQIGDQYADLFLAAKNLSDAILLSDILRVNTEITKAPLSASMIKRYDEHHQDLTLLKALVRQQLPEKYKEIFFDQSKNGYAGYIDGGASQEEFYKFIKPILEKMDGTEELLVKLNREDLLRKQRTFDNGSIPHQIHLGELHAILRRQEDFYPFLKDNREKIEKILTFRIPYYVGPLARGNSRFAWMTRKSEETITPWNFEEVVDKGASAQSFIERMTNFDKNLPNEKVLPKHSLLYEYFTVYNELTKVKYVTEGMRKPAFLSGEQKKAIVDLLFKTNRKVTVKQLKEDYFKKIECFDSVEISGVEDRFNASLGTYHDLLKIIKDKDFLDNEENEDILEDIVLTLTLFEDREMIEERLKTYAHLFDDKVMKQLKRRRYTGWGRLSRKLINGIRDKQSGKTILDFLKSDGFANRNFMQLIHDDSLTFKEDIQKAQVSGQGDSLHEHIANLAGSPAIKKGILQTVKVVDELVKVMGRHKPENIVIEMARENQTTQKGQKNSRERMKRIEEGIKELGSQILKEHPVENTQLQNEKLYLYYLQNGRDMYVDQELDINRLSDYDVDHIVPQSFLKDDSIDNKVLTRSDKARGKSDNVPSEEVVKKMKNYWRQLLNAKLITQRKFDNLTKAERGGLSELDKAGFIKRQLVETRQITKHVAQILDSRMNTKYDENDKLIREVKVITLKSKLVSDFRKDFQFYKVREINNYHHAHDAYLNAVVGTALIKKYPKLESEFVYGDYKVYDVRKMIAKSEQEIGKATAKYFFYSNIMNFFKTEITLANGEIRKRPLIETNGETGEIVWDKGRDFATVRKVLSMPQVNIVKKTEVQTGGFSKESILPKRNSDKLIARKKDWDPKKYGGFDSPTVAYSVLVVAKVEKGKSKKLKSVKELLGITIMERSSFEKNPIDFLEAKGYKEVKKDLIIKLPKYSLFELENGRKRMLASAGELQKGNELALPSKYVNFLYLASHYEKLKGSPEDNEQKQLFVEQHKHYLDEIIEQISEFSKRVILADANLDKVLSAYNKHRDKPIREQAENIIHLFTLTNLGAPAAFKYFDTTIDRKRYTSTKEVLDATLIHQSITGLYETRIDLSQLGGDGGPAPAPAPAPAPAPGGVLNLEEEYRLHEKPVPSSIDPSWLQLFPTVWAERAGMGLANQVPPVVVELRSGASPVAVRQYPMSKEAREGIRPHIQRFLDLGVLVPCQSPWNTPLLPVKKPGTNDYRPVQDLREINKRVQDIHPTVPNPYNLLSSLPPSHTWYSVLDLKDAFFCLKLHPNSQPLFAFEWRDPEKGNTGQLTWTRLPQGFKNSPTLFDEALHRDLAPFRALNPQVVLLQYVDDLLVAAPTYRDCKEGTQKLLQELSKLGYRVSAKKAQLCQKEVTYLGYLLKEGKRWLTPARKATVMKIPPPTTPRQVREFLGTAGFCRLWIPGFASLAAPLYPLTKESIPFIWTEEHQKAFDRIKEALLSAPALALPDLTKPFTLYVDERAGVARGVLTQTLGPWRRPVAYLSKKLDPVASGWPTCLKAVAAVALLLKDADKLTLGQNVTVIASHSLESIVRQPPDRWMTNARMTHYQSLLLNERVSFAPPAVLNPATLLPVESEATPVHRCSEILAEETGTRRDLKDQPLPGVPAWYTDGSSFIAEGKRRAGAAIVDGKRTVWASSLPEGTSAQKAELVALTQALRLAEGKDINIYTDSRYAFATAHIHGAIYKQRGLLTSAGKDIKNKEEILALLEAIHLPKRVAIIHCPGHQKGNDPVATGNRRADEAAKQAALSTRVLAETTKPAGKRTADGSEFEKRTADGSEFESPKKKAKVE

SEQ ID NO: 796 - protein, 2094 aa, synthetic construct
MPAAKRVKLDGGDKKYSIGLDIGTNSVGWAVITDEYKVPSKKFKVLGNTDRHSIKKNLIGALLFDSGETAEATRLKRTARRRYTRRKNRICYLQEIFSNEMAKVDDSFFHRLEESFLVEEDKKHERHPIFGNIVDEVAYHEKYPTIYHLRKKLVDSTDKADLRLIYLALAHMIKFRGHFLIEGDLNPDNSDVDKLFIQLVQTYNQLFEENPINASGVDAKAILSARLSKSRRLENLIAQLPGEKKNGLFGNLIALSLGLTPNFKSNFDLAEDAKLQLSKDTYDDDLDNLLAQIGDQYADLFLAAKNLSDAILLSDILRVNTEITKAPLSASMIKRYDEHHQDLTLLKALVRQQLPEKYKEIFFDQSKNGYAGYIDGGASQEEFYKFIKPILEKMDGTEELLVKLNREDLLRKQRTFDNGSIPHQIHLGELHAILRRQEDFYPFLKDNREKIEKILTFRIPYYVGPLARGNSRFAWMTRKSEETITPWNFEEVVDKGASAQSFIERMTNFDKNLPNEKVLPKHSLLYEYFTVYNELTKVKYVTEGMRKPAFLSGEQKKAIVDLLFKTNRKVTVKQLKEDYFKKIECFDSVEISGVEDRFNASLGTYHDLLKIIKDKDFLDNEENEDILEDIVLTLTLFEDREMIEERLKTYAHLFDDKVMKQLKRRRYTGWGRLSRKLINGIRDKQSGKTILDFLKSDGFANRNFMQLIHDDSLTFKEDIQKAQVSGQGDSLHEHIANLAGSPAIKKGILQTVKVVDELVKVMGRHKPENIVIEMARENQTTQKGQKNSRERMKRIEEGIKELGSQILKEHPVENTQLQNEKLYLYYLQNGRDMYVDQELDINRLSDYDVDHIVPQSFLKDDSIDNKVLTRSDKARGKSDNVPSEEVVKKMKNYWRQLLNAKLITQRKFDNLTKAERGGLSELDKAGFIKRQLVETRQITKHVAQILDSRMNTKYDENDKLIREVKVITLKSKLVSDFRKDFQFYKVREINNYHHAHDAYLNAVVGTALIKKYPKLESEFVYGDYKVYDVRKMIAKSEQEIGKATAKYFFYSNIMNFFKTEITLANGEIRKRPLIETNGETGEIVWDKGRDFATVRKVLSMPQVNIVKKTEVQTGGFSKESILPKRNSDKLIARKKDWDPKKYGGFDSPTVAYSVLVVAKVEKGKSKKLKSVKELLGITIMERSSFEKNPIDFLEAKGYKEVKKDLIIKLPKYSLFELENGRKRMLASAGELQKGNELALPSKYVNFLYLASHYEKLKGSPEDNEQKQLFVEQHKHYLDEIIEQISEFSKRVILADANLDKVLSAYNKHRDKPIREQAENIIHLFTLTNLGAPAAFKYFDTTIDRKRYTSTKEVLDATLIHQSITGLYETRIDLSQLGGDGGGGSGGGEAAAKGGVLNLEEEYRLHEKPVPSSIDPSWLQLFPTVWAERAGMGLANQVPPVVVELRSGASPVAVRQYPMSKEAREGIRPHIQRFLDLGVLVPCQSPWNTPLLPVKKPGTNDYRPVQDLREINKRVQDIHPTVPNPYNLLSSLPPSHTWYSVLDLKDAFFCLKLHPNSQPLFAFEWRDPEKGNTGQLTWTRLPQGFKNSPTLFDEALHRDLAPFRALNPQVVLLQYVDDLLVAAPTYRDCKEGTQKLLQELSKLGYRVSAKKAQLCQKEVTYLGYLLKEGKRWLTPARKATVMKIPPPTTPRQVREFLGTAGFCRLWIPGFASLAAPLYPLTKESIPFIWTEEHQKAFDRIKEALLSAPALALPDLTKPFTLYVDERAGVARGVLTQTLGPWRRPVAYLSKKLDPVASGWPTCLKAVAAVALLLKDADKLTLGQNVTVIASHSLESIVRQPPDRWMTNARMTHYQSLLLNERVSFAPPAVLNPATLLPVESEATPVHRCSEILAEETGTRRDLKDQPLPGVPAWYTDGSSFIAEGKRRAGAAIVDGKRTVWASSLPEGTSAQKAELVALTQALRLAEGKDINIYTDSRYAFATAHIHGAIYKQRGLLTSAGKDIKNKEEILALLEAIHLPKRVAIIHCPGHQKGNDPVATGNRRADEAAKQAALSTRVLAETTKPAGKRTADGSEFEKRTADGSEFESPKKKAKVE

SEQ ID NO: 797 - protein, 2092 aa, synthetic construct
MPAAKRVKLDGGDKKYSIGLDIGTNSVGWAVITDEYKVPSKKFKVLGNTDRHSIKKNLIGALLFDSGETAEATRLKRTARRRYTRRKNRICYLQEIFSNEMAKVDDSFFHRLEESFLVEEDKKHERHPIFGNIVDEVAYHEKYPTIYHLRKKLVDSTDKADLRLIYLALAHMIKFRGHFLIEGDLNPDNSDVDKLFIQLVQTYNQLFEENPINASGVDAKAILSARLSKSRRLENLIAQLPGEKKNGLFGNLIALSLGLTPNFKSNFDLAEDAKLQLSKDTYDDDLDNLLAQIGDQYADLFLAAKNLSDAILLSDILRVNTEITKAPLSASMIKRYDEHHQDLTLLKALVRQQLPEKYKEIFFDQSKNGYAGYIDGGASQEEFYKFIKPILEKMDGTEELLVKLNREDLLRKQRTFDNGSIPHQIHLGELHAILRRQEDFYPFLKDNREKIEKILTFRIPYYVGPLARGNSRFAWMTRKSEETITPWNFEEVVDKGASAQSFIERMTNFDKNLPNEKVLPKHSLLYEYFTVYNELTKVKYVTEGMRKPAFLSGEQKKAIVDLLFKTNRKVTVKQLKEDYFKKIECFDSVEISGVEDRFNASLGTYHDLLKIIKDKDFLDNEENEDILEDIVLTLTLFEDREMIEERLKTYAHLFDDKVMKQLKRRRYTGWGRLSRKLINGIRDKQSGKTILDFLKSDGFANRNFMQLIHDDSLTFKEDIQKAQVSGQGDSLHEHIANLAGSPAIKKGILQTVKVVDELVKVMGRHKPENIVIEMARENQTTQKGQKNSRERMKRIEEGIKELGSQILKEHPVENTQLQNEKLYLYYLQNGRDMYVDQELDINRLSDYDVDHIVPQSFLKDDSIDNKVLTRSDKARGKSDNVPSEEVVKKMKNYWRQLLNAKLITQRKFDNLTKAERGGLSELDKAGFIKRQLVETRQITKHVAQILDSRMNTKYDENDKLIREVKVITLKSKLVSDFRKDFQFYKVREINNYHHAHDAYLNAVVGTALIKKYPKLESEFVYGDYKVYDVRKMIAKSEQEIGKATAKYFFYSNIMNFFKTEITLANGEIRKRPLIETNGETGEIVWDKGRDFATVRKVLSMPQVNIVKKTEVQTGGFSKESILPKRNSDKLIARKKDWDPKKYGGFDSPTVAYSVLVVAKVEKGKSKKLKSVKELLGITIMERSSFEKNPIDFLEAKGYKEVKKDLIIKLPKYSLFELENGRKRMLASAGELQKGNELALPSKYVNFLYLASHYEKLKGSPEDNEQKQLFVEQHKHYLDEIIEQISEFSKRVILADANLDKVLSAYNKHRDKPIREQAENIIHLFTLTNLGAPAAFKYFDTTIDRKRYTSTKEVLDATLIHQSITGLYETRIDLSQLGGDGGGGGPAPGSSGGVLNLEEEYRLHEKPVPSSIDPSWLQLFPTVWAERAGMGLANQVPPVVVELRSGASPVAVRQYPMSKEAREGIRPHIQRFLDLGVLVPCQSPWNTPLLPVKKPGTNDYRPVQDLREINKRVQDIHPTVPNPYNLLSSLPPSHTWYSVLDLKDAFFCLKLHPNSQPLFAFEWRDPEKGNTGQLTWTRLPQGFKNSPTLFDEALHRDLAPFRALNPQVVLLQYVDDLLVAAPTYRDCKEGTQKLLQELSKLGYRVSAKKAQLCQKEVTYLGYLLKEGKRWLTPARKATVMKIPPPTTPRQVREFLGTAGFCRLWIPGFASLAAPLYPLTKESIPFIWTEEHQKAFDRIKEALLSAPALALPDLTKPFTLYVDERAGVARGVLTQTLGPWRRPVAYLSKKLDPVASGWPTCLKAVAAVALLLKDADKLTLGQNVTVIASHSLESIVRQPPDRWMTNARMTHYQSLLLNERVSFAPPAVLNPATLLPVESEATPVHRCSEILAEETGTRRDLKDQPLPGVPAWYTDGSSFIAEGKRRAGAAIVDGKRTVWASSLPEGTSAQKAELVALTQALRLAEGKDINIYTDSRYAFATAHIHGAIYKQRGLLTSAGKDIKNKEEILALLEAIHLPKRVAIIHCPGHQKGNDPVATGNRRADEAAKQAALSTRVLAETTKPAGKRTADGSEFEKRTADGSEFESPKKKAKVE

SEQ ID NO: 798 - protein, 2094 aa, synthetic construct
MPAAKRVKLDGGDKKYSIGLDIGTNSVGWAVITDEYKVPSKKFKVLGNTDRHSIKKNLIGALLFDSGETAEATRLKRTARRRYTRRKNRICYLQEIFSNEMAKVDDSFFHRLEESFLVEEDKKHERHPIFGNIVDEVAYHEKYPTIYHLRKKLVDSTDKADLRLIYLALAHMIKFRGHFLIEGDLNPDNSDVDKLFIQLVQTYNQLFEENPINASGVDAKAILSARLSKSRRLENLIAQLPGEKKNGLFGNLIALSLGLTPNFKSNFDLAEDAKLQLSKDTYDDDLDNLLAQIGDQYADLFLAAKNLSDAILLSDILRVNTEITKAPLSASMIKRYDEHHQDLTLLKALVRQQLPEKYKEIFFDQSKNGYAGYIDGGASQEEFYKFIKPILEKMDGTEELLVKLNREDLLRKQRTFDNGSIPHQIHLGELHAILRRQEDFYPFLKDNREKIEKILTFRIPYYVGPLARGNSRFAWMTRKSEETITPWNFEEVVDKGASAQSFIERMTNFDKNLPNEKVLPKHSLLYEYFTVYNELTKVKYVTEGMRKPAFLSGEQKKAIVDLLFKTNRKVTVKQLKEDYFKKIECFDSVEISGVEDRFNASLGTYHDLLKIIKDKDFLDNEENEDILEDIVLTLTLFEDREMIEERLKTYAHLFDDKVMKQLKRRRYTGWGRLSRKLINGIRDKQSGKTILDFLKSDGFANRNFMQLIHDDSLTFKEDIQKAQVSGQGDSLHEHIANLAGSPAIKKGILQTVKVVDELVKVMGRHKPENIVIEMARENQTTQKGQKNSRERMKRIEEGIKELGSQILKEHPVENTQLQNEKLYLYYLQNGRDMYVDQELDINRLSDYDVDHIVPQSFLKDDSIDNKVLTRSDKARGKSDNVPSEEVVKKMKNYWRQLLNAKLITQRKFDNLTKAERGGLSELDKAGFIKRQLVETRQITKHVAQILDSRMNTKYDENDKLIREVKVITLKSKLVSDFRKDFQFYKVREINNYHHAHDAYLNAVVGTALIKKYPKLESEFVYGDYKVYDVRKMIAKSEQEIGKATAKYFFYSNIMNFFKTEITLANGEIRKRPLIETNGETGEIVWDKGRDFATVRKVLSMPQVNIVKKTEVQTGGFSKESILPKRNSDKLIARKKDWDPKKYGGFDSPTVAYSVLVVAKVEKGKSKKLKSVKELLGITIMERSSFEKNPIDFLEAKGYKEVKKDLIIKLPKYSLFELENGRKRMLASAGELQKGNELALPSKYVNFLYLASHYEKLKGSPEDNEQKQLFVEQHKHYLDEIIEQISEFSKRVILADANLDKVLSAYNKHRDKPIREQAENIIHLFTLTNLGAPAAFKYFDTTIDRKRYTSTKEVLDATLIHQSITGLYETRIDLSQLGGDGGGGGGGSEAAAKGGVLNLEEEYRLHEKPVPSSIDPSWLQLFPTVWAERAGMGLANQVPPVVVELRSGASPVAVRQYPMSKEAREGIRPHIQRFLDLGVLVPCQSPWNTPLLPVKKPGTNDYRPVQDLREINKRVQDIHPTVPNPYNLLSSLPPSHTWYSVLDLKDAFFCLKLHPNSQPLFAFEWRDPEKGNTGQLTWTRLPQGFKNSPTLFDEALHRDLAPFRALNPQVVLLQYVDDLLVAAPTYRDCKEGTQKLLQELSKLGYRVSAKKAQLCQKEVTYLGYLLKEGKRWLTPARKATVMKIPPPTTPRQVREFLGTAGFCRLWIPGFASLAAPLYPLTKESIPFIWTEEHQKAFDRIKEALLSAPALALPDLTKPFTLYVDERAGVARGVLTQTLGPWRRPVAYLSKKLDPVASGWPTCLKAVAAVALLLKDADKLTLGQNVTVIASHSLESIVRQPPDRWMTNARMTHYQSLLLNERVSFAPPAVLNPATLLPVESEATPVHRCSEILAEETGTRRDLKDQPLPGVPAWYTDGSSFIAEGKRRAGAAIVDGKRTVWASSLPEGTSAQKAELVALTQALRLAEGKDINIYTDSRYAFATAHIHGAIYKQRGLLTSAGKDIKNKEEILALLEAIHLPKRVAIIHCPGHQKGNDPVATGNRRADEAAKQAALSTRVLAETTKPAGKRTADGSEFEKRTADGSEFESPKKKAKVE

SEQ ID NO: 799 - protein, 2108 aa, synthetic construct
MPAAKRVKLDGGDKKYSIGLDIGTNSVGWAVITDEYKVPSKKFKVLGNTDRHSIKKNLIGALLFDSGETAEATRLKRTARRRYTRRKNRICYLQEIFSNEMAKVDDSFFHRLEESFLVEEDKKHERHPIFGNIVDEVAYHEKYPTIYHLRKKLVDSTDKADLRLIYLALAHMIKFRGHFLIEGDLNPDNSDVDKLFIQLVQTYNQLFEENPINASGVDAKAILSARLSKSRRLENLIAQLPGEKKNGLFGNLIALSLGLTPNFKSNFDLAEDAKLQLSKDTYDDDLDNLLAQIGDQYADLFLAAKNLSDAILLSDILRVNTEITKAPLSASMIKRYDEHHQDLTLLKALVRQQLPEKYKEIFFDQSKNGYAGYIDGGASQEEFYKFIKPILEKMDGTEELLVKLNREDLLRKQRTFDNGSIPHQIHLGELHAILRRQEDFYPFLKDNREKIEKILTFRIPYYVGPLARGNSRFAWMTRKSEETITPWNFEEVVDKGASAQSFIERMTNFDKNLPNEKVLPKHSLLYEYFTVYNELTKVKYVTEGMRKPAFLSGEQKKAIVDLLFKTNRKVTVKQLKEDYFKKIECFDSVEISGVEDRFNASLGTYHDLLKIIKDKDFLDNEENEDILEDIVLTLTLFEDREMIEERLKTYAHLFDDKVMKQLKRRRYTGWGRLSRKLINGIRDKQSGKTILDFLKSDGFANRNFMQLIHDDSLTFKEDIQKAQVSGQGDSLHEHIANLAGSPAIKKGILQTVKVVDELVKVMGRHKPENIVIEMARENQTTQKGQKNSRERMKRIEEGIKELGSQILKEHPVENTQLQNEKLYLYYLQNGRDMYVDQELDINRLSDYDVDHIVPQSFLKDDSIDNKVLTRSDKARGKSDNVPSEEVVKKMKNYWRQLLNAKLITQRKFDNLTKAERGGLSELDKAGFIKRQLVETRQITKHVAQILDSRMNTKYDENDKLIREVKVITLKSKLVSDFRKDFQFYKVREINNYHHAHDAYLNAVVGTALIKKYPKLESEFVYGDYKVYDVRKMIAKSEQEIGKATAKYFFYSNIMNFFKTEITLANGEIRKRPLIETNGETGEIVWDKGRDFATVRKVLSMPQVNIVKKTEVQTGGFSKESILPKRNSDKLIARKKDWDPKKYGGFDSPTVAYSVLVVAKVEKGKSKKLKSVKELLGITIMERSSFEKNPIDFLEAKGYKEVKKDLIIKLPKYSLFELENGRKRMLASAGELQKGNELALPSKYVNFLYLASHYEKLKGSPEDNEQKQLFVEQHKHYLDEIIEQISEFSKRVILADANLDKVLSAYNKHRDKPIREQAENIIHLFTLTNLGAPAAFKYFDTTIDRKRYTSTKEVLDATLIHQSITGLYETRIDLSQLGGDGGEAAAKEAAAKEAAAKEAAAKEAAAKGGVLNLEEEYRLHEKPVPSSIDPSWLQLFPTVWAERAGMGLANQVPPVVVELRSGASPVAVRQYPMSKEAREGIRPHIQRFLDLGVLVPCQSPWNTPLLPVKKPGTNDYRPVQDLREINKRVQDIHPTVPNPYNLLSSLPPSHTWYSVLDLKDAFFCLKLHPNSQPLFAFEWRDPEKGNTGQLTWTRLPQGFKNSPTLFNEALHRDLAPFRALNPQVVLLQYVDDLLVAAPTYRDCKEGTQKLLQELSKLGYRVSAKKAQLCQKEVTYLGYLLKEGKRWLTPARKATVMKIPPPTTPRQVREFLGTAGFCRLWIPGFASLAAPLYPLTKPSIPFIWTEEHQKAFDRIKEALLSAPALALPDLTKPFTLYVDERAGVARGVLTQTLGPWRRPVAYLSKKLDPVASGWPTCLKAVAAVALLLKDADKLTLGQNVTVIASHSLESIVRQPPDRWMTNARMTHYQSLLLNERVSFAPPAVLNPATLLPVESEATPVHRCSEILAEETGTRRDLKDQPLPGVPAWYTDGSSFIAEGKRRAGAAIVDGKRTVWASSLPEGTSAQKAELVALTQALRLAEGKDINIYTDSRYAFATAHIHGAIYKQRGWLTSAGKDIKNKEEILALLEAIHLPKRVAIIHCPGHQKGNDPVATGNRRADEAAKQAALSTRVLAETTKPAGKRTADGSEFEKRTADGSEFESPKKKAKVE

SEQ ID NO: 800 - protein, 2094 aa, synthetic construct
MPAAKRVKLDGGDKKYSIGLDIGTNSVGWAVITDEYKVPSKKFKVLGNTDRHSIKKNLIGALLFDSGETAEATRLKRTARRRYTRRKNRICYLQEIFSNEMAKVDDSFFHRLEESFLVEEDKKHERHPIFGNIVDEVAYHEKYPTIYHLRKKLVDSTDKADLRLIYLALAHMIKFRGHFLIEGDLNPDNSDVDKLFIQLVQTYNQLFEENPINASGVDAKAILSARLSKSRRLENLIAQLPGEKKNGLFGNLIALSLGLTPNFKSNFDLAEDAKLQLSKDTYDDDLDNLLAQIGDQYADLFLAAKNLSDAILLSDILRVNTEITKAPLSASMIKRYDEHHQDLTLLKALVRQQLPEKYKEIFFDQSKNGYAGYIDGGASQEEFYKFIKPILEKMDGTEELLVKLNREDLLRKQRTFDNGSIPHQIHLGELHAILRRQEDFYPFLKDNREKIEKILTFRIPYYVGPLARGNSRFAWMTRKSEETITPWNFEEVVDKGASAQSFIERMTNFDKNLPNEKVLPKHSLLYEYFTVYNELTKVKYVTEGMRKPAFLSGEQKKAIVDLLFKTNRKVTVKQLKEDYFKKIECFDSVEISGVEDRFNASLGTYHDLLKIIKDKDFLDNEENEDILEDIVLTLTLFEDREMIEERLKTYAHLFDDKVMKQLKRRRYTGWGRLSRKLINGIRDKQSGKTILDFLKSDGFANRNFMQLIHDDSLTFKEDIQKAQVSGQGDSLHEHIANLAGSPAIKKGILQTVKVVDELVKVMGRHKPENIVIEMARENQTTQKGQKNSRERMKRIEEGIKELGSQILKEHPVENTQLQNEKLYLYYLQNGRDMYVDQELDINRLSDYDVDHIVPQSFLKDDSIDNKVLTRSDKARGKSDNVPSEEVVKKMKNYWRQLLNAKLITQRKFDNLTKAERGGLSELDKAGFIKRQLVETRQITKHVAQILDSRMNTKYDENDKLIREVKVITLKSKLVSDFRKDFQFYKVREINNYHHAHDAYLNAVVGTALIKKYPKLESEFVYGDYKVYDVRKMIAKSEQEIGKATAKYFFYSNIMNFFKTEITLANGEIRKRPLIETNGETGEIVWDKGRDFATVRKVLSMPQVNIVKKTEVQTGGFSKESILPKRNSDKLIARKKDWDPKKYGGFDSPTVAYSVLVVAKVEKGKSKKLKSVKELLGITIMERSSFEKNPIDFLEAKGYKEVKKDLIIKLPKYSLFELENGRKRMLASAGELQKGNELALPSKYVNFLYLASHYEKLKGSPEDNEQKQLFVEQHKHYLDEIIEQISEFSKRVILADANLDKVLSAYNKHRDKPIREQAENIIHLFTLTNLGAPAAFKYFDTTIDRKRYTSTKEVLDATLIHQSITGLYETRIDLSQLGGDGGGGGGGSEAAAKGGVLNLEEEYRLHEKPVPSSIDPSWLQLFPTVWAERAGMGLANQVPPVVVELRSGASPVAVRQYPMSKEAREGIRPHIQRFLDLGVLVPCQSPWNTPLLPVKKPGTNDYRPVQDLREINKRVQDIHPTVPNPYNLLSSLPPSHTWYSVLDLKDAFFCLKLHPNSQPLFAFEWRDPEKGNTGQLTWTRLPQGFKNSPTLFNEALHRDLAPFRALNPQVVLLQYVDDLLVAAPTYRDCKEGTQKLLQELSKLGYRVSAKKAQLCQKEVTYLGYLLKEGKRWLTPARKATVMKIPPPTTPRQVREFLGTAGFCRLWIPGFASLAAPLYPLTKPSIPFIWTEEHQKAFDRIKEALLSAPALALPDLTKPFTLYVDERAGVARGVLTQTLGPWRRPVAYLSKKLDPVASGWPTCLKAVAAVALLLKDADKLTLGQNVTVIASHSLESIVRQPPDRWMTNARMTHYQSLLLNERVSFAPPAVLNPATLLPVESEATPVHRCSEILAEETGTRRDLKDQPLPGVPAWYTDGSSFIAEGKRRAGAAIVDGKRTVWASSLPEGTSAQKAELVALTQALRLAEGKDINIYTDSRYAFATAHIHGAIYKQRGWLTSAGKDIKNKEEILALLEAIHLPKRVAIIHCPGHQKGNDPVATGNRRADEAAKQAALSTRVLAETTKPAGKRTADGSEFEKRTADGSEFESPKKKAKVE

SEQ ID NO: 801 - protein, 2129 aa, synthetic construct
MPAAKRVKLDGGDKKYSIGLDIGTNSVGWAVITDEYKVPSKKFKVLGNTDRHSIKKNLIGALLFDSGETAEATRLKRTARRRYTRRKNRICYLQEIFSNEMAKVDDSFFHRLEESFLVEEDKKHERHPIFGNIVDEVAYHEKYPTIYHLRKKLVDSTDKADLRLIYLALAHMIKFRGHFLIEGDLNPDNSDVDKLFIQLVQTYNQLFEENPINASGVDAKAILSARLSKSRRLENLIAQLPGEKKNGLFGNLIALSLGLTPNFKSNFDLAEDAKLQLSKDTYDDDLDNLLAQIGDQYADLFLAAKNLSDAILLSDILRVNTEITKAPLSASMIKRYDEHHQDLTLLKALVRQQLPEKYKEIFFDQSKNGYAGYIDGGASQEEFYKFIKPILEKMDGTEELLVKLNREDLLRKQRTFDNGSIPHQIHLGELHAILRRQEDFYPFLKDNREKIEKILTFRIPYYVGPLARGNSRFAWMTRKSEETITPWNFEEVVDKGASAQSFIERMTNFDKNLPNEKVLPKHSLLYEYFTVYNELTKVKYVTEGMRKPAFLSGEQKKAIVDLLFKTNRKVTVKQLKEDYFKKIECFDSVEISGVEDRFNASLGTYHDLLKIIKDKDFLDNEENEDILEDIVLTLTLFEDREMIEERLKTYAHLFDDKVMKQLKRRRYTGWGRLSRKLINGIRDKQSGKTILDFLKSDGFANRNFMQLIHDDSLTFKEDIQKAQVSGQGDSLHEHIANLAGSPAIKKGILQTVKVVDELVKVMGRHKPENIVIEMARENQTTQKGQKNSRERMKRIEEGIKELGSQILKEHPVENTQLQNEKLYLYYLQNGRDMYVDQELDINRLSDYDVDHIVPQSFLKDDSIDNKVLTRSDKARGKSDNVPSEEVVKKMKNYWRQLLNAKLITQRKFDNLTKAERGGLSELDKAGFIKRQLVETRQITKHVAQILDSRMNTKYDENDKLIREVKVITLKSKLVSDFRKDFQFYKVREINNYHHAHDAYLNAVVGTALIKKYPKLESEFVYGDYKVYDVRKMIAKSEQEIGKATAKYFFYSNIMNFFKTEITLANGEIRKRPLIETNGETGEIVWDKGRDFATVRKVLSMPQVNIVKKTEVQTGGFSKESILPKRNSDKLIARKKDWDPKKYGGFDSPTVAYSVLVVAKVEKGKSKKLKSVKELLGITIMERSSFEKNPIDFLEAKGYKEVKKDLIIKLPKYSLFELENGRKRMLASAGELQKGNELALPSKYVNFLYLASHYEKLKGSPEDNEQKQLFVEQHKHYLDEIIEQISEFSKRVILADANLDKVLSAYNKHRDKPIREQAENIIHLFTLTNLGAPAAFKYFDTTIDRKRYTSTKEVLDATLIHQSITGLYETRIDLSQLGGDGGAEAAAKEAAAKEAAAKEAAAKALEAEAAAKEAAAKEAAAKEAAAKAGGVLNLEEEYRLHEKPVPSSIDPSWLQLFPTVWAERAGMGLANQVPPVVVELRSGASPVAVRQYPMSKEAREGIRPHIQRFLDLGVLVPCQSPWNTPLLPVKKPGTNDYRPVQDLREINKRVQDIHPTVPNPYNLLSSLPPSHTWYSVLDLKDAFFCLKLHPNSQPLFAFEWRDPEKGNTGQLTWTRLPQGFKNSPTLFNEALHRDLAPFRALNPQVVLLQYVDDLLVAAPTYRDCKEGTQKLLQELSKLGYRVSAKKAQLCQKEVTYLGYLLKEGKRWLTPARKATVMKIPPPTTPRQVREFLGTAGFCRLWIPGFASLAAPLYPLTKPSIPFIWTEEHQKAFDRIKEALLSAPALALPDLTKPFTLYVDERAGVARGVLTQTLGPWRRPVAYLSKKLDPVASGWPTCLKAVAAVALLLKDADKLTLGQNVTVIASHSLESIVRQPPDRWMTNARMTHYQSLLLNERVSFAPPAVLNPATLLPVESEATPVHRCSEILAEETGTRRDLKDQPLPGVPAWYTDGSSFIAEGKRRAGAAIVDGKRTVWASSLPEGTSAQKAELVALTQALRLAEGKDINIYTDSRYAFATAHIHGAIYKQRGWLTSAGKDIKNKEEILALLEAIHLPKRVAIIHCPGHQKGNDPVATGNRRADEAAKQAALSTRVLAETTKPAGKRTADGSEFEKRTADGSEFESPKKKAKVE

SEQ ID NO: 802 - protein, 2090 aa, synthetic construct
MPAAKRVKLDGGDKKYSIGLDIGTNSVGWAVITDEYKVPSKKFKVLGNTDRHSIKKNLIGALLFDSGETAEATRLKRTARRRYTRRKNRICYLQEIFSNEMAKVDDSFFHRLEESFLVEEDKKHERHPIFGNIVDEVAYHEKYPTIYHLRKKLVDSTDKADLRLIYLALAHMIKFRGHFLIEGDLNPDNSDVDKLFIQLVQTYNQLFEENPINASGVDAKAILSARLSKSRRLENLIAQLPGEKKNGLFGNLIALSLGLTPNFKSNFDLAEDAKLQLSKDTYDDDLDNLLAQIGDQYADLFLAAKNLSDAILLSDILRVNTEITKAPLSASMIKRYDEHHQDLTLLKALVRQQLPEKYKEIFFDQSKNGYAGYIDGGASQEEFYKFIKPILEKMDGTEELLVKLNREDLLRKQRTFDNGSIPHQIHLGELHAILRRQEDFYPFLKDNREKIEKILTFRIPYYVGPLARGNSRFAWMTRKSEETITPWNFEEVVDKGASAQSFIERMTNFDKNLPNEKVLPKHSLLYEYFTVYNELTKVKYVTEGMRKPAFLSGEQKKAIVDLLFKTNRKVTVKQLKEDYFKKIECFDSVEISGVEDRFNASLGTYHDLLKIIKDKDFLDNEENEDILEDIVLTLTLFEDREMIEERLKTYAHLFDDKVMKQLKRRRYTGWGRLSRKLINGIRDKQSGKTILDFLKSDGFANRNFMQLIHDDSLTFKEDIQKAQVSGQGDSLHEHIANLAGSPAIKKGILQTVKVVDELVKVMGRHKPENIVIEMARENQTTQKGQKNSRERMKRIEEGIKELGSQILKEHPVENTQLQNEKLYLYYLQNGRDMYVDQELDINRLSDYDVDHIVPQSFLKDDSIDNKVLTRSDKARGKSDNVPSEEVVKKMKNYWRQLLNAKLITQRKFDNLTKAERGGLSELDKAGFIKRQLVETRQITKHVAQILDSRMNTKYDENDKLIREVKVITLKSKLVSDFRKDFQFYKVREINNYHHAHDAYLNAVVGTALIKKYPKLESEFVYGDYKVYDVRKMIAKSEQEIGKATAKYFFYSNIMNFFKTEITLANGEIRKRPLIETNGETGEIVWDKGRDFATVRKVLSMPQVNIVKKTEVQTGGFSKESILPKRNSDKLIARKKDWDPKKYGGFDSPTVAYSVLVVAKVEKGKSKKLKSVKELLGITIMERSSFEKNPIDFLEAKGYKEVKKDLIIKLPKYSLFELENGRKRMLASAGELQKGNELALPSKYVNFLYLASHYEKLKGSPEDNEQKQLFVEQHKHYLDEIIEQISEFSKRVILADANLDKVLSAYNKHRDKPIREQAENIIHLFTLTNLGAPAAFKYFDTTIDRKRYTSTKEVLDATLIHQSITGLYETRIDLSQLGGDGGGGGGGGGGGVLNLEEEYRLHEKPVPSSIDPSWLQLFPTVWAERAGMGLANQVPPVVVELRSGASPVAVRQYPMSKEAREGIRPHIQRFLDLGVLVPCQSPWNTPLLPVKKPGTNDYRPVQDLREINKRVQDIHPTVPNPYNLLSSLPPSHTWYSVLDLKDAFFCLKLHPNSQPLFAFEWRDPEKGNTGQLTWTRLPQGFKNSPTLFNEALHRDLAPFRALNPQVVLLQYVDDLLVAAPTYRDCKEGTQKLLQELSKLGYRVSAKKAQLCQKEVTYLGYLLKEGKRWLTPARKATVMKIPPPTTPRQVREFLGTAGFCRLWIPGFASLAAPLYPLTKPSIPFIWTEEHQKAFDRIKEALLSAPALALPDLTKPFTLYVDERAGVARGVLTQTLGPWRRPVAYLSKKLDPVASGWPTCLKAVAAVALLLKDADKLTLGQNVTVIASHSLESIVRQPPDRWMTNARMTHYQSLLLNERVSFAPPAVLNPATLLPVESEATPVHRCSEILAEETGTRRDLKDQPLPGVPAWYTDGSSFIAEGKRRAGAAIVDGKRTVWASSLPEGTSAQKAELVALTQALRLAEGKDINIYTDSRYAFATAHIHGAIYKQRGWLTSAGKDIKNKEEILALLEAIHLPKRVAIIHCPGHQKGNDPVATGNRRADEAAKQAALSTRVLAETTKPAGKRTADGSEFEKRTADGSEFESPKKKAKVE

SEQ ID NO: 803 - protein, 2086 aa, synthetic construct
MPAAKRVKLDGGDKKYSIGLDIGTNSVGWAVITDEYKVPSKKFKVLGNTDRHSIKKNLIGALLFDSGETAEATRLKRTARRRYTRRKNRICYLQEIFSNEMAKVDDSFFHRLEESFLVEEDKKHERHPIFGNIVDEVAYHEKYPTIYHLRKKLVDSTDKADLRLIYLALAHMIKFRGHFLIEGDLNPDNSDVDKLFIQLVQTYNQLFEENPINASGVDAKAILSARLSKSRRLENLIAQLPGEKKNGLFGNLIALSLGLTPNFKSNFDLAEDAKLQLSKDTYDDDLDNLLAQIGDQYADLFLAAKNLSDAILLSDILRVNTEITKAPLSASMIKRYDEHHQDLTLLKALVRQQLPEKYKEIFFDQSKNGYAGYIDGGASQEEFYKFIKPILEKMDGTEELLVKLNREDLLRKQRTFDNGSIPHQIHLGELHAILRRQEDFYPFLKDNREKIEKILTFRIPYYVGPLARGNSRFAWMTRKSEETITPWNFEEVVDKGASAQSFIERMTNFDKNLPNEKVLPKHSLLYEYFTVYNELTKVKYVTEGMRKPAFLSGEQKKAIVDLLFKTNRKVTVKQLKEDYFKKIECFDSVEISGVEDRFNASLGTYHDLLKIIKDKDFLDNEENEDILEDIVLTLTLFEDREMIEERLKTYAHLFDDKVMKQLKRRRYTGWGRLSRKLINGIRDKQSGKTILDFLKSDGFANRNFMQLIHDDSLTFKEDIQKAQVSGQGDSLHEHIANLAGSPAIKKGILQTVKVVDELVKVMGRHKPENIVIEMARENQTTQKGQKNSRERMKRIEEGIKELGSQILKEHPVENTQLQNEKLYLYYLQNGRDMYVDQELDINRLSDYDVDHIVPQSFLKDDSIDNKVLTRSDKARGKSDNVPSEEVVKKMKNYWRQLLNAKLITQRKFDNLTKAERGGLSELDKAGFIKRQLVETRQITKHVAQILDSRMNTKYDENDKLIREVKVITLKSKLVSDFRKDFQFYKVREINNYHHAHDAYLNAVVGTALIKKYPKLESEFVYGDYKVYDVRKMIAKSEQEIGKATAKYFFYSNIMNFFKTEITLANGEIRKRPLIETNGETGEIVWDKGRDFATVRKVLSMPQVNIVKKTEVQTGGFSKESILPKRNSDKLIARKKDWDPKKYGGFDSPTVAYSVLVVAKVEKGKSKKLKSVKELLGITIMERSSFEKNPIDFLEAKGYKEVKKDLIIKLPKYSLFELENGRKRMLASAGELQKGNELALPSKYVNFLYLASHYEKLKGSPEDNEQKQLFVEQHKHYLDEIIEQISEFSKRVILADANLDKVLSAYNKHRDKPIREQAENIIHLFTLTNLGAPAAFKYFDTTIDRKRYTSTKEVLDATLIHQSITGLYETRIDLSQLGGDGGGSSGGVLNLEEEYRLHEKPVPSSIDPSWLQLFPTVWAERAGMGLANQVPPVVVELRSGASPVAVRQYPMSKEAREGIRPHIQRFLDLGVLVPCQSPWNTPLLPVKKPGTNDYRPVQDLREINKRVQDIHPTVPNPYNLLSSLPPSHTWYSVLDLKDAFFCLKLHPNSQPLFAFEWRDPEKGNTGQLTWTRLPQGFKNSPTLFNEALHRDLAPFRALNPQVVLLQYVDDLLVAAPTYRDCKEGTQKLLQELSKLGYRVSAKKAQLCQKEVTYLGYLLKEGKRWLTPARKATVMKIPPPTTPRQVREFLGTAGFCRLWIPGFASLAAPLYPLTKPSIPFIWTEEHQKAFDRIKEALLSAPALALPDLTKPFTLYVDERAGVARGVLTQTLGPWRRPVAYLSKKLDPVASGWPTCLKAVAAVALLLKDADKLTLGQNVTVIASHSLESIVRQPPDRWMTNARMTHYQSLLLNERVSFAPPAVLNPATLLPVESEATPVHRCSEILAEETGTRRDLKDQPLPGVPAWYTDGSSFIAEGKRRAGAAIVDGKRTVWASSLPEGTSAQKAELVALTQALRLAEGKDINIYTDSRYAFATAHIHGAIYKQRGWLTSAGKDIKNKEEILALLEAIHLPKRVAIIHCPGHQKGNDPVATGNRRADEAAKQAALSTRVLAETTKPAGKRTADGSEFEKRTADGSEFESPKKKAKVE

SEQ ID NO: 804 - protein, 2092 aa, synthetic construct
MPAAKRVKLDGGDKKYSIGLDIGTNSVGWAVITDEYKVPSKKFKVLGNTDRHSIKKNLIGALLFDSGETAEATRLKRTARRRYTRRKNRICYLQEIFSNEMAKVDDSFFHRLEESFLVEEDKKHERHPIFGNIVDEVAYHEKYPTIYHLRKKLVDSTDKADLRLIYLALAHMIKFRGHFLIEGDLNPDNSDVDKLFIQLVQTYNQLFEENPINASGVDAKAILSARLSKSRRLENLIAQLPGEKKNGLFGNLIALSLGLTPNFKSNFDLAEDAKLQLSKDTYDDDLDNLLAQIGDQYADLFLAAKNLSDAILLSDILRVNTEITKAPLSASMIKRYDEHHQDLTLLKALVRQQLPEKYKEIFFDQSKNGYAGYIDGGASQEEFYKFIKPILEKMDGTEELLVKLNREDLLRKQRTFDNGSIPHQIHLGELHAILRRQEDFYPFLKDNREKIEKILTFRIPYYVGPLARGNSRFAWMTRKSEETITPWNFEEVVDKGASAQSFIERMTNFDKNLPNEKVLPKHSLLYEYFTVYNELTKVKYVTEGMRKPAFLSGEQKKAIVDLLFKTNRKVTVKQLKEDYFKKIECFDSVEISGVEDRFNASLGTYHDLLKIIKDKDFLDNEENEDILEDIVLTLTLFEDREMIEERLKTYAHLFDDKVMKQLKRRRYTGWGRLSRKLINGIRDKQSGKTILDFLKSDGFANRNFMQLIHDDSLTFKEDIQKAQVSGQGDSLHEHIANLAGSPAIKKGILQTVKVVDELVKVMGRHKPENIVIEMARENQTTQKGQKNSRERMKRIEEGIKELGSQILKEHPVENTQLQNEKLYLYYLQNGRDMYVDQELDINRLSDYDVDHIVPQSFLKDDSIDNKVLTRSDKARGKSDNVPSEEVVKKMKNYWRQLLNAKLITQRKFDNLTKAERGGLSELDKAGFIKRQLVETRQITKHVAQILDSRMNTKYDENDKLIREVKVITLKSKLVSDFRKDFQFYKVREINNYHHAHDAYLNAVVGTALIKKYPKLESEFVYGDYKVYDVRKMIAKSEQEIGKATAKYFFYSNIMNFFKTEITLANGEIRKRPLIETNGETGEIVWDKGRDFATVRKVLSMPQVNIVKKTEVQTGGFSKESILPKRNSDKLIARKKDWDPKKYGGFDSPTVAYSVLVVAKVEKGKSKKLKSVKELLGITIMERSSFEKNPIDFLEAKGYKEVKKDLIIKLPKYSLFELENGRKRMLASAGELQKGNELALPSKYVNFLYLASHYEKLKGSPEDNEQKQLFVEQHKHYLDEIIEQISEFSKRVILADANLDKVLSAYNKHRDKPIREQAENIIHLFTLTNLGAPAAFKYFDTTIDRKRYTSTKEVLDATLIHQSITGLYETRIDLSQLGGDGGGGGGSSGGSGGVLNLEEEYRLHEKPVPSSIDPSWLQLFPTVWAERAGMGLANQVPPVVVELRSGASPVAVRQYPMSKEAREGIRPHIQRFLDLGVLVPCQSPWNTPLLPVKKPGTNDYRPVQDLREINKRVQDIHPTVPNPYNLLSSLPPSHTWYSVLDLKDAFFCLKLHPNSQPLFAFEWRDPEKGNTGQLTWTRLPQGFKNSPTLFNEALHRDLAPFRALNPQVVLLQYVDDLLVAAPTYRDCKEGTQKLLQELSKLGYRVSAKKAQLCQKEVTYLGYLLKEGKRWLTPARKATVMKIPPPTTPRQVREFLGTAGFCRLWIPGFASLAAPLYPLTKPSIPFIWTEEHQKAFDRIKEALLSAPALALPDLTKPFTLYVDERAGVARGVLTQTLGPWRRPVAYLSKKLDPVASGWPTCLKAVAAVALLLKDADKLTLGQNVTVIASHSLESIVRQPPDRWMTNARMTHYQSLLLNERVSFAPPAVLNPATLLPVESEATPVHRCSEILAEETGTRRDLKDQPLPGVPAWYTDGSSFIAEGKRRAGAAIVDGKRTVWASSLPEGTSAQKAELVALTQALRLAEGKDINIYTDSRYAFATAHIHGAIYKQRGWLTSAGKDIKNKEEILALLEAIHLPKRVAIIHCPGHQKGNDPVATGNRRADEAAKQAALSTRVLAETTKPAGKRTADGSEFEKRTADGSEFESPKKKAKVE

SEQ ID NO: 805 - protein, 2089 aa, synthetic construct
MPAAKRVKLDGGDKKYSIGLDIGTNSVGWAVITDEYKVPSKKFKVLGNTDRHSIKKNLIGALLFDSGETAEATRLKRTARRRYTRRKNRICYLQEIFSNEMAKVDDSFFHRLEESFLVEEDKKHERHPIFGNIVDEVAYHEKYPTIYHLRKKLVDSTDKADLRLIYLALAHMIKFRGHFLIEGDLNPDNSDVDKLFIQLVQTYNQLFEENPINASGVDAKAILSARLSKSRRLENLIAQLPGEKKNGLFGNLIALSLGLTPNFKSNFDLAEDAKLQLSKDTYDDDLDNLLAQIGDQYADLFLAAKNLSDAILLSDILRVNTEITKAPLSASMIKRYDEHHQDLTLLKALVRQQLPEKYKEIFFDQSKNGYAGYIDGGASQEEFYKFIKPILEKMDGTEELLVKLNREDLLRKQRTFDNGSIPHQIHLGELHAILRRQEDFYPFLKDNREKIEKILTFRIPYYVGPLARGNSRFAWMTRKSEETITPWNFEEVVDKGASAQSFIERMTNFDKNLPNEKVLPKHSLLYEYFTVYNELTKVKYVTEGMRKPAFLSGEQKKAIVDLLFKTNRKVTVKQLKEDYFKKIECFDSVEISGVEDRFNASLGTYHDLLKIIKDKDFLDNEENEDILEDIVLTLTLFEDREMIEERLKTYAHLFDDKVMKQLKRRRYTGWGRLSRKLINGIRDKQSGKTILDFLKSDGFANRNFMQLIHDDSLTFKEDIQKAQVSGQGDSLHEHIANLAGSPAIKKGILQTVKVVDELVKVMGRHKPENIVIEMARENQTTQKGQKNSRERMKRIEEGIKELGSQILKEHPVENTQLQNEKLYLYYLQNGRDMYVDQELDINRLSDYDVDHIVPQSFLKDDSIDNKVLTRSDKARGKSDNVPSEEVVKKMKNYWRQLLNAKLITQRKFDNLTKAERGGLSELDKAGFIKRQLVETRQITKHVAQILDSRMNTKYDENDKLIREVKVITLKSKLVSDFRKDFQFYKVREINNYHHAHDAYLNAVVGTALIKKYPKLESEFVYGDYKVYDVRKMIAKSEQEIGKATAKYFFYSNIMNFFKTEITLANGEIRKRPLIETNGETGEIVWDKGRDFATVRKVLSMPQVNIVKKTEVQTGGFSKESILPKRNSDKLIARKKDWDPKKYGGFDSPTVAYSVLVVAKVEKGKSKKLKSVKELLGITIMERSSFEKNPIDFLEAKGYKEVKKDLIIKLPKYSLFELENGRKRMLASAGELQKGNELALPSKYVNFLYLASHYEKLKGSPEDNEQKQLFVEQHKHYLDEIIEQISEFSKRVILADANLDKVLSAYNKHRDKPIREQAENIIHLFTLTNLGAPAAFKYFDTTIDRKRYTSTKEVLDATLIHQSITGLYETRIDLSQLGGDGGGGGGGGGGVLNLEEEYRLHEKPVPSSIDPSWLQLFPTVWAERAGMGLANQVPPVVVELRSGASPVAVRQYPMSKEAREGIRPHIQRFLDLGVLVPCQSPWNTPLLPVKKPGTNDYRPVQDLREINKRVQDIHPTVPNPYNLLSSLPPSHTWYSVLDLKDAFFCLKLHPNSQPLFAFEWRDPEKGNTGQLTWTRLPQGFKNSPTLFNEALHRDLAPFRALNPQVVLLQYVDDLLVAAPTYRDCKEGTQKLLQELSKLGYRVSAKKAQLCQKEVTYLGYLLKEGKRWLTPARKATVMKIPPPTTPRQVREFLGTAGFCRLWIPGFASLAAPLYPLTKPSIPFIWTEEHQKAFDRIKEALLSAPALALPDLTKPFTLYVDERAGVARGVLTQTLGPWRRPVAYLSKKLDPVASGWPTCLKAVAAVALLLKDADKLTLGQNVTVIASHSLESIVRQPPDRWMTNARMTHYQSLLLNERVSFAPPAVLNPATLLPVESEATPVHRCSEILAEETGTRRDLKDQPLPGVPAWYTDGSSFIAEGKRRAGAAIVDGKRTVWASSLPEGTSAQKAELVALTQALRLAEGKDINIYTDSRYAFATAHIHGAIYKQRGWLTSAGKDIKNKEEILALLEAIHLPKRVAIIHCPGHQKGNDPVATGNRRADEAAKQAALSTRVLAETTKPAGKRTADGSEFEKRTADGSEFESPKKKAKVE

SEQ ID NO: 806 - protein, 2099 aa, synthetic construct
MPAAKRVKLDGGDKKYSIGLDIGTNSVGWAVITDEYKVPSKKFKVLGNTDRHSIKKNLIGALLFDSGETAEATRLKRTARRRYTRRKNRICYLQEIFSNEMAKVDDSFFHRLEESFLVEEDKKHERHPIFGNIVDEVAYHEKYPTIYHLRKKLVDSTDKADLRLIYLALAHMIKFRGHFLIEGDLNPDNSDVDKLFIQLVQTYNQLFEENPINASGVDAKAILSARLSKSRRLENLIAQLPGEKKNGLFGNLIALSLGLTPNFKSNFDLAEDAKLQLSKDTYDDDLDNLLAQIGDQYADLFLAAKNLSDAILLSDILRVNTEITKAPLSASMIKRYDEHHQDLTLLKALVRQQLPEKYKEIFFDQSKNGYAGYIDGGASQEEFYKFIKPILEKMDGTEELLVKLNREDLLRKQRTFDNGSIPHQIHLGELHAILRRQEDFYPFLKDNREKIEKILTFRIPYYVGPLARGNSRFAWMTRKSEETITPWNFEEVVDKGASAQSFIERMTNFDKNLPNEKVLPKHSLLYEYFTVYNELTKVKYVTEGMRKPAFLSGEQKKAIVDLLFKTNRKVTVKQLKEDYFKKIECFDSVEISGVEDRFNASLGTYHDLLKIIKDKDFLDNEENEDILEDIVLTLTLFEDREMIEERLKTYAHLFDDKVMKQLKRRRYTGWGRLSRKLINGIRDKQSGKTILDFLKSDGFANRNFMQLIHDDSLTFKEDIQKAQVSGQGDSLHEHIANLAGSPAIKKGILQTVKVVDELVKVMGRHKPENIVIEMARENQTTQKGQKNSRERMKRIEEGIKELGSQILKEHPVENTQLQNEKLYLYYLQNGRDMYVDQELDINRLSDYDVDHIVPQSFLKDDSIDNKVLTRSDKARGKSDNVPSEEVVKKMKNYWRQLLNAKLITQRKFDNLTKAERGGLSELDKAGFIKRQLVETRQITKHVAQILDSRMNTKYDENDKLIREVKVITLKSKLVSDFRKDFQFYKVREINNYHHAHDAYLNAVVGTALIKKYPKLESEFVYGDYKVYDVRKMIAKSEQEIGKATAKYFFYSNIMNFFKTEITLANGEIRKRPLIETNGETGEIVWDKGRDFATVRKVLSMPQVNIVKKTEVQTGGFSKESILPKRNSDKLIARKKDWDPKKYGGFDSPTVAYSVLVVAKVEKGKSKKLKSVKELLGITIMERSSFEKNPIDFLEAKGYKEVKKDLIIKLPKYSLFELENGRKRMLASAGELQKGNELALPSKYVNFLYLASHYEKLKGSPEDNEQKQLFVEQHKHYLDEIIEQISEFSKRVILADANLDKVLSAYNKHRDKPIREQAENIIHLFTLTNLGAPAAFKYFDTTIDRKRYTSTKEVLDATLIHQSITGLYETRIDLSQLGGDGGSGSETPGTSESATPESGGVLNLEEEYRLHEKPVPSSIDPSWLQLFPTVWAERAGMGLANQVPPVVVELRSGASPVAVRQYPMSKEAREGIRPHIQRFLDLGVLVPCQSPWNTPLLPVKKPGTNDYRPVQDLREINKRVQDIHPTVPNPYNLLSSLPPSHTWYSVLDLKDAFFCLKLHPNSQPLFAFEWRDPEKGNTGQLTWTRLPQGFKNSPTLFNEALHRDLAPFRALNPQVVLLQYVDDLLVAAPTYRDCKEGTQKLLQELSKLGYRVSAKKAQLCQKEVTYLGYLLKEGKRWLTPARKATVMKIPPPTTPRQVREFLGTAGFCRLWIPGFASLAAPLYPLTKPSIPFIWTEEHQKAFDRIKEALLSAPALALPDLTKPFTLYVDERAGVARGVLTQTLGPWRRPVAYLSKKLDPVASGWPTCLKAVAAVALLLKDADKLTLGQNVTVIASHSLESIVRQPPDRWMTNARMTHYQSLLLNERVSFAPPAVLNPATLLPVESEATPVHRCSEILAEETGTRRDLKDQPLPGVPAWYTDGSSFIAEGKRRAGAAIVDGKRTVWASSLPEGTSAQKAELVALTQALRLAEGKDINIYTDSRYAFATAHIHGAIYKQRGWLTSAGKDIKNKEEILALLEAIHLPKRVAIIHCPGHQKGNDPVATGNRRADEAAKQAALSTRVLAETTKPAGKRTADGSEFEKRTADGSEFESPKKKAKVE

SEQ ID NO: 807 - protein, 2094 aa, synthetic construct
MPAAKRVKLDGGDKKYSIGLDIGTNSVGWAVITDEYKVPSKKFKVLGNTDRHSIKKNLIGALLFDSGETAEATRLKRTARRRYTRRKNRICYLQEIFSNEMAKVDDSFFHRLEESFLVEEDKKHERHPIFGNIVDEVAYHEKYPTIYHLRKKLVDSTDKADLRLIYLALAHMIKFRGHFLIEGDLNPDNSDVDKLFIQLVQTYNQLFEENPINASGVDAKAILSARLSKSRRLENLIAQLPGEKKNGLFGNLIALSLGLTPNFKSNFDLAEDAKLQLSKDTYDDDLDNLLAQIGDQYADLFLAAKNLSDAILLSDILRVNTEITKAPLSASMIKRYDEHHQDLTLLKALVRQQLPEKYKEIFFDQSKNGYAGYIDGGASQEEFYKFIKPILEKMDGTEELLVKLNREDLLRKQRTFDNGSIPHQIHLGELHAILRRQEDFYPFLKDNREKIEKILTFRIPYYVGPLARGNSRFAWMTRKSEETITPWNFEEVVDKGASAQSFIERMTNFDKNLPNEKVLPKHSLLYEYFTVYNELTKVKYVTEGMRKPAFLSGEQKKAIVDLLFKTNRKVTVKQLKEDYFKKIECFDSVEISGVEDRFNASLGTYHDLLKIIKDKDFLDNEENEDILEDIVLTLTLFEDREMIEERLKTYAHLFDDKVMKQLKRRRYTGWGRLSRKLINGIRDKQSGKTILDFLKSDGFANRNFMQLIHDDSLTFKEDIQKAQVSGQGDSLHEHIANLAGSPAIKKGILQTVKVVDELVKVMGRHKPENIVIEMARENQTTQKGQKNSRERMKRIEEGIKELGSQILKEHPVENTQLQNEKLYLYYLQNGRDMYVDQELDINRLSDYDVDHIVPQSFLKDDSIDNKVLTRSDKARGKSDNVPSEEVVKKMKNYWRQLLNAKLITQRKFDNLTKAERGGLSELDKAGFIKRQLVETRQITKHVAQILDSRMNTKYDENDKLIREVKVITLKSKLVSDFRKDFQFYKVREINNYHHAHDAYLNAVVGTALIKKYPKLESEFVYGDYKVYDVRKMIAKSEQEIGKATAKYFFYSNIMNFFKTEITLANGEIRKRPLIETNGETGEIVWDKGRDFATVRKVLSMPQVNIVKKTEVQTGGFSKESILPKRNSDKLIARKKDWDPKKYGGFDSPTVAYSVLVVAKVEKGKSKKLKSVKELLGITIMERSSFEKNPIDFLEAKGYKEVKKDLIIKLPKYSLFELENGRKRMLASAGELQKGNELALPSKYVNFLYLASHYEKLKGSPEDNEQKQLFVEQHKHYLDEIIEQISEFSKRVILADANLDKVLSAYNKHRDKPIREQAENIIHLFTLTNLGAPAAFKYFDTTIDRKRYTSTKEVLDATLIHQSITGLYETRIDLSQLGGDGGGGGGSSEAAAKGGVLNLEEEYRLHEKPVPSSIDPSWLQLFPTVWAERAGMGLANQVPPVVVELRSGASPVAVRQYPMSKEAREGIRPHIQRFLDLGVLVPCQSPWNTPLLPVKKPGTNDYRPVQDLREINKRVQDIHPTVPNPYNLLSSLPPSHTWYSVLDLKDAFFCLKLHPNSQPLFAFEWRDPEKGNTGQLTWTRLPQGFKNSPTLFNEALHRDLAPFRALNPQVVLLQYVDDLLVAAPTYRDCKEGTQKLLQELSKLGYRVSAKKAQLCQKEVTYLGYLLKEGKRWLTPARKATVMKIPPPTTPRQVREFLGTAGFCRLWIPGFASLAAPLYPLTKPSIPFIWTEEHQKAFDRIKEALLSAPALALPDLTKPFTLYVDERAGVARGVLTQTLGPWRRPVAYLSKKLDPVASGWPTCLKAVAAVALLLKDADKLTLGQNVTVIASHSLESIVRQPPDRWMTNARMTHYQSLLLNERVSFAPPAVLNPATLLPVESEATPVHRCSEILAEETGTRRDLKDQPLPGVPAWYTDGSSFIAEGKRRAGAAIVDGKRTVWASSLPEGTSAQKAELVALTQALRLAEGKDINIYTDSRYAFATAHIHGAIYKQRGWLTSAGKDIKNKEEILALLEAIHLPKRVAIIHCPGHQKGNDPVATGNRRADEAAKQAALSTRVLAETTKPAGKRTADGSEFEKRTADGSEFESPKKKAKVE

SEQ ID NO: 808 - protein, 2093 aa, synthetic construct
MPAAKRVKLDGGDKKYSIGLDIGTNSVGWAVITDEYKVPSKKFKVLGNTDRHSIKKNLIGALLFDSGETAEATRLKRTARRRYTRRKNRICYLQEIFSNEMAKVDDSFFHRLEESFLVEEDKKHERHPIFGNIVDEVAYHEKYPTIYHLRKKLVDSTDKADLRLIYLALAHMIKFRGHFLIEGDLNPDNSDVDKLFIQLVQTYNQLFEENPINASGVDAKAILSARLSKSRRLENLIAQLPGEKKNGLFGNLIALSLGLTPNFKSNFDLAEDAKLQLSKDTYDDDLDNLLAQIGDQYADLFLAAKNLSDAILLSDILRVNTEITKAPLSASMIKRYDEHHQDLTLLKALVRQQLPEKYKEIFFDQSKNGYAGYIDGGASQEEFYKFIKPILEKMDGTEELLVKLNREDLLRKQRTFDNGSIPHQIHLGELHAILRRQEDFYPFLKDNREKIEKILTFRIPYYVGPLARGNSRFAWMTRKSEETITPWNFEEVVDKGASAQSFIERMTNFDKNLPNEKVLPKHSLLYEYFTVYNELTKVKYVTEGMRKPAFLSGEQKKAIVDLLFKTNRKVTVKQLKEDYFKKIECFDSVEISGVEDRFNASLGTYHDLLKIIKDKDFLDNEENEDILEDIVLTLTLFEDREMIEERLKTYAHLFDDKVMKQLKRRRYTGWGRLSRKLINGIRDKQSGKTILDFLKSDGFANRNFMQLIHDDSLTFKEDIQKAQVSGQGDSLHEHIANLAGSPAIKKGILQTVKVVDELVKVMGRHKPENIVIEMARENQTTQKGQKNSRERMKRIEEGIKELGSQILKEHPVENTQLQNEKLYLYYLQNGRDMYVDQELDINRLSDYDVDHIVPQSFLKDDSIDNKVLTRSDKARGKSDNVPSEEVVKKMKNYWRQLLNAKLITQRKFDNLTKAERGGLSELDKAGFIKRQLVETRQITKHVAQILDSRMNTKYDENDKLIREVKVITLKSKLVSDFRKDFQFYKVREINNYHHAHDAYLNAVVGTALIKKYPKLESEFVYGDYKVYDVRKMIAKSEQEIGKATAKYFFYSNIMNFFKTEITLANGEIRKRPLIETNGETGEIVWDKGRDFATVRKVLSMPQVNIVKKTEVQTGGFSKESILPKRNSDKLIARKKDWDPKKYGGFDSPTVAYSVLVVAKVEKGKSKKLKSVKELLGITIMERSSFEKNPIDFLEAKGYKEVKKDLIIKLPKYSLFELENGRKRMLASAGELQKGNELALPSKYVNFLYLASHYEKLKGSPEDNEQKQLFVEQHKHYLDEIIEQISEFSKRVILADANLDKVLSAYNKHRDKPIREQAENIIHLFTLTNLGAPAAFKYFDTTIDRKRYTSTKEVLDATLIHQSITGLYETRIDLSQLGGDGGGGGGSGGGGSGGVLNLEEEYRLHEKPVPSSIDPSWLQLFPTVWAERAGMGLANQVPPVVVELRSGASPVAVRQYPMSKEAREGIRPHIQRFLDLGVLVPCQSPWNTPLLPVKKPGTNDYRPVQDLREINKRVQDIHPTVPNPYNLLSSLPPSHTWYSVLDLKDAFFCLKLHPNSQPLFAFEWRDPEKGNTGQLTWTRLPQGFKNSPTLFNEALHRDLAPFRALNPQVVLLQYVDDLLVAAPTYRDCKEGTQKLLQELSKLGYRVSAKKAQLCQKEVTYLGYLLKEGKRWLTPARKATVMKIPPPTTPRQVREFLGTAGFCRLWIPGFASLAAPLYPLTKPSIPFIWTEEHQKAFDRIKEALLSAPALALPDLTKPFTLYVDERAGVARGVLTQTLGPWRRPVAYLSKKLDPVASGWPTCLKAVAAVALLLKDADKLTLGQNVTVIASHSLESIVRQPPDRWMTNARMTHYQSLLLNERVSFAPPAVLNPATLLPVESEATPVHRCSEILAEETGTRRDLKDQPLPGVPAWYTDGSSFIAEGKRRAGAAIVDGKRTVWASSLPEGTSAQKAELVALTQALRLAEGKDINIYTDSRYAFATAHIHGAIYKQRGWLTSAGKDIKNKEEILALLEAIHLPKRVAIIHCPGHQKGNDPVATGNRRADEAAKQAALSTRVLAETTKPAGKRTADGSEFEKRTADGSEFESPKKKAKVE

SEQ ID NO: 809 - protein, 2094 aa, synthetic construct
MPAAKRVKLDGGDKKYSIGLDIGTNSVGWAVITDEYKVPSKKFKVLGNTDRHSIKKNLIGALLFDSGETAEATRLKRTARRRYTRRKNRICYLQEIFSNEMAKVDDSFFHRLEESFLVEEDKKHERHPIFGNIVDEVAYHEKYPTIYHLRKKLVDSTDKADLRLIYLALAHMIKFRGHFLIEGDLNPDNSDVDKLFIQLVQTYNQLFEENPINASGVDAKAILSARLSKSRRLENLIAQLPGEKKNGLFGNLIALSLGLTPNFKSNFDLAEDAKLQLSKDTYDDDLDNLLAQIGDQYADLFLAAKNLSDAILLSDILRVNTEITKAPLSASMIKRYDEHHQDLTLLKALVRQQLPEKYKEIFFDQSKNGYAGYIDGGASQEEFYKFIKPILEKMDGTEELLVKLNREDLLRKQRTFDNGSIPHQIHLGELHAILRRQEDFYPFLKDNREKIEKILTFRIPYYVGPLARGNSRFAWMTRKSEETITPWNFEEVVDKGASAQSFIERMTNFDKNLPNEKVLPKHSLLYEYFTVYNELTKVKYVTEGMRKPAFLSGEQKKAIVDLLFKTNRKVTVKQLKEDYFKKIECFDSVEISGVEDRFNASLGTYHDLLKIIKDKDFLDNEENEDILEDIVLTLTLFEDREMIEERLKTYAHLFDDKVMKQLKRRRYTGWGRLSRKLINGIRDKQSGKTILDFLKSDGFANRNFMQLIHDDSLTFKEDIQKAQVSGQGDSLHEHIANLAGSPAIKKGILQTVKVVDELVKVMGRHKPENIVIEMARENQTTQKGQKNSRERMKRIEEGIKELGSQILKEHPVENTQLQNEKLYLYYLQNGRDMYVDQELDINRLSDYDVDHIVPQSFLKDDSIDNKVLTRSDKARGKSDNVPSEEVVKKMKNYWRQLLNAKLITQRKFDNLTKAERGGLSELDKAGFIKRQLVETRQITKHVAQILDSRMNTKYDENDKLIREVKVITLKSKLVSDFRKDFQFYKVREINNYHHAHDAYLNAVVGTALIKKYPKLESEFVYGDYKVYDVRKMIAKSEQEIGKATAKYFFYSNIMNFFKTEITLANGEIRKRPLIETNGETGEIVWDKGRDFATVRKVLSMPQVNIVKKTEVQTGGFSKESILPKRNSDKLIARKKDWDPKKYGGFDSPTVAYSVLVVAKVEKGKSKKLKSVKELLGITIMERSSFEKNPIDFLEAKGYKEVKKDLIIKLPKYSLFELENGRKRMLASAGELQKGNELALPSKYVNFLYLASHYEKLKGSPEDNEQKQLFVEQHKHYLDEIIEQISEFSKRVILADANLDKVLSAYNKHRDKPIREQAENIIHLFTLTNLGAPAAFKYFDTTIDRKRYTSTKEVLDATLIHQSITGLYETRIDLSQLGGDGGGSSGGSEAAAKGGVLNLEEEYRLHEKPVPSSIDPSWLQLFPTVWAERAGMGLANQVPPVVVELRSGASPVAVRQYPMSKEAREGIRPHIQRFLDLGVLVPCQSPWNTPLLPVKKPGTNDYRPVQDLREINKRVQDIHPTVPNPYNLLSSLPPSHTWYSVLDLKDAFFCLKLHPNSQPLFAFEWRDPEKGNTGQLTWTRLPQGFKNSPTLFNEALHRDLAPFRALNPQVVLLQYVDDLLVAAPTYRDCKEGTQKLLQELSKLGYRVSAKKAQLCQKEVTYLGYLLKEGKRWLTPARKATVMKIPPPTTPRQVREFLGTAGFCRLWIPGFASLAAPLYPLTKPSIPFIWTEEHQKAFDRIKEALLSAPALALPDLTKPFTLYVDERAGVARGVLTQTLGPWRRPVAYLSKKLDPVASGWPTCLKAVAAVALLLKDADKLTLGQNVTVIASHSLESIVRQPPDRWMTNARMTHYQSLLLNERVSFAPPAVLNPATLLPVESEATPVHRCSEILAEETGTRRDLKDQPLPGVPAWYTDGSSFIAEGKRRAGAAIVDGKRTVWASSLPEGTSAQKAELVALTQALRLAEGKDINIYTDSRYAFATAHIHGAIYKQRGWLTSAGKDIKNKEEILALLEAIHLPKRVAIIHCPGHQKGNDPVATGNRRADEAAKQAALSTRVLAETTKPAGKRTADGSEFEKRTADGSEFESPKKKAKVE

SEQ ID NO: 810 - protein, 2089 aa, synthetic construct
MPAAKRVKLDGGDKKYSIGLDIGTNSVGWAVITDEYKVPSKKFKVLGNTDRHSIKKNLIGALLFDSGETAEATRLKRTARRRYTRRKNRICYLQEIFSNEMAKVDDSFFHRLEESFLVEEDKKHERHPIFGNIVDEVAYHEKYPTIYHLRKKLVDSTDKADLRLIYLALAHMIKFRGHFLIEGDLNPDNSDVDKLFIQLVQTYNQLFEENPINASGVDAKAILSARLSKSRRLENLIAQLPGEKKNGLFGNLIALSLGLTPNFKSNFDLAEDAKLQLSKDTYDDDLDNLLAQIGDQYADLFLAAKNLSDAILLSDILRVNTEITKAPLSASMIKRYDEHHQDLTLLKALVRQQLPEKYKEIFFDQSKNGYAGYIDGGASQEEFYKFIKPILEKMDGTEELLVKLNREDLLRKQRTFDNGSIPHQIHLGELHAILRRQEDFYPFLKDNREKIEKILTFRIPYYVGPLARGNSRFAWMTRKSEETITPWNFEEVVDKGASAQSFIERMTNFDKNLPNEKVLPKHSLLYEYFTVYNELTKVKYVTEGMRKPAFLSGEQKKAIVDLLFKTNRKVTVKQLKEDYFKKIECFDSVEISGVEDRFNASLGTYHDLLKIIKDKDFLDNEENEDILEDIVLTLTLFEDREMIEERLKTYAHLFDDKVMKQLKRRRYTGWGRLSRKLINGIRDKQSGKTILDFLKSDGFANRNFMQLIHDDSLTFKEDIQKAQVSGQGDSLHEHIANLAGSPAIKKGILQTVKVVDELVKVMGRHKPENIVIEMARENQTTQKGQKNSRERMKRIEEGIKELGSQILKEHPVENTQLQNEKLYLYYLQNGRDMYVDQELDINRLSDYDVDHIVPQSFLKDDSIDNKVLTRSDKARGKSDNVPSEEVVKKMKNYWRQLLNAKLITQRKFDNLTKAERGGLSELDKAGFIKRQLVETRQITKHVAQILDSRMNTKYDENDKLIREVKVITLKSKLVSDFRKDFQFYKVREINNYHHAHDAYLNAVVGTALIKKYPKLESEFVYGDYKVYDVRKMIAKSEQEIGKATAKYFFYSNIMNFFKTEITLANGEIRKRPLIETNGETGEIVWDKGRDFATVRKVLSMPQVNIVKKTEVQTGGFSKESILPKRNSDKLIARKKDWDPKKYGGFDSPTVAYSVLVVAKVEKGKSKKLKSVKELLGITIMERSSFEKNPIDFLEAKGYKEVKKDLIIKLPKYSLFELENGRKRMLASAGELQKGNELALPSKYVNFLYLASHYEKLKGSPEDNEQKQLFVEQHKHYLDEIIEQISEFSKRVILADANLDKVLSAYNKHRDKPIREQAENIIHLFTLTNLGAPAAFKYFDTTIDRKRYTSTKEVLDATLIHQSITGLYETRIDLSQLGGDGGPAPGGGGGVLNLEEEYRLHEKPVPSSIDPSWLQLFPTVWAERAGMGLANQVPPVVVELRSGASPVAVRQYPMSKEAREGIRPHIQRFLDLGVLVPCQSPWNTPLLPVKKPGTNDYRPVQDLREINKRVQDIHPTVPNPYNLLSSLPPSHTWYSVLDLKDAFFCLKLHPNSQPLFAFEWRDPEKGNTGQLTWTRLPQGFKNSPTLFNEALHRDLAPFRALNPQVVLLQYVDDLLVAAPTYRDCKEGTQKLLQELSKLGYRVSAKKAQLCQKEVTYLGYLLKEGKRWLTPARKATVMKIPPPTTPRQVREFLGTAGFCRLWIPGFASLAAPLYPLTKPSIPFIWTEEHQKAFDRIKEALLSAPALALPDLTKPFTLYVDERAGVARGVLTQTLGPWRRPVAYLSKKLDPVASGWPTCLKAVAAVALLLKDADKLTLGQNVTVIASHSLESIVRQPPDRWMTNARMTHYQSLLLNERVSFAPPAVLNPATLLPVESEATPVHRCSEILAEETGTRRDLKDQPLPGVPAWYTDGSSFIAEGKRRAGAAIVDGKRTVWASSLPEGTSAQKAELVALTQALRLAEGKDINIYTDSRYAFATAHIHGAIYKQRGWLTSAGKDIKNKEEILALLEAIHLPKRVAIIHCPGHQKGNDPVATGNRRADEAAKQAALSTRVLAETTKPAGKRTADGSEFEKRTADGSEFESPKKKAKVE

SEQ ID NO: 811 - protein, 2094 aa, synthetic construct
MPAAKRVKLDGGDKKYSIGLDIGTNSVGWAVITDEYKVPSKKFKVLGNTDRHSIKKNLIGALLFDSGETAEATRLKRTARRRYTRRKNRICYLQEIFSNEMAKVDDSFFHRLEESFLVEEDKKHERHPIFGNIVDEVAYHEKYPTIYHLRKKLVDSTDKADLRLIYLALAHMIKFRGHFLIEGDLNPDNSDVDKLFIQLVQTYNQLFEENPINASGVDAKAILSARLSKSRRLENLIAQLPGEKKNGLFGNLIALSLGLTPNFKSNFDLAEDAKLQLSKDTYDDDLDNLLAQIGDQYADLFLAAKNLSDAILLSDILRVNTEITKAPLSASMIKRYDEHHQDLTLLKALVRQQLPEKYKEIFFDQSKNGYAGYIDGGASQEEFYKFIKPILEKMDGTEELLVKLNREDLLRKQRTFDNGSIPHQIHLGELHAILRRQEDFYPFLKDNREKIEKILTFRIPYYVGPLARGNSRFAWMTRKSEETITPWNFEEVVDKGASAQSFIERMTNFDKNLPNEKVLPKHSLLYEYFTVYNELTKVKYVTEGMRKPAFLSGEQKKAIVDLLFKTNRKVTVKQLKEDYFKKIECFDSVEISGVEDRFNASLGTYHDLLKIIKDKDFLDNEENEDILEDIVLTLTLFEDREMIEERLKTYAHLFDDKVMKQLKRRRYTGWGRLSRKLINGIRDKQSGKTILDFLKSDGFANRNFMQLIHDDSLTFKEDIQKAQVSGQGDSLHEHIANLAGSPAIKKGILQTVKVVDELVKVMGRHKPENIVIEMARENQTTQKGQKNSRERMKRIEEGIKELGSQILKEHPVENTQLQNEKLYLYYLQNGRDMYVDQELDINRLSDYDVDHIVPQSFLKDDSIDNKVLTRSDKARGKSDNVPSEEVVKKMKNYWRQLLNAKLITQRKFDNLTKAERGGLSELDKAGFIKRQLVETRQITKHVAQILDSRMNTKYDENDKLIREVKVITLKSKLVSDFRKDFQFYKVREINNYHHAHDAYLNAVVGTALIKKYPKLESEFVYGDYKVYDVRKMIAKSEQEIGKATAKYFFYSNIMNFFKTEITLANGEIRKRPLIETNGETGEIVWDKGRDFATVRKVLSMPQVNIVKKTEVQTGGFSKESILPKRNSDKLIARKKDWDPKKYGGFDSPTVAYSVLVVAKVEKGKSKKLKSVKELLGITIMERSSFEKNPIDFLEAKGYKEVKKDLIIKLPKYSLFELENGRKRMLASAGELQKGNELALPSKYVNFLYLASHYEKLKGSPEDNEQKQLFVEQHKHYLDEIIEQISEFSKRVILADANLDKVLSAYNKHRDKPIREQAENIIHLFTLTNLGAPAAFKYFDTTIDRKRYTSTKEVLDATLIHQSITGLYETRIDLSQLGGDGGGGGEAAAKGSSGGVLNLEEEYRLHEKPVPSSIDPSWLQLFPTVWAERAGMGLANQVPPVVVELRSGASPVAVRQYPMSKEAREGIRPHIQRFLDLGVLVPCQSPWNTPLLPVKKPGTNDYRPVQDLREINKRVQDIHPTVPNPYNLLSSLPPSHTWYSVLDLKDAFFCLKLHPNSQPLFAFEWRDPEKGNTGQLTWTRLPQGFKNSPTLFNEALHRDLAPFRALNPQVVLLQYVDDLLVAAPTYRDCKEGTQKLLQELSKLGYRVSAKKAQLCQKEVTYLGYLLKEGKRWLTPARKATVMKIPPPTTPRQVREFLGTAGFCRLWIPGFASLAAPLYPLTKPSIPFIWTEEHQKAFDRIKEALLSAPALALPDLTKPFTLYVDERAGVARGVLTQTLGPWRRPVAYLSKKLDPVASGWPTCLKAVAAVALLLKDADKLTLGQNVTVIASHSLESIVRQPPDRWMTNARMTHYQSLLLNERVSFAPPAVLNPATLLPVESEATPVHRCSEILAEETGTRRDLKDQPLPGVPAWYTDGSSFIAEGKRRAGAAIVDGKRTVWASSLPEGTSAQKAELVALTQALRLAEGKDINIYTDSRYAFATAHIHGAIYKQRGWLTSAGKDIKNKEEILALLEAIHLPKRVAIIHCPGHQKGNDPVATGNRRADEAAKQAALSTRVLAETTKPAGKRTADGSEFEKRTADGSEFESPKKKAKVE

SEQ ID NO: 812 - protein, 2094 aa, synthetic construct
MPAAKRVKLDGGDKKYSIGLDIGTNSVGWAVITDEYKVPSKKFKVLGNTDRHSIKKNLIGALLFDSGETAEATRLKRTARRRYTRRKNRICYLQEIFSNEMAKVDDSFFHRLEESFLVEEDKKHERHPIFGNIVDEVAYHEKYPTIYHLRKKLVDSTDKADLRLIYLALAHMIKFRGHFLIEGDLNPDNSDVDKLFIQLVQTYNQLFEENPINASGVDAKAILSARLSKSRRLENLIAQLPGEKKNGLFGNLIALSLGLTPNFKSNFDLAEDAKLQLSKDTYDDDLDNLLAQIGDQYADLFLAAKNLSDAILLSDILRVNTEITKAPLSASMIKRYDEHHQDLTLLKALVRQQLPEKYKEIFFDQSKNGYAGYIDGGASQEEFYKFIKPILEKMDGTEELLVKLNREDLLRKQRTFDNGSIPHQIHLGELHAILRRQEDFYPFLKDNREKIEKILTFRIPYYVGPLARGNSRFAWMTRKSEETITPWNFEEVVDKGASAQSFIERMTNFDKNLPNEKVLPKHSLLYEYFTVYNELTKVKYVTEGMRKPAFLSGEQKKAIVDLLFKTNRKVTVKQLKEDYFKKIECFDSVEISGVEDRFNASLGTYHDLLKIIKDKDFLDNEENEDILEDIVLTLTLFEDREMIEERLKTYAHLFDDKVMKQLKRRRYTGWGRLSRKLINGIRDKQSGKTILDFLKSDGFANRNFMQLIHDDSLTFKEDIQKAQVSGQGDSLHEHIANLAGSPAIKKGILQTVKVVDELVKVMGRHKPENIVIEMARENQTTQKGQKNSRERMKRIEEGIKELGSQILKEHPVENTQLQNEKLYLYYLQNGRDMYVDQELDINRLSDYDVDHIVPQSFLKDDSIDNKVLTRSDKARGKSDNVPSEEVVKKMKNYWRQLLNAKLITQRKFDNLTKAERGGLSELDKAGFIKRQLVETRQITKHVAQILDSRMNTKYDENDKLIREVKVITLKSKLVSDFRKDFQFYKVREINNYHHAHDAYLNAVVGTALIKKYPKLESEFVYGDYKVYDVRKMIAKSEQEIGKATAKYFFYSNIMNFFKTEITLANGEIRKRPLIETNGETGEIVWDKGRDFATVRKVLSMPQVNIVKKTEVQTGGFSKESILPKRNSDKLIARKKDWDPKKYGGFDSPTVAYSVLVVAKVEKGKSKKLKSVKELLGITIMERSSFEKNPIDFLEAKGYKEVKKDLIIKLPKYSLFELENGRKRMLASAGELQKGNELALPSKYVNFLYLASHYEKLKGSPEDNEQKQLFVEQHKHYLDEIIEQISEFSKRVILADANLDKVLSAYNKHRDKPIREQAENIIHLFTLTNLGAPAAFKYFDTTIDRKRYTSTKEVLDATLIHQSITGLYETRIDLSQLGGDGGEAAAKGSSPAPGGVLNLEEEYRLHEKPVPSSIDPSWLQLFPTVWAERAGMGLANQVPPVVVELRSGASPVAVRQYPMSKEAREGIRPHIQRFLDLGVLVPCQSPWNTPLLPVKKPGTNDYRPVQDLREINKRVQDIHPTVPNPYNLLSSLPPSHTWYSVLDLKDAFFCLKLHPNSQPLFAFEWRDPEKGNTGQLTWTRLPQGFKNSPTLFNEALHRDLAPFRALNPQVVLLQYVDDLLVAAPTYRDCKEGTQKLLQELSKLGYRVSAKKAQLCQKEVTYLGYLLKEGKRWLTPARKATVMKIPPPTTPRQVREFLGTAGFCRLWIPGFASLAAPLYPLTKPSIPFIWTEEHQKAFDRIKEALLSAPALALPDLTKPFTLYVDERAGVARGVLTQTLGPWRRPVAYLSKKLDPVASGWPTCLKAVAAVALLLKDADKLTLGQNVTVIASHSLESIVRQPPDRWMTNARMTHYQSLLLNERVSFAPPAVLNPATLLPVESEATPVHRCSEILAEETGTRRDLKDQPLPGVPAWYTDGSSFIAEGKRRAGAAIVDGKRTVWASSLPEGTSAQKAELVALTQALRLAEGKDINIYTDSRYAFATAHIHGAIYKQRGWLTSAGKDIKNKEEILALLEAIHLPKRVAIIHCPGHQKGNDPVATGNRRADEAAKQAALSTRVLAETTKPAGKRTADGSEFEKRTADGSEFESPKKKAKVE

SEQ ID NO: 813 - protein, 2098 aa, synthetic construct
MPAAKRVKLDGGDKKYSIGLDIGTNSVGWAVITDEYKVPSKKFKVLGNTDRHSIKKNLIGALLFDSGETAEATRLKRTARRRYTRRKNRICYLQEIFSNEMAKVDDSFFHRLEESFLVEEDKKHERHPIFGNIVDEVAYHEKYPTIYHLRKKLVDSTDKADLRLIYLALAHMIKFRGHFLIEGDLNPDNSDVDKLFIQLVQTYNQLFEENPINASGVDAKAILSARLSKSRRLENLIAQLPGEKKNGLFGNLIALSLGLTPNFKSNFDLAEDAKLQLSKDTYDDDLDNLLAQIGDQYADLFLAAKNLSDAILLSDILRVNTEITKAPLSASMIKRYDEHHQDLTLLKALVRQQLPEKYKEIFFDQSKNGYAGYIDGGASQEEFYKFIKPILEKMDGTEELLVKLNREDLLRKQRTFDNGSIPHQIHLGELHAILRRQEDFYPFLKDNREKIEKILTFRIPYYVGPLARGNSRFAWMTRKSEETITPWNFEEVVDKGASAQSFIERMTNFDKNLPNEKVLPKHSLLYEYFTVYNELTKVKYVTEGMRKPAFLSGEQKKAIVDLLFKTNRKVTVKQLKEDYFKKIECFDSVEISGVEDRFNASLGTYHDLLKIIKDKDFLDNEENEDILEDIVLTLTLFEDREMIEERLKTYAHLFDDKVMKQLKRRRYTGWGRLSRKLINGIRDKQSGKTILDFLKSDGFANRNFMQLIHDDSLTFKEDIQKAQVSGQGDSLHEHIANLAGSPAIKKGILQTVKVVDELVKVMGRHKPENIVIEMARENQTTQKGQKNSRERMKRIEEGIKELGSQILKEHPVENTQLQNEKLYLYYLQNGRDMYVDQELDINRLSDYDVDHIVPQSFLKDDSIDNKVLTRSDKARGKSDNVPSEEVVKKMKNYWRQLLNAKLITQRKFDNLTKAERGGLSELDKAGFIKRQLVETRQITKHVAQILDSRMNTKYDENDKLIREVKVITLKSKLVSDFRKDFQFYKVREINNYHHAHDAYLNAVVGTALIKKYPKLESEFVYGDYKVYDVRKMIAKSEQEIGKATAKYFFYSNIMNFFKTEITLANGEIRKRPLIETNGETGEIVWDKGRDFATVRKVLSMPQVNIVKKTEVQTGGFSKESILPKRNSDKLIARKKDWDPKKYGGFDSPTVAYSVLVVAKVEKGKSKKLKSVKELLGITIMERSSFEKNPIDFLEAKGYKEVKKDLIIKLPKYSLFELENGRKRMLASAGELQKGNELALPSKYVNFLYLASHYEKLKGSPEDNEQKQLFVEQHKHYLDEIIEQISEFSKRVILADANLDKVLSAYNKHRDKPIREQAENIIHLFTLTNLGAPAAFKYFDTTIDRKRYTSTKEVLDATLIHQSITGLYETRIDLSQLGGDGGGSSGSSGSSGSSGSSGGVLNLEEEYRLHEKPVPSSIDPSWLQLFPTVWAERAGMGLANQVPPVVVELRSGASPVAVRQYPMSKEAREGIRPHIQRFLDLGVLVPCQSPWNTPLLPVKKPGTNDYRPVQDLREINKRVQDIHPTVPNPYNLLSSLPPSHTWYSVLDLKDAFFCLKLHPNSQPLFAFEWRDPEKGNTGQLTWTRLPQGFKNSPTLFNEALHRDLAPFRALNPQVVLLQYVDDLLVAAPTYRDCKEGTQKLLQELSKLGYRVSAKKAQLCQKEVTYLGYLLKEGKRWLTPARKATVMKIPPPTTPRQVREFLGTAGFCRLWIPGFASLAAPLYPLTKPSIPFIWTEEHQKAFDRIKEALLSAPALALPDLTKPFTLYVDERAGVARGVLTQTLGPWRRPVAYLSKKLDPVASGWPTCLKAVAAVALLLKDADKLTLGQNVTVIASHSLESIVRQPPDRWMTNARMTHYQSLLLNERVSFAPPAVLNPATLLPVESEATPVHRCSEILAEETGTRRDLKDQPLPGVPAWYTDGSSFIAEGKRRAGAAIVDGKRTVWASSLPEGTSAQKAELVALTQALRLAEGKDINIYTDSRYAFATAHIHGAIYKQRGWLTSAGKDIKNKEEILALLEAIHLPKRVAIIHCPGHQKGNDPVATGNRRADEAAKQAALSTRVLAETTKPAGKRTADGSEFEKRTADGSEFESPKKKAKVE

SEQ ID NO: 814 - protein, 2094 aa, synthetic construct
MPAAKRVKLDGGDKKYSIGLDIGTNSVGWAVITDEYKVPSKKFKVLGNTDRHSIKKNLIGALLFDSGETAEATRLKRTARRRYTRRKNRICYLQEIFSNEMAKVDDSFFHRLEESFLVEEDKKHERHPIFGNIVDEVAYHEKYPTIYHLRKKLVDSTDKADLRLIYLALAHMIKFRGHFLIEGDLNPDNSDVDKLFIQLVQTYNQLFEENPINASGVDAKAILSARLSKSRRLENLIAQLPGEKKNGLFGNLIALSLGLTPNFKSNFDLAEDAKLQLSKDTYDDDLDNLLAQIGDQYADLFLAAKNLSDAILLSDILRVNTEITKAPLSASMIKRYDEHHQDLTLLKALVRQQLPEKYKEIFFDQSKNGYAGYIDGGASQEEFYKFIKPILEKMDGTEELLVKLNREDLLRKQRTFDNGSIPHQIHLGELHAILRRQEDFYPFLKDNREKIEKILTFRIPYYVGPLARGNSRFAWMTRKSEETITPWNFEEVVDKGASAQSFIERMTNFDKNLPNEKVLPKHSLLYEYFTVYNELTKVKYVTEGMRKPAFLSGEQKKAIVDLLFKTNRKVTVKQLKEDYFKKIECFDSVEISGVEDRFNASLGTYHDLLKIIKDKDFLDNEENEDILEDIVLTLTLFEDREMIEERLKTYAHLFDDKVMKQLKRRRYTGWGRLSRKLINGIRDKQSGKTILDFLKSDGFANRNFMQLIHDDSLTFKEDIQKAQVSGQGDSLHEHIANLAGSPAIKKGILQTVKVVDELVKVMGRHKPENIVIEMARENQTTQKGQKNSRERMKRIEEGIKELGSQILKEHPVENTQLQNEKLYLYYLQNGRDMYVDQELDINRLSDYDVDHIVPQSFLKDDSIDNKVLTRSDKARGKSDNVPSEEVVKKMKNYWRQLLNAKLITQRKFDNLTKAERGGLSELDKAGFIKRQLVETRQITKHVAQILDSRMNTKYDENDKLIREVKVITLKSKLVSDFRKDFQFYKVREINNYHHAHDAYLNAVVGTALIKKYPKLESEFVYGDYKVYDVRKMIAKSEQEIGKATAKYFFYSNIMNFFKTEITLANGEIRKRPLIETNGETGEIVWDKGRDFATVRKVLSMPQVNIVKKTEVQTGGFSKESILPKRNSDKLIARKKDWDPKKYGGFDSPTVAYSVLVVAKVEKGKSKKLKSVKELLGITIMERSSFEKNPIDFLEAKGYKEVKKDLIIKLPKYSLFELENGRKRMLASAGELQKGNELALPSKYVNFLYLASHYEKLKGSPEDNEQKQLFVEQHKHYLDEIIEQISEFSKRVILADANLDKVLSAYNKHRDKPIREQAENIIHLFTLTNLGAPAAFKYFDTTIDRKRYTSTKEVLDATLIHQSITGLYETRIDLSQLGGDGGPAPAPAPAPAPGGVLNLEEEYRLHEKPVPSSIDPSWLQLFPTVWAERAGMGLANQVPPVVVELRSGASPVAVRQYPMSKEAREGIRPHIQRFLDLGVLVPCQSPWNTPLLPVKKPGTNDYRPVQDLREINKRVQDIHPTVPNPYNLLSSLPPSHTWYSVLDLKDAFFCLKLHPNSQPLFAFEWRDPEKGNTGQLTWTRLPQGFKNSPTLFNEALHRDLAPFRALNPQVVLLQYVDDLLVAAPTYRDCKEGTQKLLQELSKLGYRVSAKKAQLCQKEVTYLGYLLKEGKRWLTPARKATVMKIPPPTTPRQVREFLGTAGFCRLWIPGFASLAAPLYPLTKPSIPFIWTEEHQKAFDRIKEALLSAPALALPDLTKPFTLYVDERAGVARGVLTQTLGPWRRPVAYLSKKLDPVASGWPTCLKAVAAVALLLKDADKLTLGQNVTVIASHSLESIVRQPPDRWMTNARMTHYQSLLLNERVSFAPPAVLNPATLLPVESEATPVHRCSEILAEETGTRRDLKDQPLPGVPAWYTDGSSFIAEGKRRAGAAIVDGKRTVWASSLPEGTSAQKAELVALTQALRLAEGKDINIYTDSRYAFATAHIHGAIYKQRGWLTSAGKDIKNKEEILALLEAIHLPKRVAIIHCPGHQKGNDPVATGNRRADEAAKQAALSTRVLAETTKPAGKRTADGSEFEKRTADGSEFESPKKKAKVE

SEQ ID NO: 815 - protein, 2086 aa, synthetic construct
MPAAKRVKLDGGDKKYSIGLDIGTNSVGWAVITDEYKVPSKKFKVLGNTDRHSIKKNLIGALLFDSGETAEATRLKRTARRRYTRRKNRICYLQEIFSNEMAKVDDSFFHRLEESFLVEEDKKHERHPIFGNIVDEVAYHEKYPTIYHLRKKLVDSTDKADLRLIYLALAHMIKFRGHFLIEGDLNPDNSDVDKLFIQLVQTYNQLFEENPINASGVDAKAILSARLSKSRRLENLIAQLPGEKKNGLFGNLIALSLGLTPNFKSNFDLAEDAKLQLSKDTYDDDLDNLLAQIGDQYADLFLAAKNLSDAILLSDILRVNTEITKAPLSASMIKRYDEHHQDLTLLKALVRQQLPEKYKEIFFDQSKNGYAGYIDGGASQEEFYKFIKPILEKMDGTEELLVKLNREDLLRKQRTFDNGSIPHQIHLGELHAILRRQEDFYPFLKDNREKIEKILTFRIPYYVGPLARGNSRFAWMTRKSEETITPWNFEEVVDKGASAQSFIERMTNFDKNLPNEKVLPKHSLLYEYFTVYNELTKVKYVTEGMRKPAFLSGEQKKAIVDLLFKTNRKVTVKQLKEDYFKKIECFDSVEISGVEDRFNASLGTYHDLLKIIKDKDFLDNEENEDILEDIVLTLTLFEDREMIEERLKTYAHLFDDKVMKQLKRRRYTGWGRLSRKLINGIRDKQSGKTILDFLKSDGFANRNFMQLIHDDSLTFKEDIQKAQVSGQGDSLHEHIANLAGSPAIKKGILQTVKVVDELVKVMGRHKPENIVIEMARENQTTQKGQKNSRERMKRIEEGIKELGSQILKEHPVENTQLQNEKLYLYYLQNGRDMYVDQELDINRLSDYDVDHIVPQSFLKDDSIDNKVLTRSDKARGKSDNVPSEEVVKKMKNYWRQLLNAKLITQRKFDNLTKAERGGLSELDKAGFIKRQLVETRQITKHVAQILDSRMNTKYDENDKLIREVKVITLKSKLVSDFRKDFQFYKVREINNYHHAHDAYLNAVVGTALIKKYPKLESEFVYGDYKVYDVRKMIAKSEQEIGKATAKYFFYSNIMNFFKTEITLANGEIRKRPLIETNGETGEIVWDKGRDFATVRKVLSMPQVNIVKKTEVQTGGFSKESILPKRNSDKLIARKKDWDPKKYGGFDSPTVAYSVLVVAKVEKGKSKKLKSVKELLGITIMERSSFEKNPIDFLEAKGYKEVKKDLIIKLPKYSLFELENGRKRMLASAGELQKGNELALPSKYVNFLYLASHYEKLKGSPEDNEQKQLFVEQHKHYLDEIIEQISEFSKRVILADANLDKVLSAYNKHRDKPIREQAENIIHLFTLTNLGAPAAFKYFDTTIDRKRYTSTKEVLDATLIHQSITGLYETRIDLSQLGGDGGGGGGGVLNLEEEYRLHEKPVPSSIDPSWLQLFPTVWAERAGMGLANQVPPVVVELRSGASPVAVRQYPMSKEAREGIRPHIQRFLDLGVLVPCQSPWNTPLLPVKKPGTNDYRPVQDLREINKRVQDIHPTVPNPYNLLSSLPPSHTWYSVLDLKDAFFCLKLHPNSQPLFAFEWRDPEKGNTGQLTWTRLPQGFKNSPTLFNEALHRDLAPFRALNPQVVLLQYVDDLLVAAPTYRDCKEGTQKLLQELSKLGYRVSAKKAQLCQKEVTYLGYLLKEGKRWLTPARKATVMKIPPPTTPRQVREFLGTAGFCRLWIPGFASLAAPLYPLTKPSIPFIWTEEHQKAFDRIKEALLSAPALALPDLTKPFTLYVDERAGVARGVLTQTLGPWRRPVAYLSKKLDPVASGWPTCLKAVAAVALLLKDADKLTLGQNVTVIASHSLESIVRQPPDRWMTNARMTHYQSLLLNERVSFAPPAVLNPATLLPVESEATPVHRCSEILAEETGTRRDLKDQPLPGVPAWYTDGSSFIAEGKRRAGAAIVDGKRTVWASSLPEGTSAQKAELVALTQALRLAEGKDINIYTDSRYAFATAHIHGAIYKQRGWLTSAGKDIKNKEEILALLEAIHLPKRVAIIHCPGHQKGNDPVATGNRRADEAAKQAALSTRVLAETTKPAGKRTADGSEFEKRTADGSEFESPKKKAKVE

SEQ ID NO: 816 - protein, 2087 aa, synthetic construct
MPAAKRVKLDGGDKKYSIGLDIGTNSVGWAVITDEYKVPSKKFKVLGNTDRHSIKKNLIGALLFDSGETAEATRLKRTARRRYTRRKNRICYLQEIFSNEMAKVDDSFFHRLEESFLVEEDKKHERHPIFGNIVDEVAYHEKYPTIYHLRKKLVDSTDKADLRLIYLALAHMIKFRGHFLIEGDLNPDNSDVDKLFIQLVQTYNQLFEENPINASGVDAKAILSARLSKSRRLENLIAQLPGEKKNGLFGNLIALSLGLTPNFKSNFDLAEDAKLQLSKDTYDDDLDNLLAQIGDQYADLFLAAKNLSDAILLSDILRVNTEITKAPLSASMIKRYDEHHQDLTLLKALVRQQLPEKYKEIFFDQSKNGYAGYIDGGASQEEFYKFIKPILEKMDGTEELLVKLNREDLLRKQRTFDNGSIPHQIHLGELHAILRRQEDFYPFLKDNREKIEKILTFRIPYYVGPLARGNSRFAWMTRKSEETITPWNFEEVVDKGASAQSFIERMTNFDKNLPNEKVLPKHSLLYEYFTVYNELTKVKYVTEGMRKPAFLSGEQKKAIVDLLFKTNRKVTVKQLKEDYFKKIECFDSVEISGVEDRFNASLGTYHDLLKIIKDKDFLDNEENEDILEDIVLTLTLFEDREMIEERLKTYAHLFDDKVMKQLKRRRYTGWGRLSRKLINGIRDKQSGKTILDFLKSDGFANRNFMQLIHDDSLTFKEDIQKAQVSGQGDSLHEHIANLAGSPAIKKGILQTVKVVDELVKVMGRHKPENIVIEMARENQTTQKGQKNSRERMKRIEEGIKELGSQILKEHPVENTQLQNEKLYLYYLQNGRDMYVDQELDINRLSDYDVDHIVPQSFLKDDSIDNKVLTRSDKARGKSDNVPSEEVVKKMKNYWRQLLNAKLITQRKFDNLTKAERGGLSELDKAGFIKRQLVETRQITKHVAQILDSRMNTKYDENDKLIREVKVITLKSKLVSDFRKDFQFYKVREINNYHHAHDAYLNAVVGTALIKKYPKLESEFVYGDYKVYDVRKMIAKSEQEIGKATAKYFFYSNIMNFFKTEITLANGEIRKRPLIETNGETGEIVWDKGRDFATVRKVLSMPQVNIVKKTEVQTGGFSKESILPKRNSDKLIARKKDWDPKKYGGFDSPTVAYSVLVVAKVEKGKSKKLKSVKELLGITIMERSSFEKNPIDFLEAKGYKEVKKDLIIKLPKYSLFELENGRKRMLASAGELQKGNELALPSKYVNFLYLASHYEKLKGSPEDNEQKQLFVEQHKHYLDEIIEQISEFSKRVILADANLDKVLSAYNKHRDKPIREQAENIIHLFTLTNLGAPAAFKYFDTTIDRKRYTSTKEVLDATLIHQSITGLYETRIDLSQLGGDGGGGGGGGVLNLEEEYRLHEKPVPSSIDPSWLQLFPTVWAERAGMGLANQVPPVVVELRSGASPVAVRQYPMSKEAREGIRPHIQRFLDLGVLVPCQSPWNTPLLPVKKPGTNDYRPVQDLREINKRVQDIHPTVPNPYNLLSSLPPSHTWYSVLDLKDAFFCLKLHPNSQPLFAFEWRDPEKGNTGQLTWTRLPQGFKNSPTLFNEALHRDLAPFRALNPQVVLLQYVDDLLVAAPTYRDCKEGTQKLLQELSKLGYRVSAKKAQLCQKEVTYLGYLLKEGKRWLTPARKATVMKIPPPTTPRQVREFLGTAGFCRLWIPGFASLAAPLYPLTKPSIPFIWTEEHQKAFDRIKEALLSAPALALPDLTKPFTLYVDERAGVARGVLTQTLGPWRRPVAYLSKKLDPVASGWPTCLKAVAAVALLLKDADKLTLGQNVTVIASHSLESIVRQPPDRWMTNARMTHYQSLLLNERVSFAPPAVLNPATLLPVESEATPVHRCSEILAEETGTRRDLKDQPLPGVPAWYTDGSSFIAEGKRRAGAAIVDGKRTVWASSLPEGTSAQKAELVALTQALRLAEGKDINIYTDSRYAFATAHIHGAIYKQRGWLTSAGKDIKNKEEILALLEAIHLPKRVAIIHCPGHQKGNDPVATGNRRADEAAKQAALSTRVLAETTKPAGKRTADGSEFEKRTADGSEFESPKKKAKVE

SEQ ID NO: 817 - protein, 2091 aa, synthetic construct
MPAAKRVKLDGGDKKYSIGLDIGTNSVGWAVITDEYKVPSKKFKVLGNTDRHSIKKNLIGALLFDSGETAEATRLKRTARRRYTRRKNRICYLQEIFSNEMAKVDDSFFHRLEESFLVEEDKKHERHPIFGNIVDEVAYHEKYPTIYHLRKKLVDSTDKADLRLIYLALAHMIKFRGHFLIEGDLNPDNSDVDKLFIQLVQTYNQLFEENPINASGVDAKAILSARLSKSRRLENLIAQLPGEKKNGLFGNLIALSLGLTPNFKSNFDLAEDAKLQLSKDTYDDDLDNLLAQIGDQYADLFLAAKNLSDAILLSDILRVNTEITKAPLSASMIKRYDEHHQDLTLLKALVRQQLPEKYKEIFFDQSKNGYAGYIDGGASQEEFYKFIKPILEKMDGTEELLVKLNREDLLRKQRTFDNGSIPHQIHLGELHAILRRQEDFYPFLKDNREKIEKILTFRIPYYVGPLARGNSRFAWMTRKSEETITPWNFEEVVDKGASAQSFIERMTNFDKNLPNEKVLPKHSLLYEYFTVYNELTKVKYVTEGMRKPAFLSGEQKKAIVDLLFKTNRKVTVKQLKEDYFKKIECFDSVEISGVEDRFNASLGTYHDLLKIIKDKDFLDNEENEDILEDIVLTLTLFEDREMIEERLKTYAHLFDDKVMKQLKRRRYTGWGRLSRKLINGIRDKQSGKTILDFLKSDGFANRNFMQLIHDDSLTFKEDIQKAQVSGQGDSLHEHIANLAGSPAIKKGILQTVKVVDELVKVMGRHKPENIVIEMARENQTTQKGQKNSRERMKRIEEGIKELGSQILKEHPVENTQLQNEKLYLYYLQNGRDMYVDQELDINRLSDYDVDHIVPQSFLKDDSIDNKVLTRSDKARGKSDNVPSEEVVKKMKNYWRQLLNAKLITQRKFDNLTKAERGGLSELDKAGFIKRQLVETRQITKHVAQILDSRMNTKYDENDKLIREVKVITLKSKLVSDFRKDFQFYKVREINNYHHAHDAYLNAVVGTALIKKYPKLESEFVYGDYKVYDVRKMIAKSEQEIGKATAKYFFYSNIMNFFKTEITLANGEIRKRPLIETNGETGEIVWDKGRDFATVRKVLSMPQVNIVKKTEVQTGGFSKESILPKRNSDKLIARKKDWDPKKYGGFDSPTVAYSVLVVAKVEKGKSKKLKSVKELLGITIMERSSFEKNPIDFLEAKGYKEVKKDLIIKLPKYSLFELENGRKRMLASAGELQKGNELALPSKYVNFLYLASHYEKLKGSPEDNEQKQLFVEQHKHYLDEIIEQISEFSKRVILADANLDKVLSAYNKHRDKPIREQAENIIHLFTLTNLGAPAAFKYFDTTIDRKRYTSTKEVLDATLIHQSITGLYETRIDLSQLGGDGGEAAAKGGGGGVLNLEEEYRLHEKPVPSSIDPSWLQLFPTVWAERAGMGLANQVPPVVVELRSGASPVAVRQYPMSKEAREGIRPHIQRFLDLGVLVPCQSPWNTPLLPVKKPGTNDYRPVQDLREINKRVQDIHPTVPNPYNLLSSLPPSHTWYSVLDLKDAFFCLKLHPNSQPLFAFEWRDPEKGNTGQLTWTRLPQGFKNSPTLFNEALHRDLAPFRALNPQVVLLQYVDDLLVAAPTYRDCKEGTQKLLQELSKLGYRVSAKKAQLCQKEVTYLGYLLKEGKRWLTPARKATVMKIPPPTTPRQVREFLGTAGFCRLWIPGFASLAAPLYPLTKPSIPFIWTEEHQKAFDRIKEALLSAPALALPDLTKPFTLYVDERAGVARGVLTQTLGPWRRPVAYLSKKLDPVASGWPTCLKAVAAVALLLKDADKLTLGQNVTVIASHSLESIVRQPPDRWMTNARMTHYQSLLLNERVSFAPPAVLNPATLLPVESEATPVHRCSEILAEETGTRRDLKDQPLPGVPAWYTDGSSFIAEGKRRAGAAIVDGKRTVWASSLPEGTSAQKAELVALTQALRLAEGKDINIYTDSRYAFATAHIHGAIYKQRGWLTSAGKDIKNKEEILALLEAIHLPKRVAIIHCPGHQKGNDPVATGNRRADEAAKQAALSTRVLAETTKPAGKRTADGSEFEKRTADGSEFESPKKKAKVE

SEQ ID NO: 818 - protein, 2101 aa, synthetic construct
MPAAKRVKLDGGDKKYSIGLDIGTNSVGWAVITDEYKVPSKKFKVLGNTDRHSIKKNLIGALLFDSGETAEATRLKRTARRRYTRRKNRICYLQEIFSNEMAKVDDSFFHRLEESFLVEEDKKHERHPIFGNIVDEVAYHEKYPTIYHLRKKLVDSTDKADLRLIYLALAHMIKFRGHFLIEGDLNPDNSDVDKLFIQLVQTYNQLFEENPINASGVDAKAILSARLSKSRRLENLIAQLPGEKKNGLFGNLIALSLGLTPNFKSNFDLAEDAKLQLSKDTYDDDLDNLLAQIGDQYADLFLAAKNLSDAILLSDILRVNTEITKAPLSASMIKRYDEHHQDLTLLKALVRQQLPEKYKEIFFDQSKNGYAGYIDGGASQEEFYKFIKPILEKMDGTEELLVKLNREDLLRKQRTFDNGSIPHQIHLGELHAILRRQEDFYPFLKDNREKIEKILTFRIPYYVGPLARGNSRFAWMTRKSEETITPWNFEEVVDKGASAQSFIERMTNFDKNLPNEKVLPKHSLLYEYFTVYNELTKVKYVTEGMRKPAFLSGEQKKAIVDLLFKTNRKVTVKQLKEDYFKKIECFDSVEISGVEDRFNASLGTYHDLLKIIKDKDFLDNEENEDILEDIVLTLTLFEDREMIEERLKTYAHLFDDKVMKQLKRRRYTGWGRLSRKLINGIRDKQSGKTILDFLKSDGFANRNFMQLIHDDSLTFKEDIQKAQVSGQGDSLHEHIANLAGSPAIKKGILQTVKVVDELVKVMGRHKPENIVIEMARENQTTQKGQKNSRERMKRIEEGIKELGSQILKEHPVENTQLQNEKLYLYYLQNGRDMYVDQELDINRLSDYDVDHIVPQSFLKDDSIDNKVLTRSDKARGKSDNVPSEEVVKKMKNYWRQLLNAKLITQRKFDNLTKAERGGLSELDKAGFIKRQLVETRQITKHVAQILDSRMNTKYDENDKLIREVKVITLKSKLVSDFRKDFQFYKVREINNYHHAHDAYLNAVVGTALIKKYPKLESEFVYGDYKVYDVRKMIAKSEQEIGKATAKYFFYSNIMNFFKTEITLANGEIRKRPLIETNGETGEIVWDKGRDFATVRKVLSMPQVNIVKKTEVQTGGFSKESILPKRNSDKLIARKKDWDPKKYGGFDSPTVAYSVLVVAKVEKGKSKKLKSVKELLGITIMERSSFEKNPIDFLEAKGYKEVKKDLIIKLPKYSLFELENGRKRMLASAGELQKGNELALPSKYVNFLYLASHYEKLKGSPEDNEQKQLFVEQHKHYLDEIIEQISEFSKRVILADANLDKVLSAYNKHRDKPIREQAENIIHLFTLTNLGAPAAFKYFDTTIDRKRYTSTKEVLDATLIHQSITGLYETRIDLSQLGGDGGGSSGSSGSSGSSGSSGSSGGVLNLEEEYRLHEKPVPSSIDPSWLQLFPTVWAERAGMGLANQVPPVVVELRSGASPVAVRQYPMSKEAREGIRPHIQRFLDLGVLVPCQSPWNTPLLPVKKPGTNDYRPVQDLREINKRVQDIHPTVPNPYNLLSSLPPSHTWYSVLDLKDAFFCLKLHPNSQPLFAFEWRDPEKGNTGQLTWTRLPQGFKNSPTLFNEALHRDLAPFRALNPQVVLLQYVDDLLVAAPTYRDCKEGTQKLLQELSKLGYRVSAKKAQLCQKEVTYLGYLLKEGKRWLTPARKATVMKIPPPTTPRQVREFLGTAGFCRLWIPGFASLAAPLYPLTKPSIPFIWTEEHQKAFDRIKEALLSAPALALPDLTKPFTLYVDERAGVARGVLTQTLGPWRRPVAYLSKKLDPVASGWPTCLKAVAAVALLLKDADKLTLGQNVTVIASHSLESIVRQPPDRWMTNARMTHYQSLLLNERVSFAPPAVLNPATLLPVESEATPVHRCSEILAEETGTRRDLKDQPLPGVPAWYTDGSSFIAEGKRRAGAAIVDGKRTVWASSLPEGTSAQKAELVALTQALRLAEGKDINIYTDSRYAFATAHIHGAIYKQRGWLTSAGKDIKNKEEILALLEAIHLPKRVAIIHCPGHQKGNDPVATGNRRADEAAKQAALSTRVLAETTKPAGKRTADGSEFEKRTADGSEFESPKKKAKVE

SEQ ID NO: 819 - protein, 2091 aa, synthetic construct
MPAAKRVKLDGGDKKYSIGLDIGTNSVGWAVITDEYKVPSKKFKVLGNTDRHSIKKNLIGALLFDSGETAEATRLKRTARRRYTRRKNRICYLQEIFSNEMAKVDDSFFHRLEESFLVEEDKKHERHPIFGNIVDEVAYHEKYPTIYHLRKKLVDSTDKADLRLIYLALAHMIKFRGHFLIEGDLNPDNSDVDKLFIQLVQTYNQLFEENPINASGVDAKAILSARLSKSRRLENLIAQLPGEKKNGLFGNLIALSLGLTPNFKSNFDLAEDAKLQLSKDTYDDDLDNLLAQIGDQYADLFLAAKNLSDAILLSDILRVNTEITKAPLSASMIKRYDEHHQDLTLLKALVRQQLPEKYKEIFFDQSKNGYAGYIDGGASQEEFYKFIKPILEKMDGTEELLVKLNREDLLRKQRTFDNGSIPHQIHLGELHAILRRQEDFYPFLKDNREKIEKILTFRIPYYVGPLARGNSRFAWMTRKSEETITPWNFEEVVDKGASAQSFIERMTNFDKNLPNEKVLPKHSLLYEYFTVYNELTKVKYVTEGMRKPAFLSGEQKKAIVDLLFKTNRKVTVKQLKEDYFKKIECFDSVEISGVEDRFNASLGTYHDLLKIIKDKDFLDNEENEDILEDIVLTLTLFEDREMIEERLKTYAHLFDDKVMKQLKRRRYTGWGRLSRKLINGIRDKQSGKTILDFLKSDGFANRNFMQLIHDDSLTFKEDIQKAQVSGQGDSLHEHIANLAGSPAIKKGILQTVKVVDELVKVMGRHKPENIVIEMARENQTTQKGQKNSRERMKRIEEGIKELGSQILKEHPVENTQLQNEKLYLYYLQNGRDMYVDQELDINRLSDYDVDHIVPQSFLKDDSIDNKVLTRSDKARGKSDNVPSEEVVKKMKNYWRQLLNAKLITQRKFDNLTKAERGGLSELDKAGFIKRQLVETRQITKHVAQILDSRMNTKYDENDKLIREVKVITLKSKLVSDFRKDFQFYKVREINNYHHAHDAYLNAVVGTALIKKYPKLESEFVYGDYKVYDVRKMIAKSEQEIGKATAKYFFYSNIMNFFKTEITLANGEIRKRPLIETNGETGEIVWDKGRDFATVRKVLSMPQVNIVKKTEVQTGGFSKESILPKRNSDKLIARKKDWDPKKYGGFDSPTVAYSVLVVAKVEKGKSKKLKSVKELLGITIMERSSFEKNPIDFLEAKGYKEVKKDLIIKLPKYSLFELENGRKRMLASAGELQKGNELALPSKYVNFLYLASHYEKLKGSPEDNEQKQLFVEQHKHYLDEIIEQISEFSKRVILADANLDKVLSAYNKHRDKPIREQAENIIHLFTLTNLGAPAAFKYFDTTIDRKRYTSTKEVLDATLIHQSITGLYETRIDLSQLGGDGGPAPEAAAKGGVLNLEEEYRLHEKPVPSSIDPSWLQLFPTVWAERAGMGLANQVPPVVVELRSGASPVAVRQYPMSKEAREGIRPHIQRFLDLGVLVPCQSPWNTPLLPVKKPGTNDYRPVQDLREINKRVQDIHPTVPNPYNLLSSLPPSHTWYSVLDLKDAFFCLKLHPNSQPLFAFEWRDPEKGNTGQLTWTRLPQGFKNSPTLFNEALHRDLAPFRALNPQVVLLQYVDDLLVAAPTYRDCKEGTQKLLQELSKLGYRVSAKKAQLCQKEVTYLGYLLKEGKRWLTPARKATVMKIPPPTTPRQVREFLGTAGFCRLWIPGFASLAAPLYPLTKPSIPFIWTEEHQKAFDRIKEALLSAPALALPDLTKPFTLYVDERAGVARGVLTQTLGPWRRPVAYLSKKLDPVASGWPTCLKAVAAVALLLKDADKLTLGQNVTVIASHSLESIVRQPPDRWMTNARMTHYQSLLLNERVSFAPPAVLNPATLLPVESEATPVHRCSEILAEETGTRRDLKDQPLPGVPAWYTDGSSFIAEGKRRAGAAIVDGKRTVWASSLPEGTSAQKAELVALTQALRLAEGKDINIYTDSRYAFATAHIHGAIYKQRGWLTSAGKDIKNKEEILALLEAIHLPKRVAIIHCPGHQKGNDPVATGNRRADEAAKQAALSTRVLAETTKPAGKRTADGSEFEKRTADGSEFESPKKKAKVE

SEQ ID NO: 820 - protein, 2094 aa, synthetic construct
MPAAKRVKLDGGDKKYSIGLDIGTNSVGWAVITDEYKVPSKKFKVLGNTDRHSIKKNLIGALLFDSGETAEATRLKRTARRRYTRRKNRICYLQEIFSNEMAKVDDSFFHRLEESFLVEEDKKHERHPIFGNIVDEVAYHEKYPTIYHLRKKLVDSTDKADLRLIYLALAHMIKFRGHFLIEGDLNPDNSDVDKLFIQLVQTYNQLFEENPINASGVDAKAILSARLSKSRRLENLIAQLPGEKKNGLFGNLIALSLGLTPNFKSNFDLAEDAKLQLSKDTYDDDLDNLLAQIGDQYADLFLAAKNLSDAILLSDILRVNTEITKAPLSASMIKRYDEHHQDLTLLKALVRQQLPEKYKEIFFDQSKNGYAGYIDGGASQEEFYKFIKPILEKMDGTEELLVKLNREDLLRKQRTFDNGSIPHQIHLGELHAILRRQEDFYPFLKDNREKIEKILTFRIPYYVGPLARGNSRFAWMTRKSEETITPWNFEEVVDKGASAQSFIERMTNFDKNLPNEKVLPKHSLLYEYFTVYNELTKVKYVTEGMRKPAFLSGEQKKAIVDLLFKTNRKVTVKQLKEDYFKKIECFDSVEISGVEDRFNASLGTYHDLLKIIKDKDFLDNEENEDILEDIVLTLTLFEDREMIEERLKTYAHLFDDKVMKQLKRRRYTGWGRLSRKLINGIRDKQSGKTILDFLKSDGFANRNFMQLIHDDSLTFKEDIQKAQVSGQGDSLHEHIANLAGSPAIKKGILQTVKVVDELVKVMGRHKPENIVIEMARENQTTQKGQKNSRERMKRIEEGIKELGSQILKEHPVENTQLQNEKLYLYYLQNGRDMYVDQELDINRLSDYDVDHIVPQSFLKDDSIDNKVLTRSDKARGKSDNVPSEEVVKKMKNYWRQLLNAKLITQRKFDNLTKAERGGLSELDKAGFIKRQLVETRQITKHVAQILDSRMNTKYDENDKLIREVKVITLKSKLVSDFRKDFQFYKVREINNYHHAHDAYLNAVVGTALIKKYPKLESEFVYGDYKVYDVRKMIAKSEQEIGKATAKYFFYSNIMNFFKTEITLANGEIRKRPLIETNGETGEIVWDKGRDFATVRKVLSMPQVNIVKKTEVQTGGFSKESILPKRNSDKLIARKKDWDPKKYGGFDSPTVAYSVLVVAKVEKGKSKKLKSVKELLGITIMERSSFEKNPIDFLEAKGYKEVKKDLIIKLPKYSLFELENGRKRMLASAGELQKGNELALPSKYVNFLYLASHYEKLKGSPEDNEQKQLFVEQHKHYLDEIIEQISEFSKRVILADANLDKVLSAYNKHRDKPIREQAENIIHLFTLTNLGAPAAFKYFDTTIDRKRYTSTKEVLDATLIHQSITGLYETRIDLSQLGGDGGEAAAKGGSGSSGGVLNLEEEYRLHEKPVPSSIDPSWLQLFPTVWAERAGMGLANQVPPVVVELRSGASPVAVRQYPMSKEAREGIRPHIQRFLDLGVLVPCQSPWNTPLLPVKKPGTNDYRPVQDLREINKRVQDIHPTVPNPYNLLSSLPPSHTWYSVLDLKDAFFCLKLHPNSQPLFAFEWRDPEKGNTGQLTWTRLPQGFKNSPTLFNEALHRDLAPFRALNPQVVLLQYVDDLLVAAPTYRDCKEGTQKLLQELSKLGYRVSAKKAQLCQKEVTYLGYLLKEGKRWLTPARKATVMKIPPPTTPRQVREFLGTAGFCRLWIPGFASLAAPLYPLTKPSIPFIWTEEHQKAFDRIKEALLSAPALALPDLTKPFTLYVDERAGVARGVLTQTLGPWRRPVAYLSKKLDPVASGWPTCLKAVAAVALLLKDADKLTLGQNVTVIASHSLESIVRQPPDRWMTNARMTHYQSLLLNERVSFAPPAVLNPATLLPVESEATPVHRCSEILAEETGTRRDLKDQPLPGVPAWYTDGSSFIAEGKRRAGAAIVDGKRTVWASSLPEGTSAQKAELVALTQALRLAEGKDINIYTDSRYAFATAHIHGAIYKQRGWLTSAGKDIKNKEEILALLEAIHLPKRVAIIHCPGHQKGNDPVATGNRRADEAAKQAALSTRVLAETTKPAGKRTADGSEFEKRTADGSEFESPKKKAKVE

SEQ ID NO: 821 - protein, 2092 aa, synthetic construct
MPAAKRVKLDGGDKKYSIGLDIGTNSVGWAVITDEYKVPSKKFKVLGNTDRHSIKKNLIGALLFDSGETAEATRLKRTARRRYTRRKNRICYLQEIFSNEMAKVDDSFFHRLEESFLVEEDKKHERHPIFGNIVDEVAYHEKYPTIYHLRKKLVDSTDKADLRLIYLALAHMIKFRGHFLIEGDLNPDNSDVDKLFIQLVQTYNQLFEENPINASGVDAKAILSARLSKSRRLENLIAQLPGEKKNGLFGNLIALSLGLTPNFKSNFDLAEDAKLQLSKDTYDDDLDNLLAQIGDQYADLFLAAKNLSDAILLSDILRVNTEITKAPLSASMIKRYDEHHQDLTLLKALVRQQLPEKYKEIFFDQSKNGYAGYIDGGASQEEFYKFIKPILEKMDGTEELLVKLNREDLLRKQRTFDNGSIPHQIHLGELHAILRRQEDFYPFLKDNREKIEKILTFRIPYYVGPLARGNSRFAWMTRKSEETITPWNFEEVVDKGASAQSFIERMTNFDKNLPNEKVLPKHSLLYEYFTVYNELTKVKYVTEGMRKPAFLSGEQKKAIVDLLFKTNRKVTVKQLKEDYFKKIECFDSVEISGVEDRFNASLGTYHDLLKIIKDKDFLDNEENEDILEDIVLTLTLFEDREMIEERLKTYAHLFDDKVMKQLKRRRYTGWGRLSRKLINGIRDKQSGKTILDFLKSDGFANRNFMQLIHDDSLTFKEDIQKAQVSGQGDSLHEHIANLAGSPAIKKGILQTVKVVDELVKVMGRHKPENIVIEMARENQTTQKGQKNSRERMKRIEEGIKELGSQILKEHPVENTQLQNEKLYLYYLQNGRDMYVDQELDINRLSDYDVDHIVPQSFLKDDSIDNKVLTRSDKARGKSDNVPSEEVVKKMKNYWRQLLNAKLITQRKFDNLTKAERGGLSELDKAGFIKRQLVETRQITKHVAQILDSRMNTKYDENDKLIREVKVITLKSKLVSDFRKDFQFYKVREINNYHHAHDAYLNAVVGTALIKKYPKLESEFVYGDYKVYDVRKMIAKSEQEIGKATAKYFFYSNIMNFFKTEITLANGEIRKRPLIETNGETGEIVWDKGRDFATVRKVLSMPQVNIVKKTEVQTGGFSKESILPKRNSDKLIARKKDWDPKKYGGFDSPTVAYSVLVVAKVEKGKSKKLKSVKELLGITIMERSSFEKNPIDFLEAKGYKEVKKDLIIKLPKYSLFELENGRKRMLASAGELQKGNELALPSKYVNFLYLASHYEKLKGSPEDNEQKQLFVEQHKHYLDEIIEQISEFSKRVILADANLDKVLSAYNKHRDKPIREQAENIIHLFTLTNLGAPAAFKYFDTTIDRKRYTSTKEVLDATLIHQSITGLYETRIDLSQLGGDGGPAPAPAPAPGGVLNLEEEYRLHEKPVPSSIDPSWLQLFPTVWAERAGMGLANQVPPVVVELRSGASPVAVRQYPMSKEAREGIRPHIQRFLDLGVLVPCQSPWNTPLLPVKKPGTNDYRPVQDLREINKRVQDIHPTVPNPYNLLSSLPPSHTWYSVLDLKDAFFCLKLHPNSQPLFAFEWRDPEKGNTGQLTWTRLPQGFKNSPTLFNEALHRDLAPFRALNPQVVLLQYVDDLLVAAPTYRDCKEGTQKLLQELSKLGYRVSAKKAQLCQKEVTYLGYLLKEGKRWLTPARKATVMKIPPPTTPRQVREFLGTAGFCRLWIPGFASLAAPLYPLTKPSIPFIWTEEHQKAFDRIKEALLSAPALALPDLTKPFTLYVDERAGVARGVLTQTLGPWRRPVAYLSKKLDPVASGWPTCLKAVAAVALLLKDADKLTLGQNVTVIASHSLESIVRQPPDRWMTNARMTHYQSLLLNERVSFAPPAVLNPATLLPVESEATPVHRCSEILAEETGTRRDLKDQPLPGVPAWYTDGSSFIAEGKRRAGAAIVDGKRTVWASSLPEGTSAQKAELVALTQALRLAEGKDINIYTDSRYAFATAHIHGAIYKQRGWLTSAGKDIKNKEEILALLEAIHLPKRVAIIHCPGHQKGNDPVATGNRRADEAAKQAALSTRVLAETTKPAGKRTADGSEFEKRTADGSEFESPKKKAKVE

SEQ ID NO: 822 - protein, 2094 aa, synthetic construct
MPAAKRVKLDGGDKKYSIGLDIGTNSVGWAVITDEYKVPSKKFKVLGNTDRHSIKKNLIGALLFDSGETAEATRLKRTARRRYTRRKNRICYLQEIFSNEMAKVDDSFFHRLEESFLVEEDKKHERHPIFGNIVDEVAYHEKYPTIYHLRKKLVDSTDKADLRLIYLALAHMIKFRGHFLIEGDLNPDNSDVDKLFIQLVQTYNQLFEENPINASGVDAKAILSARLSKSRRLENLIAQLPGEKKNGLFGNLIALSLGLTPNFKSNFDLAEDAKLQLSKDTYDDDLDNLLAQIGDQYADLFLAAKNLSDAILLSDILRVNTEITKAPLSASMIKRYDEHHQDLTLLKALVRQQLPEKYKEIFFDQSKNGYAGYIDGGASQEEFYKFIKPILEKMDGTEELLVKLNREDLLRKQRTFDNGSIPHQIHLGELHAILRRQEDFYPFLKDNREKIEKILTFRIPYYVGPLARGNSRFAWMTRKSEETITPWNFEEVVDKGASAQSFIERMTNFDKNLPNEKVLPKHSLLYEYFTVYNELTKVKYVTEGMRKPAFLSGEQKKAIVDLLFKTNRKVTVKQLKEDYFKKIECFDSVEISGVEDRFNASLGTYHDLLKIIKDKDFLDNEENEDILEDIVLTLTLFEDREMIEERLKTYAHLFDDKVMKQLKRRRYTGWGRLSRKLINGIRDKQSGKTILDFLKSDGFANRNFMQLIHDDSLTFKEDIQKAQVSGQGDSLHEHIANLAGSPAIKKGILQTVKVVDELVKVMGRHKPENIVIEMARENQTTQKGQKNSRERMKRIEEGIKELGSQILKEHPVENTQLQNEKLYLYYLQNGRDMYVDQELDINRLSDYDVDHIVPQSFLKDDSIDNKVLTRSDKARGKSDNVPSEEVVKKMKNYWRQLLNAKLITQRKFDNLTKAERGGLSELDKAGFIKRQLVETRQITKHVAQILDSRMNTKYDENDKLIREVKVITLKSKLVSDFRKDFQFYKVREINNYHHAHDAYLNAVVGTALIKKYPKLESEFVYGDYKVYDVRKMIAKSEQEIGKATAKYFFYSNIMNFFKTEITLANGEIRKRPLIETNGETGEIVWDKGRDFATVRKVLSMPQVNIVKKTEVQTGGFSKESILPKRNSDKLIARKKDWDPKKYGGFDSPTVAYSVLVVAKVEKGKSKKLKSVKELLGITIMERSSFEKNPIDFLEAKGYKEVKKDLIIKLPKYSLFELENGRKRMLASAGELQKGNELALPSKYVNFLYLASHYEKLKGSPEDNEQKQLFVEQHKHYLDEIIEQISEFSKRVILADANLDKVLSAYNKHRDKPIREQAENIIHLFTLTNLGAPAAFKYFDTTIDRKRYTSTKEVLDATLIHQSITGLYETRIDLSQLGGDGGEAAAKGGGPAPGGVLNLEEEYRLHEKPVPSSIDPSWLQLFPTVWAERAGMGLANQVPPVVVELRSGASPVAVRQYPMSKEAREGIRPHIQRFLDLGVLVPCQSPWNTPLLPVKKPGTNDYRPVQDLREINKRVQDIHPTVPNPYNLLSSLPPSHTWYSVLDLKDAFFCLKLHPNSQPLFAFEWRDPEKGNTGQLTWTRLPQGFKNSPTLFNEALHRDLAPFRALNPQVVLLQYVDDLLVAAPTYRDCKEGTQKLLQELSKLGYRVSAKKAQLCQKEVTYLGYLLKEGKRWLTPARKATVMKIPPPTTPRQVREFLGTAGFCRLWIPGFASLAAPLYPLTKPSIPFIWTEEHQKAFDRIKEALLSAPALALPDLTKPFTLYVDERAGVARGVLTQTLGPWRRPVAYLSKKLDPVASGWPTCLKAVAAVALLLKDADKLTLGQNVTVIASHSLESIVRQPPDRWMTNARMTHYQSLLLNERVSFAPPAVLNPATLLPVESEATPVHRCSEILAEETGTRRDLKDQPLPGVPAWYTDGSSFIAEGKRRAGAAIVDGKRTVWASSLPEGTSAQKAELVALTQALRLAEGKDINIYTDSRYAFATAHIHGAIYKQRGWLTSAGKDIKNKEEILALLEAIHLPKRVAIIHCPGHQKGNDPVATGNRRADEAAKQAALSTRVLAETTKPAGKRTADGSEFEKRTADGSEFESPKKKAKVE

SEQ ID NO: 823 - protein, 2088 aa, synthetic construct
MPAAKRVKLDGGDKKYSIGLDIGTNSVGWAVITDEYKVPSKKFKVLGNTDRHSIKKNLIGALLFDSGETAEATRLKRTARRRYTRRKNRICYLQEIFSNEMAKVDDSFFHRLEESFLVEEDKKHERHPIFGNIVDEVAYHEKYPTIYHLRKKLVDSTDKADLRLIYLALAHMIKFRGHFLIEGDLNPDNSDVDKLFIQLVQTYNQLFEENPINASGVDAKAILSARLSKSRRLENLIAQLPGEKKNGLFGNLIALSLGLTPNFKSNFDLAEDAKLQLSKDTYDDDLDNLLAQIGDQYADLFLAAKNLSDAILLSDILRVNTEITKAPLSASMIKRYDEHHQDLTLLKALVRQQLPEKYKEIFFDQSKNGYAGYIDGGASQEEFYKFIKPILEKMDGTEELLVKLNREDLLRKQRTFDNGSIPHQIHLGELHAILRRQEDFYPFLKDNREKIEKILTFRIPYYVGPLARGNSRFAWMTRKSEETITPWNFEEVVDKGASAQSFIERMTNFDKNLPNEKVLPKHSLLYEYFTVYNELTKVKYVTEGMRKPAFLSGEQKKAIVDLLFKTNRKVTVKQLKEDYFKKIECFDSVEISGVEDRFNASLGTYHDLLKIIKDKDFLDNEENEDILEDIVLTLTLFEDREMIEERLKTYAHLFDDKVMKQLKRRRYTGWGRLSRKLINGIRDKQSGKTILDFLKSDGFANRNFMQLIHDDSLTFKEDIQKAQVSGQGDSLHEHIANLAGSPAIKKGILQTVKVVDELVKVMGRHKPENIVIEMARENQTTQKGQKNSRERMKRIEEGIKELGSQILKEHPVENTQLQNEKLYLYYLQNGRDMYVDQELDINRLSDYDVDHIVPQSFLKDDSIDNKVLTRSDKARGKSDNVPSEEVVKKMKNYWRQLLNAKLITQRKFDNLTKAERGGLSELDKAGFIKRQLVETRQITKHVAQILDSRMNTKYDENDKLIREVKVITLKSKLVSDFRKDFQFYKVREINNYHHAHDAYLNAVVGTALIKKYPKLESEFVYGDYKVYDVRKMIAKSEQEIGKATAKYFFYSNIMNFFKTEITLANGEIRKRPLIETNGETGEIVWDKGRDFATVRKVLSMPQVNIVKKTEVQTGGFSKESILPKRNSDKLIARKKDWDPKKYGGFDSPTVAYSVLVVAKVEKGKSKKLKSVKELLGITIMERSSFEKNPIDFLEAKGYKEVKKDLIIKLPKYSLFELENGRKRMLASAGELQKGNELALPSKYVNFLYLASHYEKLKGSPEDNEQKQLFVEQHKHYLDEIIEQISEFSKRVILADANLDKVLSAYNKHRDKPIREQAENIIHLFTLTNLGAPAAFKYFDTTIDRKRYTSTKEVLDATLIHQSITGLYETRIDLSQLGGDGGEAAAKGGVLNLEEEYRLHEKPVPSSIDPSWLQLFPTVWAERAGMGLANQVPPVVVELRSGASPVAVRQYPMSKEAREGIRPHIQRFLDLGVLVPCQSPWNTPLLPVKKPGTNDYRPVQDLREINKRVQDIHPTVPNPYNLLSSLPPSHTWYSVLDLKDAFFCLKLHPNSQPLFAFEWRDPEKGNTGQLTWTRLPQGFKNSPTLFNEALHRDLAPFRALNPQVVLLQYVDDLLVAAPTYRDCKEGTQKLLQELSKLGYRVSAKKAQLCQKEVTYLGYLLKEGKRWLTPARKATVMKIPPPTTPRQVREFLGTAGFCRLWIPGFASLAAPLYPLTKPSIPFIWTEEHQKAFDRIKEALLSAPALALPDLTKPFTLYVDERAGVARGVLTQTLGPWRRPVAYLSKKLDPVASGWPTCLKAVAAVALLLKDADKLTLGQNVTVIASHSLESIVRQPPDRWMTNARMTHYQSLLLNERVSFAPPAVLNPATLLPVESEATPVHRCSEILAEETGTRRDLKDQPLPGVPAWYTDGSSFIAEGKRRAGAAIVDGKRTVWASSLPEGTSAQKAELVALTQALRLAEGKDINIYTDSRYAFATAHIHGAIYKQRGWLTSAGKDIKNKEEILALLEAIHLPKRVAIIHCPGHQKGNDPVATGNRRADEAAKQAALSTRVLAETTKPAGKRTADGSEFEKRTADGSEFESPKKKAKVE

SEQ ID NO: 824 - protein, 2095 aa, synthetic construct
MPAAKRVKLDGGDKKYSIGLDIGTNSVGWAVITDEYKVPSKKFKVLGNTDRHSIKKNLIGALLFDSGETAEATRLKRTARRRYTRRKNRICYLQEIFSNEMAKVDDSFFHRLEESFLVEEDKKHERHPIFGNIVDEVAYHEKYPTIYHLRKKLVDSTDKADLRLIYLALAHMIKFRGHFLIEGDLNPDNSDVDKLFIQLVQTYNQLFEENPINASGVDAKAILSARLSKSRRLENLIAQLPGEKKNGLFGNLIALSLGLTPNFKSNFDLAEDAKLQLSKDTYDDDLDNLLAQIGDQYADLFLAAKNLSDAILLSDILRVNTEITKAPLSASMIKRYDEHHQDLTLLKALVRQQLPEKYKEIFFDQSKNGYAGYIDGGASQEEFYKFIKPILEKMDGTEELLVKLNREDLLRKQRTFDNGSIPHQIHLGELHAILRRQEDFYPFLKDNREKIEKILTFRIPYYVGPLARGNSRFAWMTRKSEETITPWNFEEVVDKGASAQSFIERMTNFDKNLPNEKVLPKHSLLYEYFTVYNELTKVKYVTEGMRKPAFLSGEQKKAIVDLLFKTNRKVTVKQLKEDYFKKIECFDSVEISGVEDRFNASLGTYHDLLKIIKDKDFLDNEENEDILEDIVLTLTLFEDREMIEERLKTYAHLFDDKVMKQLKRRRYTGWGRLSRKLINGIRDKQSGKTILDFLKSDGFANRNFMQLIHDDSLTFKEDIQKAQVSGQGDSLHEHIANLAGSPAIKKGILQTVKVVDELVKVMGRHKPENIVIEMARENQTTQKGQKNSRERMKRIEEGIKELGSQILKEHPVENTQLQNEKLYLYYLQNGRDMYVDQELDINRLSDYDVDHIVPQSFLKDDSIDNKVLTRSDKARGKSDNVPSEEVVKKMKNYWRQLLNAKLITQRKFDNLTKAERGGLSELDKAGFIKRQLVETRQITKHVAQILDSRMNTKYDENDKLIREVKVITLKSKLVSDFRKDFQFYKVREINNYHHAHDAYLNAVVGTALIKKYPKLESEFVYGDYKVYDVRKMIAKSEQEIGKATAKYFFYSNIMNFFKTEITLANGEIRKRPLIETNGETGEIVWDKGRDFATVRKVLSMPQVNIVKKTEVQTGGFSKESILPKRNSDKLIARKKDWDPKKYGGFDSPTVAYSVLVVAKVEKGKSKKLKSVKELLGITIMERSSFEKNPIDFLEAKGYKEVKKDLIIKLPKYSLFELENGRKRMLASAGELQKGNELALPSKYVNFLYLASHYEKLKGSPEDNEQKQLFVEQHKHYLDEIIEQISEFSKRVILADANLDKVLSAYNKHRDKPIREQAENIIHLFTLTNLGAPAAFKYFDTTIDRKRYTSTKEVLDATLIHQSITGLYETRIDLSQLGGDGGGGSGGSGGSGGSGGVLNLEEEYRLHEKPVPSSIDPSWLQLFPTVWAERAGMGLANQVPPVVVELRSGASPVAVRQYPMSKEAREGIRPHIQRFLDLGVLVPCQSPWNTPLLPVKKPGTNDYRPVQDLREINKRVQDIHPTVPNPYNLLSSLPPSHTWYSVLDLKDAFFCLKLHPNSQPLFAFEWRDPEKGNTGQLTWTRLPQGFKNSPTLFNEALHRDLAPFRALNPQVVLLQYVDDLLVAAPTYRDCKEGTQKLLQELSKLGYRVSAKKAQLCQKEVTYLGYLLKEGKRWLTPARKATVMKIPPPTTPRQVREFLGTAGFCRLWIPGFASLAAPLYPLTKPSIPFIWTEEHQKAFDRIKEALLSAPALALPDLTKPFTLYVDERAGVARGVLTQTLGPWRRPVAYLSKKLDPVASGWPTCLKAVAAVALLLKDADKLTLGQNVTVIASHSLESIVRQPPDRWMTNARMTHYQSLLLNERVSFAPPAVLNPATLLPVESEATPVHRCSEILAEETGTRRDLKDQPLPGVPAWYTDGSSFIAEGKRRAGAAIVDGKRTVWASSLPEGTSAQKAELVALTQALRLAEGKDINIYTDSRYAFATAHIHGAIYKQRGWLTSAGKDIKNKEEILALLEAIHLPKRVAIIHCPGHQKGNDPVATGNRRADEAAKQAALSTRVLAETTKPAGKRTADGSEFEKRTADGSEFESPKKKAKVE

SEQ ID NO: 825 - protein, 2094 aa, synthetic construct
MPAAKRVKLDGGDKKYSIGLDIGTNSVGWAVITDEYKVPSKKFKVLGNTDRHSIKKNLIGALLFDSGETAEATRLKRTARRRYTRRKNRICYLQEIFSNEMAKVDDSFFHRLEESFLVEEDKKHERHPIFGNIVDEVAYHEKYPTIYHLRKKLVDSTDKADLRLIYLALAHMIKFRGHFLIEGDLNPDNSDVDKLFIQLVQTYNQLFEENPINASGVDAKAILSARLSKSRRLENLIAQLPGEKKNGLFGNLIALSLGLTPNFKSNFDLAEDAKLQLSKDTYDDDLDNLLAQIGDQYADLFLAAKNLSDAILLSDILRVNTEITKAPLSASMIKRYDEHHQDLTLLKALVRQQLPEKYKEIFFDQSKNGYAGYIDGGASQEEFYKFIKPILEKMDGTEELLVKLNREDLLRKQRTFDNGSIPHQIHLGELHAILRRQEDFYPFLKDNREKIEKILTFRIPYYVGPLARGNSRFAWMTRKSEETITPWNFEEVVDKGASAQSFIERMTNFDKNLPNEKVLPKHSLLYEYFTVYNELTKVKYVTEGMRKPAFLSGEQKKAIVDLLFKTNRKVTVKQLKEDYFKKIECFDSVEISGVEDRFNASLGTYHDLLKIIKDKDFLDNEENEDILEDIVLTLTLFEDREMIEERLKTYAHLFDDKVMKQLKRRRYTGWGRLSRKLINGIRDKQSGKTILDFLKSDGFANRNFMQLIHDDSLTFKEDIQKAQVSGQGDSLHEHIANLAGSPAIKKGILQTVKVVDELVKVMGRHKPENIVIEMARENQTTQKGQKNSRERMKRIEEGIKELGSQILKEHPVENTQLQNEKLYLYYLQNGRDMYVDQELDINRLSDYDVDHIVPQSFLKDDSIDNKVLTRSDKARGKSDNVPSEEVVKKMKNYWRQLLNAKLITQRKFDNLTKAERGGLSELDKAGFIKRQLVETRQITKHVAQILDSRMNTKYDENDKLIREVKVITLKSKLVSDFRKDFQFYKVREINNYHHAHDAYLNAVVGTALIKKYPKLESEFVYGDYKVYDVRKMIAKSEQEIGKATAKYFFYSNIMNFFKTEITLANGEIRKRPLIETNGETGEIVWDKGRDFATVRKVLSMPQVNIVKKTEVQTGGFSKESILPKRNSDKLIARKKDWDPKKYGGFDSPTVAYSVLVVAKVEKGKSKKLKSVKELLGITIMERSSFEKNPIDFLEAKGYKEVKKDLIIKLPKYSLFELENGRKRMLASAGELQKGNELALPSKYVNFLYLASHYEKLKGSPEDNEQKQLFVEQHKHYLDEIIEQISEFSKRVILADANLDKVLSAYNKHRDKPIREQAENIIHLFTLTNLGAPAAFKYFDTTIDRKRYTSTKEVLDATLIHQSITGLYETRIDLSQLGGDGGGGSGSSEAAAKGGVLNLEEEYRLHEKPVPSSIDPSWLQLFPTVWAERAGMGLANQVPPVVVELRSGASPVAVRQYPMSKEAREGIRPHIQRFLDLGVLVPCQSPWNTPLLPVKKPGTNDYRPVQDLREINKRVQDIHPTVPNPYNLLSSLPPSHTWYSVLDLKDAFFCLKLHPNSQPLFAFEWRDPEKGNTGQLTWTRLPQGFKNSPTLFNEALHRDLAPFRALNPQVVLLQYVDDLLVAAPTYRDCKEGTQKLLQELSKLGYRVSAKKAQLCQKEVTYLGYLLKEGKRWLTPARKATVMKIPPPTTPRQVREFLGTAGFCRLWIPGFASLAAPLYPLTKPSIPFIWTEEHQKAFDRIKEALLSAPALALPDLTKPFTLYVDERAGVARGVLTQTLGPWRRPVAYLSKKLDPVASGWPTCLKAVAAVALLLKDADKLTLGQNVTVIASHSLESIVRQPPDRWMTNARMTHYQSLLLNERVSFAPPAVLNPATLLPVESEATPVHRCSEILAEETGTRRDLKDQPLPGVPAWYTDGSSFIAEGKRRAGAAIVDGKRTVWASSLPEGTSAQKAELVALTQALRLAEGKDINIYTDSRYAFATAHIHGAIYKQRGWLTSAGKDIKNKEEILALLEAIHLPKRVAIIHCPGHQKGNDPVATGNRRADEAAKQAALSTRVLAETTKPAGKRTADGSEFEKRTADGSEFESPKKKAKVE

SEQ ID NO: 826 - protein, 2094 aa, synthetic construct
MPAAKRVKLDGGDKKYSIGLDIGTNSVGWAVITDEYKVPSKKFKVLGNTDRHSIKKNLIGALLFDSGETAEATRLKRTARRRYTRRKNRICYLQEIFSNEMAKVDDSFFHRLEESFLVEEDKKHERHPIFGNIVDEVAYHEKYPTIYHLRKKLVDSTDKADLRLIYLALAHMIKFRGHFLIEGDLNPDNSDVDKLFIQLVQTYNQLFEENPINASGVDAKAILSARLSKSRRLENLIAQLPGEKKNGLFGNLIALSLGLTPNFKSNFDLAEDAKLQLSKDTYDDDLDNLLAQIGDQYADLFLAAKNLSDAILLSDILRVNTEITKAPLSASMIKRYDEHHQDLTLLKALVRQQLPEKYKEIFFDQSKNGYAGYIDGGASQEEFYKFIKPILEKMDGTEELLVKLNREDLLRKQRTFDNGSIPHQIHLGELHAILRRQEDFYPFLKDNREKIEKILTFRIPYYVGPLARGNSRFAWMTRKSEETITPWNFEEVVDKGASAQSFIERMTNFDKNLPNEKVLPKHSLLYEYFTVYNELTKVKYVTEGMRKPAFLSGEQKKAIVDLLFKTNRKVTVKQLKEDYFKKIECFDSVEISGVEDRFNASLGTYHDLLKIIKDKDFLDNEENEDILEDIVLTLTLFEDREMIEERLKTYAHLFDDKVMKQLKRRRYTGWGRLSRKLINGIRDKQSGKTILDFLKSDGFANRNFMQLIHDDSLTFKEDIQKAQVSGQGDSLHEHIANLAGSPAIKKGILQTVKVVDELVKVMGRHKPENIVIEMARENQTTQKGQKNSRERMKRIEEGIKELGSQILKEHPVENTQLQNEKLYLYYLQNGRDMYVDQELDINRLSDYDVDHIVPQSFLKDDSIDNKVLTRSDKARGKSDNVPSEEVVKKMKNYWRQLLNAKLITQRKFDNLTKAERGGLSELDKAGFIKRQLVETRQITKHVAQILDSRMNTKYDENDKLIREVKVITLKSKLVSDFRKDFQFYKVREINNYHHAHDAYLNAVVGTALIKKYPKLESEFVYGDYKVYDVRKMIAKSEQEIGKATAKYFFYSNIMNFFKTEITLANGEIRKRPLIETNGETGEIVWDKGRDFATVRKVLSMPQVNIVKKTEVQTGGFSKESILPKRNSDKLIARKKDWDPKKYGGFDSPTVAYSVLVVAKVEKGKSKKLKSVKELLGITIMERSSFEKNPIDFLEAKGYKEVKKDLIIKLPKYSLFELENGRKRMLASAGELQKGNELALPSKYVNFLYLASHYEKLKGSPEDNEQKQLFVEQHKHYLDEIIEQISEFSKRVILADANLDKVLSAYNKHRDKPIREQAENIIHLFTLTNLGAPAAFKYFDTTIDRKRYTSTKEVLDATLIHQSITGLYETRIDLSQLGGDGGEAAAKGGGGSSGGVLNLEEEYRLHEKPVPSSIDPSWLQLFPTVWAERAGMGLANQVPPVVVELRSGASPVAVRQYPMSKEAREGIRPHIQRFLDLGVLVPCQSPWNTPLLPVKKPGTNDYRPVQDLREINKRVQDIHPTVPNPYNLLSSLPPSHTWYSVLDLKDAFFCLKLHPNSQPLFAFEWRDPEKGNTGQLTWTRLPQGFKNSPTLFNEALHRDLAPFRALNPQVVLLQYVDDLLVAAPTYRDCKEGTQKLLQELSKLGYRVSAKKAQLCQKEVTYLGYLLKEGKRWLTPARKATVMKIPPPTTPRQVREFLGTAGFCRLWIPGFASLAAPLYPLTKPSIPFIWTEEHQKAFDRIKEALLSAPALALPDLTKPFTLYVDERAGVARGVLTQTLGPWRRPVAYLSKKLDPVASGWPTCLKAVAAVALLLKDADKLTLGQNVTVIASHSLESIVRQPPDRWMTNARMTHYQSLLLNERVSFAPPAVLNPATLLPVESEATPVHRCSEILAEETGTRRDLKDQPLPGVPAWYTDGSSFIAEGKRRAGAAIVDGKRTVWASSLPEGTSAQKAELVALTQALRLAEGKDINIYTDSRYAFATAHIHGAIYKQRGWLTSAGKDIKNKEEILALLEAIHLPKRVAIIHCPGHQKGNDPVATGNRRADEAAKQAALSTRVLAETTKPAGKRTADGSEFEKRTADGSEFESPKKKAKVE

SEQ ID NO: 827 - protein, 2103 aa, synthetic construct
MPAAKRVKLDGGDKKYSIGLDIGTNSVGWAVITDEYKVPSKKFKVLGNTDRHSIKKNLIGALLFDSGETAEATRLKRTARRRYTRRKNRICYLQEIFSNEMAKVDDSFFHRLEESFLVEEDKKHERHPIFGNIVDEVAYHEKYPTIYHLRKKLVDSTDKADLRLIYLALAHMIKFRGHFLIEGDLNPDNSDVDKLFIQLVQTYNQLFEENPINASGVDAKAILSARLSKSRRLENLIAQLPGEKKNGLFGNLIALSLGLTPNFKSNFDLAEDAKLQLSKDTYDDDLDNLLAQIGDQYADLFLAAKNLSDAILLSDILRVNTEITKAPLSASMIKRYDEHHQDLTLLKALVRQQLPEKYKEIFFDQSKNGYAGYIDGGASQEEFYKFIKPILEKMDGTEELLVKLNREDLLRKQRTFDNGSIPHQIHLGELHAILRRQEDFYPFLKDNREKIEKILTFRIPYYVGPLARGNSRFAWMTRKSEETITPWNFEEVVDKGASAQSFIERMTNFDKNLPNEKVLPKHSLLYEYFTVYNELTKVKYVTEGMRKPAFLSGEQKKAIVDLLFKTNRKVTVKQLKEDYFKKIECFDSVEISGVEDRFNASLGTYHDLLKIIKDKDFLDNEENEDILEDIVLTLTLFEDREMIEERLKTYAHLFDDKVMKQLKRRRYTGWGRLSRKLINGIRDKQSGKTILDFLKSDGFANRNFMQLIHDDSLTFKEDIQKAQVSGQGDSLHEHIANLAGSPAIKKGILQTVKVVDELVKVMGRHKPENIVIEMARENQTTQKGQKNSRERMKRIEEGIKELGSQILKEHPVENTQLQNEKLYLYYLQNGRDMYVDQELDINRLSDYDVDHIVPQSFLKDDSIDNKVLTRSDKARGKSDNVPSEEVVKKMKNYWRQLLNAKLITQRKFDNLTKAERGGLSELDKAGFIKRQLVETRQITKHVAQILDSRMNTKYDENDKLIREVKVITLKSKLVSDFRKDFQFYKVREINNYHHAHDAYLNAVVGTALIKKYPKLESEFVYGDYKVYDVRKMIAKSEQEIGKATAKYFFYSNIMNFFKTEITLANGEIRKRPLIETNGETGEIVWDKGRDFATVRKVLSMPQVNIVKKTEVQTGGFSKESILPKRNSDKLIARKKDWDPKKYGGFDSPTVAYSVLVVAKVEKGKSKKLKSVKELLGITIMERSSFEKNPIDFLEAKGYKEVKKDLIIKLPKYSLFELENGRKRMLASAGELQKGNELALPSKYVNFLYLASHYEKLKGSPEDNEQKQLFVEQHKHYLDEIIEQISEFSKRVILADANLDKVLSAYNKHRDKPIREQAENIIHLFTLTNLGAPAAFKYFDTTIDRKRYTSTKEVLDATLIHQSITGLYETRIDLSQLGGDGGEAAAKEAAAKEAAAKEAAAKGGVLNLEEEYRLHEKPVPSSIDPSWLQLFPTVWAERAGMGLANQVPPVVVELRSGASPVAVRQYPMSKEAREGIRPHIQRFLDLGVLVPCQSPWNTPLLPVKKPGTNDYRPVQDLREINKRVQDIHPTVPNPYNLLSSLPPSHTWYSVLDLKDAFFCLKLHPNSQPLFAFEWRDPEKGNTGQLTWTRLPQGFKNSPTLFNEALHRDLAPFRALNPQVVLLQYVDDLLVAAPTYRDCKEGTQKLLQELSKLGYRVSAKKAQLCQKEVTYLGYLLKEGKRWLTPARKATVMKIPPPTTPRQVREFLGTAGFCRLWIPGFASLAAPLYPLTKPSIPFIWTEEHQKAFDRIKEALLSAPALALPDLTKPFTLYVDERAGVARGVLTQTLGPWRRPVAYLSKKLDPVASGWPTCLKAVAAVALLLKDADKLTLGQNVTVIASHSLESIVRQPPDRWMTNARMTHYQSLLLNERVSFAPPAVLNPATLLPVESEATPVHRCSEILAEETGTRRDLKDQPLPGVPAWYTDGSSFIAEGKRRAGAAIVDGKRTVWASSLPEGTSAQKAELVALTQALRLAEGKDINIYTDSRYAFATAHIHGAIYKQRGWLTSAGKDIKNKEEILALLEAIHLPKRVAIIHCPGHQKGNDPVATGNRRADEAAKQAALSTRVLAETTKPAGKRTADGSEFEKRTADGSEFESPKKKAKVE

SEQ ID NO: 828 - protein, 2092 aa, synthetic construct
MPAAKRVKLDGGDKKYSIGLDIGTNSVGWAVITDEYKVPSKKFKVLGNTDRHSIKKNLIGALLFDSGETAEATRLKRTARRRYTRRKNRICYLQEIFSNEMAKVDDSFFHRLEESFLVEEDKKHERHPIFGNIVDEVAYHEKYPTIYHLRKKLVDSTDKADLRLIYLALAHMIKFRGHFLIEGDLNPDNSDVDKLFIQLVQTYNQLFEENPINASGVDAKAILSARLSKSRRLENLIAQLPGEKKNGLFGNLIALSLGLTPNFKSNFDLAEDAKLQLSKDTYDDDLDNLLAQIGDQYADLFLAAKNLSDAILLSDILRVNTEITKAPLSASMIKRYDEHHQDLTLLKALVRQQLPEKYKEIFFDQSKNGYAGYIDGGASQEEFYKFIKPILEKMDGTEELLVKLNREDLLRKQRTFDNGSIPHQIHLGELHAILRRQEDFYPFLKDNREKIEKILTFRIPYYVGPLARGNSRFAWMTRKSEETITPWNFEEVVDKGASAQSFIERMTNFDKNLPNEKVLPKHSLLYEYFTVYNELTKVKYVTEGMRKPAFLSGEQKKAIVDLLFKTNRKVTVKQLKEDYFKKIECFDSVEISGVEDRFNASLGTYHDLLKIIKDKDFLDNEENEDILEDIVLTLTLFEDREMIEERLKTYAHLFDDKVMKQLKRRRYTGWGRLSRKLINGIRDKQSGKTILDFLKSDGFANRNFMQLIHDDSLTFKEDIQKAQVSGQGDSLHEHIANLAGSPAIKKGILQTVKVVDELVKVMGRHKPENIVIEMARENQTTQKGQKNSRERMKRIEEGIKELGSQILKEHPVENTQLQNEKLYLYYLQNGRDMYVDQELDINRLSDYDVDHIVPQSFLKDDSIDNKVLTRSDKARGKSDNVPSEEVVKKMKNYWRQLLNAKLITQRKFDNLTKAERGGLSELDKAGFIKRQLVETRQITKHVAQILDSRMNTKYDENDKLIREVKVITLKSKLVSDFRKDFQFYKVREINNYHHAHDAYLNAVVGTALIKKYPKLESEFVYGDYKVYDVRKMIAKSEQEIGKATAKYFFYSNIMNFFKTEITLANGEIRKRPLIETNGETGEIVWDKGRDFATVRKVLSMPQVNIVKKTEVQTGGFSKESILPKRNSDKLIARKKDWDPKKYGGFDSPTVAYSVLVVAKVEKGKSKKLKSVKELLGITIMERSSFEKNPIDFLEAKGYKEVKKDLIIKLPKYSLFELENGRKRMLASAGELQKGNELALPSKYVNFLYLASHYEKLKGSPEDNEQKQLFVEQHKHYLDEIIEQISEFSKRVILADANLDKVLSAYNKHRDKPIREQAENIIHLFTLTNLGAPAAFKYFDTTIDRKRYTSTKEVLDATLIHQSITGLYETRIDLSQLGGDGGGGSGGGGSSGGVLNLEEEYRLHEKPVPSSIDPSWLQLFPTVWAERAGMGLANQVPPVVVELRSGASPVAVRQYPMSKEAREGIRPHIQRFLDLGVLVPCQSPWNTPLLPVKKPGTNDYRPVQDLREINKRVQDIHPTVPNPYNLLSSLPPSHTWYSVLDLKDAFFCLKLHPNSQPLFAFEWRDPEKGNTGQLTWTRLPQGFKNSPTLFNEALHRDLAPFRALNPQVVLLQYVDDLLVAAPTYRDCKEGTQKLLQELSKLGYRVSAKKAQLCQKEVTYLGYLLKEGKRWLTPARKATVMKIPPPTTPRQVREFLGTAGFCRLWIPGFASLAAPLYPLTKPSIPFIWTEEHQKAFDRIKEALLSAPALALPDLTKPFTLYVDERAGVARGVLTQTLGPWRRPVAYLSKKLDPVASGWPTCLKAVAAVALLLKDADKLTLGQNVTVIASHSLESIVRQPPDRWMTNARMTHYQSLLLNERVSFAPPAVLNPATLLPVESEATPVHRCSEILAEETGTRRDLKDQPLPGVPAWYTDGSSFIAEGKRRAGAAIVDGKRTVWASSLPEGTSAQKAELVALTQALRLAEGKDINIYTDSRYAFATAHIHGAIYKQRGWLTSAGKDIKNKEEILALLEAIHLPKRVAIIHCPGHQKGNDPVATGNRRADEAAKQAALSTRVLAETTKPAGKRTADGSEFEKRTADGSEFESPKKKAKVE

SEQ ID NO: 829 - protein, 2094 aa, synthetic construct
MPAAKRVKLDGGDKKYSIGLDIGTNSVGWAVITDEYKVPSKKFKVLGNTDRHSIKKNLIGALLFDSGETAEATRLKRTARRRYTRRKNRICYLQEIFSNEMAKVDDSFFHRLEESFLVEEDKKHERHPIFGNIVDEVAYHEKYPTIYHLRKKLVDSTDKADLRLIYLALAHMIKFRGHFLIEGDLNPDNSDVDKLFIQLVQTYNQLFEENPINASGVDAKAILSARLSKSRRLENLIAQLPGEKKNGLFGNLIALSLGLTPNFKSNFDLAEDAKLQLSKDTYDDDLDNLLAQIGDQYADLFLAAKNLSDAILLSDILRVNTEITKAPLSASMIKRYDEHHQDLTLLKALVRQQLPEKYKEIFFDQSKNGYAGYIDGGASQEEFYKFIKPILEKMDGTEELLVKLNREDLLRKQRTFDNGSIPHQIHLGELHAILRRQEDFYPFLKDNREKIEKILTFRIPYYVGPLARGNSRFAWMTRKSEETITPWNFEEVVDKGASAQSFIERMTNFDKNLPNEKVLPKHSLLYEYFTVYNELTKVKYVTEGMRKPAFLSGEQKKAIVDLLFKTNRKVTVKQLKEDYFKKIECFDSVEISGVEDRFNASLGTYHDLLKIIKDKDFLDNEENEDILEDIVLTLTLFEDREMIEERLKTYAHLFDDKVMKQLKRRRYTGWGRLSRKLINGIRDKQSGKTILDFLKSDGFANRNFMQLIHDDSLTFKEDIQKAQVSGQGDSLHEHIANLAGSPAIKKGILQTVKVVDELVKVMGRHKPENIVIEMARENQTTQKGQKNSRERMKRIEEGIKELGSQILKEHPVENTQLQNEKLYLYYLQNGRDMYVDQELDINRLSDYDVDHIVPQSFLKDDSIDNKVLTRSDKARGKSDNVPSEEVVKKMKNYWRQLLNAKLITQRKFDNLTKAERGGLSELDKAGFIKRQLVETRQITKHVAQILDSRMNTKYDENDKLIREVKVITLKSKLVSDFRKDFQFYKVREINNYHHAHDAYLNAVVGTALIKKYPKLESEFVYGDYKVYDVRKMIAKSEQEIGKATAKYFFYSNIMNFFKTEITLANGEIRKRPLIETNGETGEIVWDKGRDFATVRKVLSMPQVNIVKKTEVQTGGFSKESILPKRNSDKLIARKKDWDPKKYGGFDSPTVAYSVLVVAKVEKGKSKKLKSVKELLGITIMERSSFEKNPIDFLEAKGYKEVKKDLIIKLPKYSLFELENGRKRMLASAGELQKGNELALPSKYVNFLYLASHYEKLKGSPEDNEQKQLFVEQHKHYLDEIIEQISEFSKRVILADANLDKVLSAYNKHRDKPIREQAENIIHLFTLTNLGAPAAFKYFDTTIDRKRYTSTKEVLDATLIHQSITGLYETRIDLSQLGGDGGEAAAKGGSPAPGGVLNLEEEYRLHEKPVPSSIDPSWLQLFPTVWAERAGMGLANQVPPVVVELRSGASPVAVRQYPMSKEAREGIRPHIQRFLDLGVLVPCQSPWNTPLLPVKKPGTNDYRPVQDLREINKRVQDIHPTVPNPYNLLSSLPPSHTWYSVLDLKDAFFCLKLHPNSQPLFAFEWRDPEKGNTGQLTWTRLPQGFKNSPTLFNEALHRDLAPFRALNPQVVLLQYVDDLLVAAPTYRDCKEGTQKLLQELSKLGYRVSAKKAQLCQKEVTYLGYLLKEGKRWLTPARKATVMKIPPPTTPRQVREFLGTAGFCRLWIPGFASLAAPLYPLTKPSIPFIWTEEHQKAFDRIKEALLSAPALALPDLTKPFTLYVDERAGVARGVLTQTLGPWRRPVAYLSKKLDPVASGWPTCLKAVAAVALLLKDADKLTLGQNVTVIASHSLESIVRQPPDRWMTNARMTHYQSLLLNERVSFAPPAVLNPATLLPVESEATPVHRCSEILAEETGTRRDLKDQPLPGVPAWYTDGSSFIAEGKRRAGAAIVDGKRTVWASSLPEGTSAQKAELVALTQALRLAEGKDINIYTDSRYAFATAHIHGAIYKQRGWLTSAGKDIKNKEEILALLEAIHLPKRVAIIHCPGHQKGNDPVATGNRRADEAAKQAALSTRVLAETTKPAGKRTADGSEFEKRTADGSEFESPKKKAKVE

SEQ ID NO: 830 - protein, 2094 aa, synthetic construct
MPAAKRVKLDGGDKKYSIGLDIGTNSVGWAVITDEYKVPSKKFKVLGNTDRHSIKKNLIGALLFDSGETAEATRLKRTARRRYTRRKNRICYLQEIFSNEMAKVDDSFFHRLEESFLVEEDKKHERHPIFGNIVDEVAYHEKYPTIYHLRKKLVDSTDKADLRLIYLALAHMIKFRGHFLIEGDLNPDNSDVDKLFIQLVQTYNQLFEENPINASGVDAKAILSARLSKSRRLENLIAQLPGEKKNGLFGNLIALSLGLTPNFKSNFDLAEDAKLQLSKDTYDDDLDNLLAQIGDQYADLFLAAKNLSDAILLSDILRVNTEITKAPLSASMIKRYDEHHQDLTLLKALVRQQLPEKYKEIFFDQSKNGYAGYIDGGASQEEFYKFIKPILEKMDGTEELLVKLNREDLLRKQRTFDNGSIPHQIHLGELHAILRRQEDFYPFLKDNREKIEKILTFRIPYYVGPLARGNSRFAWMTRKSEETITPWNFEEVVDKGASAQSFIERMTNFDKNLPNEKVLPKHSLLYEYFTVYNELTKVKYVTEGMRKPAFLSGEQKKAIVDLLFKTNRKVTVKQLKEDYFKKIECFDSVEISGVEDRFNASLGTYHDLLKIIKDKDFLDNEENEDILEDIVLTLTLFEDREMIEERLKTYAHLFDDKVMKQLKRRRYTGWGRLSRKLINGIRDKQSGKTILDFLKSDGFANRNFMQLIHDDSLTFKEDIQKAQVSGQGDSLHEHIANLAGSPAIKKGILQTVKVVDELVKVMGRHKPENIVIEMARENQTTQKGQKNSRERMKRIEEGIKELGSQILKEHPVENTQLQNEKLYLYYLQNGRDMYVDQELDINRLSDYDVDHIVPQSFLKDDSIDNKVLTRSDKARGKSDNVPSEEVVKKMKNYWRQLLNAKLITQRKFDNLTKAERGGLSELDKAGFIKRQLVETRQITKHVAQILDSRMNTKYDENDKLIREVKVITLKSKLVSDFRKDFQFYKVREINNYHHAHDAYLNAVVGTALIKKYPKLESEFVYGDYKVYDVRKMIAKSEQEIGKATAKYFFYSNIMNFFKTEITLANGEIRKRPLIETNGETGEIVWDKGRDFATVRKVLSMPQVNIVKKTEVQTGGFSKESILPKRNSDKLIARKKDWDPKKYGGFDSPTVAYSVLVVAKVEKGKSKKLKSVKELLGITIMERSSFEKNPIDFLEAKGYKEVKKDLIIKLPKYSLFELENGRKRMLASAGELQKGNELALPSKYVNFLYLASHYEKLKGSPEDNEQKQLFVEQHKHYLDEIIEQISEFSKRVILADANLDKVLSAYNKHRDKPIREQAENIIHLFTLTNLGAPAAFKYFDTTIDRKRYTSTKEVLDATLIHQSITGLYETRIDLSQLGGDGGEAAAKGGGGGSGGVLNLEEEYRLHEKPVPSSIDPSWLQLFPTVWAERAGMGLANQVPPVVVELRSGASPVAVRQYPMSKEAREGIRPHIQRFLDLGVLVPCQSPWNTPLLPVKKPGTNDYRPVQDLREINKRVQDIHPTVPNPYNLLSSLPPSHTWYSVLDLKDAFFCLKLHPNSQPLFAFEWRDPEKGNTGQLTWTRLPQGFKNSPTLFNEALHRDLAPFRALNPQVVLLQYVDDLLVAAPTYRDCKEGTQKLLQELSKLGYRVSAKKAQLCQKEVTYLGYLLKEGKRWLTPARKATVMKIPPPTTPRQVREFLGTAGFCRLWIPGFASLAAPLYPLTKPSIPFIWTEEHQKAFDRIKEALLSAPALALPDLTKPFTLYVDERAGVARGVLTQTLGPWRRPVAYLSKKLDPVASGWPTCLKAVAAVALLLKDADKLTLGQNVTVIASHSLESIVRQPPDRWMTNARMTHYQSLLLNERVSFAPPAVLNPATLLPVESEATPVHRCSEILAEETGTRRDLKDQPLPGVPAWYTDGSSFIAEGKRRAGAAIVDGKRTVWASSLPEGTSAQKAELVALTQALRLAEGKDINIYTDSRYAFATAHIHGAIYKQRGWLTSAGKDIKNKEEILALLEAIHLPKRVAIIHCPGHQKGNDPVATGNRRADEAAKQAALSTRVLAETTKPAGKRTADGSEFEKRTADGSEFESPKKKAKVE

SEQ ID NO: 831 - protein, 2094 aa, synthetic construct
MPAAKRVKLDGGDKKYSIGLDIGTNSVGWAVITDEYKVPSKKFKVLGNTDRHSIKKNLIGALLFDSGETAEATRLKRTARRRYTRRKNRICYLQEIFSNEMAKVDDSFFHRLEESFLVEEDKKHERHPIFGNIVDEVAYHEKYPTIYHLRKKLVDSTDKADLRLIYLALAHMIKFRGHFLIEGDLNPDNSDVDKLFIQLVQTYNQLFEENPINASGVDAKAILSARLSKSRRLENLIAQLPGEKKNGLFGNLIALSLGLTPNFKSNFDLAEDAKLQLSKDTYDDDLDNLLAQIGDQYADLFLAAKNLSDAILLSDILRVNTEITKAPLSASMIKRYDEHHQDLTLLKALVRQQLPEKYKEIFFDQSKNGYAGYIDGGASQEEFYKFIKPILEKMDGTEELLVKLNREDLLRKQRTFDNGSIPHQIHLGELHAILRRQEDFYPFLKDNREKIEKILTFRIPYYVGPLARGNSRFAWMTRKSEETITPWNFEEVVDKGASAQSFIERMTNFDKNLPNEKVLPKHSLLYEYFTVYNELTKVKYVTEGMRKPAFLSGEQKKAIVDLLFKTNRKVTVKQLKEDYFKKIECFDSVEISGVEDRFNASLGTYHDLLKIIKDKDFLDNEENEDILEDIVLTLTLFEDREMIEERLKTYAHLFDDKVMKQLKRRRYTGWGRLSRKLINGIRDKQSGKTILDFLKSDGFANRNFMQLIHDDSLTFKEDIQKAQVSGQGDSLHEHIANLAGSPAIKKGILQTVKVVDELVKVMGRHKPENIVIEMARENQTTQKGQKNSRERMKRIEEGIKELGSQILKEHPVENTQLQNEKLYLYYLQNGRDMYVDQELDINRLSDYDVDHIVPQSFLKDDSIDNKVLTRSDKARGKSDNVPSEEVVKKMKNYWRQLLNAKLITQRKFDNLTKAERGGLSELDKAGFIKRQLVETRQITKHVAQILDSRMNTKYDENDKLIREVKVITLKSKLVSDFRKDFQFYKVREINNYHHAHDAYLNAVVGTALIKKYPKLESEFVYGDYKVYDVRKMIAKSEQEIGKATAKYFFYSNIMNFFKTEITLANGEIRKRPLIETNGETGEIVWDKGRDFATVRKVLSMPQVNIVKKTEVQTGGFSKESILPKRNSDKLIARKKDWDPKKYGGFDSPTVAYSVLVVAKVEKGKSKKLKSVKELLGITIMERSSFEKNPIDFLEAKGYKEVKKDLIIKLPKYSLFELENGRKRMLASAGELQKGNELALPSKYVNFLYLASHYEKLKGSPEDNEQKQLFVEQHKHYLDEIIEQISEFSKRVILADANLDKVLSAYNKHRDKPIREQAENIIHLFTLTNLGAPAAFKYFDTTIDRKRYTSTKEVLDATLIHQSITGLYETRIDLSQLGGDGGPAPGSSEAAAKGGVLNLEEEYRLHEKPVPSSIDPSWLQLFPTVWAERAGMGLANQVPPVVVELRSGASPVAVRQYPMSKEAREGIRPHIQRFLDLGVLVPCQSPWNTPLLPVKKPGTNDYRPVQDLREINKRVQDIHPTVPNPYNLLSSLPPSHTWYSVLDLKDAFFCLKLHPNSQPLFAFEWRDPEKGNTGQLTWTRLPQGFKNSPTLFNEALHRDLAPFRALNPQVVLLQYVDDLLVAAPTYRDCKEGTQKLLQELSKLGYRVSAKKAQLCQKEVTYLGYLLKEGKRWLTPARKATVMKIPPPTTPRQVREFLGTAGFCRLWIPGFASLAAPLYPLTKPSIPFIWTEEHQKAFDRIKEALLSAPALALPDLTKPFTLYVDERAGVARGVLTQTLGPWRRPVAYLSKKLDPVASGWPTCLKAVAAVALLLKDADKLTLGQNVTVIASHSLESIVRQPPDRWMTNARMTHYQSLLLNERVSFAPPAVLNPATLLPVESEATPVHRCSEILAEETGTRRDLKDQPLPGVPAWYTDGSSFIAEGKRRAGAAIVDGKRTVWASSLPEGTSAQKAELVALTQALRLAEGKDINIYTDSRYAFATAHIHGAIYKQRGWLTSAGKDIKNKEEILALLEAIHLPKRVAIIHCPGHQKGNDPVATGNRRADEAAKQAALSTRVLAETTKPAGKRTADGSEFEKRTADGSEFESPKKKAKVE

SEQ ID NO: 832 - protein, 2091 aa, synthetic construct
MPAAKRVKLDGGDKKYSIGLDIGTNSVGWAVITDEYKVPSKKFKVLGNTDRHSIKKNLIGALLFDSGETAEATRLKRTARRRYTRRKNRICYLQEIFSNEMAKVDDSFFHRLEESFLVEEDKKHERHPIFGNIVDEVAYHEKYPTIYHLRKKLVDSTDKADLRLIYLALAHMIKFRGHFLIEGDLNPDNSDVDKLFIQLVQTYNQLFEENPINASGVDAKAILSARLSKSRRLENLIAQLPGEKKNGLFGNLIALSLGLTPNFKSNFDLAEDAKLQLSKDTYDDDLDNLLAQIGDQYADLFLAAKNLSDAILLSDILRVNTEITKAPLSASMIKRYDEHHQDLTLLKALVRQQLPEKYKEIFFDQSKNGYAGYIDGGASQEEFYKFIKPILEKMDGTEELLVKLNREDLLRKQRTFDNGSIPHQIHLGELHAILRRQEDFYPFLKDNREKIEKILTFRIPYYVGPLARGNSRFAWMTRKSEETITPWNFEEVVDKGASAQSFIERMTNFDKNLPNEKVLPKHSLLYEYFTVYNELTKVKYVTEGMRKPAFLSGEQKKAIVDLLFKTNRKVTVKQLKEDYFKKIECFDSVEISGVEDRFNASLGTYHDLLKIIKDKDFLDNEENEDILEDIVLTLTLFEDREMIEERLKTYAHLFDDKVMKQLKRRRYTGWGRLSRKLINGIRDKQSGKTILDFLKSDGFANRNFMQLIHDDSLTFKEDIQKAQVSGQGDSLHEHIANLAGSPAIKKGILQTVKVVDELVKVMGRHKPENIVIEMARENQTTQKGQKNSRERMKRIEEGIKELGSQILKEHPVENTQLQNEKLYLYYLQNGRDMYVDQELDINRLSDYDVDHIVPQSFLKDDSIDNKVLTRSDKARGKSDNVPSEEVVKKMKNYWRQLLNAKLITQRKFDNLTKAERGGLSELDKAGFIKRQLVETRQITKHVAQILDSRMNTKYDENDKLIREVKVITLKSKLVSDFRKDFQFYKVREINNYHHAHDAYLNAVVGTALIKKYPKLESEFVYGDYKVYDVRKMIAKSEQEIGKATAKYFFYSNIMNFFKTEITLANGEIRKRPLIETNGETGEIVWDKGRDFATVRKVLSMPQVNIVKKTEVQTGGFSKESILPKRNSDKLIARKKDWDPKKYGGFDSPTVAYSVLVVAKVEKGKSKKLKSVKELLGITIMERSSFEKNPIDFLEAKGYKEVKKDLIIKLPKYSLFELENGRKRMLASAGELQKGNELALPSKYVNFLYLASHYEKLKGSPEDNEQKQLFVEQHKHYLDEIIEQISEFSKRVILADANLDKVLSAYNKHRDKPIREQAENIIHLFTLTNLGAPAAFKYFDTTIDRKRYTSTKEVLDATLIHQSITGLYETRIDLSQLGGDGGEAAAKGGSGGVLNLEEEYRLHEKPVPSSIDPSWLQLFPTVWAERAGMGLANQVPPVVVELRSGASPVAVRQYPMSKEAREGIRPHIQRFLDLGVLVPCQSPWNTPLLPVKKPGTNDYRPVQDLREINKRVQDIHPTVPNPYNLLSSLPPSHTWYSVLDLKDAFFCLKLHPNSQPLFAFEWRDPEKGNTGQLTWTRLPQGFKNSPTLFNEALHRDLAPFRALNPQVVLLQYVDDLLVAAPTYRDCKEGTQKLLQELSKLGYRVSAKKAQLCQKEVTYLGYLLKEGKRWLTPARKATVMKIPPPTTPRQVREFLGTAGFCRLWIPGFASLAAPLYPLTKPSIPFIWTEEHQKAFDRIKEALLSAPALALPDLTKPFTLYVDERAGVARGVLTQTLGPWRRPVAYLSKKLDPVASGWPTCLKAVAAVALLLKDADKLTLGQNVTVIASHSLESIVRQPPDRWMTNARMTHYQSLLLNERVSFAPPAVLNPATLLPVESEATPVHRCSEILAEETGTRRDLKDQPLPGVPAWYTDGSSFIAEGKRRAGAAIVDGKRTVWASSLPEGTSAQKAELVALTQALRLAEGKDINIYTDSRYAFATAHIHGAIYKQRGWLTSAGKDIKNKEEILALLEAIHLPKRVAIIHCPGHQKGNDPVATGNRRADEAAKQAALSTRVLAETTKPAGKRTADGSEFEKRTADGSEFESPKKKAKVE

SEQ ID NO: 833 - protein, 2093 aa, synthetic construct
MPAAKRVKLDGGDKKYSIGLDIGTNSVGWAVITDEYKVPSKKFKVLGNTDRHSIKKNLIGALLFDSGETAEATRLKRTARRRYTRRKNRICYLQEIFSNEMAKVDDSFFHRLEESFLVEEDKKHERHPIFGNIVDEVAYHEKYPTIYHLRKKLVDSTDKADLRLIYLALAHMIKFRGHFLIEGDLNPDNSDVDKLFIQLVQTYNQLFEENPINASGVDAKAILSARLSKSRRLENLIAQLPGEKKNGLFGNLIALSLGLTPNFKSNFDLAEDAKLQLSKDTYDDDLDNLLAQIGDQYADLFLAAKNLSDAILLSDILRVNTEITKAPLSASMIKRYDEHHQDLTLLKALVRQQLPEKYKEIFFDQSKNGYAGYIDGGASQEEFYKFIKPILEKMDGTEELLVKLNREDLLRKQRTFDNGSIPHQIHLGELHAILRRQEDFYPFLKDNREKIEKILTFRIPYYVGPLARGNSRFAWMTRKSEETITPWNFEEVVDKGASAQSFIERMTNFDKNLPNEKVLPKHSLLYEYFTVYNELTKVKYVTEGMRKPAFLSGEQKKAIVDLLFKTNRKVTVKQLKEDYFKKIECFDSVEISGVEDRFNASLGTYHDLLKIIKDKDFLDNEENEDILEDIVLTLTLFEDREMIEERLKTYAHLFDDKVMKQLKRRRYTGWGRLSRKLINGIRDKQSGKTILDFLKSDGFANRNFMQLIHDDSLTFKEDIQKAQVSGQGDSLHEHIANLAGSPAIKKGILQTVKVVDELVKVMGRHKPENIVIEMARENQTTQKGQKNSRERMKRIEEGIKELGSQILKEHPVENTQLQNEKLYLYYLQNGRDMYVDQELDINRLSDYDVDHIVPQSFLKDDSIDNKVLTRSDKARGKSDNVPSEEVVKKMKNYWRQLLNAKLITQRKFDNLTKAERGGLSELDKAGFIKRQLVETRQITKHVAQILDSRMNTKYDENDKLIREVKVITLKSKLVSDFRKDFQFYKVREINNYHHAHDAYLNAVVGTALIKKYPKLESEFVYGDYKVYDVRKMIAKSEQEIGKATAKYFFYSNIMNFFKTEITLANGEIRKRPLIETNGETGEIVWDKGRDFATVRKVLSMPQVNIVKKTEVQTGGFSKESILPKRNSDKLIARKKDWDPKKYGGFDSPTVAYSVLVVAKVEKGKSKKLKSVKELLGITIMERSSFEKNPIDFLEAKGYKEVKKDLIIKLPKYSLFELENGRKRMLASAGELQKGNELALPSKYVNFLYLASHYEKLKGSPEDNEQKQLFVEQHKHYLDEIIEQISEFSKRVILADANLDKVLSAYNKHRDKPIREQAENIIHLFTLTNLGAPAAFKYFDTTIDRKRYTSTKEVLDATLIHQSITGLYETRIDLSQLGGDGGEAAAKEAAAKGGVLNLEEEYRLHEKPVPSSIDPSWLQLFPTVWAERAGMGLANQVPPVVVELRSGASPVAVRQYPMSKEAREGIRPHIQRFLDLGVLVPCQSPWNTPLLPVKKPGTNDYRPVQDLREINKRVQDIHPTVPNPYNLLSSLPPSHTWYSVLDLKDAFFCLKLHPNSQPLFAFEWRDPEKGNTGQLTWTRLPQGFKNSPTLFNEALHRDLAPFRALNPQVVLLQYVDDLLVAAPTYRDCKEGTQKLLQELSKLGYRVSAKKAQLCQKEVTYLGYLLKEGKRWLTPARKATVMKIPPPTTPRQVREFLGTAGFCRLWIPGFASLAAPLYPLTKPSIPFIWTEEHQKAFDRIKEALLSAPALALPDLTKPFTLYVDERAGVARGVLTQTLGPWRRPVAYLSKKLDPVASGWPTCLKAVAAVALLLKDADKLTLGQNVTVIASHSLESIVRQPPDRWMTNARMTHYQSLLLNERVSFAPPAVLNPATLLPVESEATPVHRCSEILAEETGTRRDLKDQPLPGVPAWYTDGSSFIAEGKRRAGAAIVDGKRTVWASSLPEGTSAQKAELVALTQALRLAEGKDINIYTDSRYAFATAHIHGAIYKQRGWLTSAGKDIKNKEEILALLEAIHLPKRVAIIHCPGHQKGNDPVATGNRRADEAAKQAALSTRVLAETTKPAGKRTADGSEFEKRTADGSEFESPKKKAKVE

SEQ ID NO: 834 - protein, 2094 aa, synthetic construct
MPAAKRVKLDGGDKKYSIGLDIGTNSVGWAVITDEYKVPSKKFKVLGNTDRHSIKKNLIGALLFDSGETAEATRLKRTARRRYTRRKNRICYLQEIFSNEMAKVDDSFFHRLEESFLVEEDKKHERHPIFGNIVDEVAYHEKYPTIYHLRKKLVDSTDKADLRLIYLALAHMIKFRGHFLIEGDLNPDNSDVDKLFIQLVQTYNQLFEENPINASGVDAKAILSARLSKSRRLENLIAQLPGEKKNGLFGNLIALSLGLTPNFKSNFDLAEDAKLQLSKDTYDDDLDNLLAQIGDQYADLFLAAKNLSDAILLSDILRVNTEITKAPLSASMIKRYDEHHQDLTLLKALVRQQLPEKYKEIFFDQSKNGYAGYIDGGASQEEFYKFIKPILEKMDGTEELLVKLNREDLLRKQRTFDNGSIPHQIHLGELHAILRRQEDFYPFLKDNREKIEKILTFRIPYYVGPLARGNSRFAWMTRKSEETITPWNFEEVVDKGASAQSFIERMTNFDKNLPNEKVLPKHSLLYEYFTVYNELTKVKYVTEGMRKPAFLSGEQKKAIVDLLFKTNRKVTVKQLKEDYFKKIECFDSVEISGVEDRFNASLGTYHDLLKIIKDKDFLDNEENEDILEDIVLTLTLFEDREMIEERLKTYAHLFDDKVMKQLKRRRYTGWGRLSRKLINGIRDKQSGKTILDFLKSDGFANRNFMQLIHDDSLTFKEDIQKAQVSGQGDSLHEHIANLAGSPAIKKGILQTVKVVDELVKVMGRHKPENIVIEMARENQTTQKGQKNSRERMKRIEEGIKELGSQILKEHPVENTQLQNEKLYLYYLQNGRDMYVDQELDINRLSDYDVDHIVPQSFLKDDSIDNKVLTRSDKARGKSDNVPSEEVVKKMKNYWRQLLNAKLITQRKFDNLTKAERGGLSELDKAGFIKRQLVETRQITKHVAQILDSRMNTKYDENDKLIREVKVITLKSKLVSDFRKDFQFYKVREINNYHHAHDAYLNAVVGTALIKKYPKLESEFVYGDYKVYDVRKMIAKSEQEIGKATAKYFFYSNIMNFFKTEITLANGEIRKRPLIETNGETGEIVWDKGRDFATVRKVLSMPQVNIVKKTEVQTGGFSKESILPKRNSDKLIARKKDWDPKKYGGFDSPTVAYSVLVVAKVEKGKSKKLKSVKELLGITIMERSSFEKNPIDFLEAKGYKEVKKDLIIKLPKYSLFELENGRKRMLASAGELQKGNELALPSKYVNFLYLASHYEKLKGSPEDNEQKQLFVEQHKHYLDEIIEQISEFSKRVILADANLDKVLSAYNKHRDKPIREQAENIIHLFTLTNLGAPAAFKYFDTTIDRKRYTSTKEVLDATLIHQSITGLYETRIDLSQLGGDGGEAAAKPAPGSSGGVLNLEEEYRLHEKPVPSSIDPSWLQLFPTVWAERAGMGLANQVPPVVVELRSGASPVAVRQYPMSKEAREGIRPHIQRFLDLGVLVPCQSPWNTPLLPVKKPGTNDYRPVQDLREINKRVQDIHPTVPNPYNLLSSLPPSHTWYSVLDLKDAFFCLKLHPNSQPLFAFEWRDPEKGNTGQLTWTRLPQGFKNSPTLFNEALHRDLAPFRALNPQVVLLQYVDDLLVAAPTYRDCKEGTQKLLQELSKLGYRVSAKKAQLCQKEVTYLGYLLKEGKRWLTPARKATVMKIPPPTTPRQVREFLGTAGFCRLWIPGFASLAAPLYPLTKPSIPFIWTEEHQKAFDRIKEALLSAPALALPDLTKPFTLYVDERAGVARGVLTQTLGPWRRPVAYLSKKLDPVASGWPTCLKAVAAVALLLKDADKLTLGQNVTVIASHSLESIVRQPPDRWMTNARMTHYQSLLLNERVSFAPPAVLNPATLLPVESEATPVHRCSEILAEETGTRRDLKDQPLPGVPAWYTDGSSFIAEGKRRAGAAIVDGKRTVWASSLPEGTSAQKAELVALTQALRLAEGKDINIYTDSRYAFATAHIHGAIYKQRGWLTSAGKDIKNKEEILALLEAIHLPKRVAIIHCPGHQKGNDPVATGNRRADEAAKQAALSTRVLAETTKPAGKRTADGSEFEKRTADGSEFESPKKKAKVE

SEQ ID NO: 835 - protein, 2092 aa, synthetic construct
MPAAKRVKLDGGDKKYSIGLDIGTNSVGWAVITDEYKVPSKKFKVLGNTDRHSIKKNLIGALLFDSGETAEATRLKRTARRRYTRRKNRICYLQEIFSNEMAKVDDSFFHRLEESFLVEEDKKHERHPIFGNIVDEVAYHEKYPTIYHLRKKLVDSTDKADLRLIYLALAHMIKFRGHFLIEGDLNPDNSDVDKLFIQLVQTYNQLFEENPINASGVDAKAILSARLSKSRRLENLIAQLPGEKKNGLFGNLIALSLGLTPNFKSNFDLAEDAKLQLSKDTYDDDLDNLLAQIGDQYADLFLAAKNLSDAILLSDILRVNTEITKAPLSASMIKRYDEHHQDLTLLKALVRQQLPEKYKEIFFDQSKNGYAGYIDGGASQEEFYKFIKPILEKMDGTEELLVKLNREDLLRKQRTFDNGSIPHQIHLGELHAILRRQEDFYPFLKDNREKIEKILTFRIPYYVGPLARGNSRFAWMTRKSEETITPWNFEEVVDKGASAQSFIERMTNFDKNLPNEKVLPKHSLLYEYFTVYNELTKVKYVTEGMRKPAFLSGEQKKAIVDLLFKTNRKVTVKQLKEDYFKKIECFDSVEISGVEDRFNASLGTYHDLLKIIKDKDFLDNEENEDILEDIVLTLTLFEDREMIEERLKTYAHLFDDKVMKQLKRRRYTGWGRLSRKLINGIRDKQSGKTILDFLKSDGFANRNFMQLIHDDSLTFKEDIQKAQVSGQGDSLHEHIANLAGSPAIKKGILQTVKVVDELVKVMGRHKPENIVIEMARENQTTQKGQKNSRERMKRIEEGIKELGSQILKEHPVENTQLQNEKLYLYYLQNGRDMYVDQELDINRLSDYDVDHIVPQSFLKDDSIDNKVLTRSDKARGKSDNVPSEEVVKKMKNYWRQLLNAKLITQRKFDNLTKAERGGLSELDKAGFIKRQLVETRQITKHVAQILDSRMNTKYDENDKLIREVKVITLKSKLVSDFRKDFQFYKVREINNYHHAHDAYLNAVVGTALIKKYPKLESEFVYGDYKVYDVRKMIAKSEQEIGKATAKYFFYSNIMNFFKTEITLANGEIRKRPLIETNGETGEIVWDKGRDFATVRKVLSMPQVNIVKKTEVQTGGFSKESILPKRNSDKLIARKKDWDPKKYGGFDSPTVAYSVLVVAKVEKGKSKKLKSVKELLGITIMERSSFEKNPIDFLEAKGYKEVKKDLIIKLPKYSLFELENGRKRMLASAGELQKGNELALPSKYVNFLYLASHYEKLKGSPEDNEQKQLFVEQHKHYLDEIIEQISEFSKRVILADANLDKVLSAYNKHRDKPIREQAENIIHLFTLTNLGAPAAFKYFDTTIDRKRYTSTKEVLDATLIHQSITGLYETRIDLSQLGGDGGGSSGSSGSSGGVLNLEEEYRLHEKPVPSSIDPSWLQLFPTVWAERAGMGLANQVPPVVVELRSGASPVAVRQYPMSKEAREGIRPHIQRFLDLGVLVPCQSPWNTPLLPVKKPGTNDYRPVQDLREINKRVQDIHPTVPNPYNLLSSLPPSHTWYSVLDLKDAFFCLKLHPNSQPLFAFEWRDPEKGNTGQLTWTRLPQGFKNSPTLFNEALHRDLAPFRALNPQVVLLQYVDDLLVAAPTYRDCKEGTQKLLQELSKLGYRVSAKKAQLCQKEVTYLGYLLKEGKRWLTPARKATVMKIPPPTTPRQVREFLGTAGFCRLWIPGFASLAAPLYPLTKPSIPFIWTEEHQKAFDRIKEALLSAPALALPDLTKPFTLYVDERAGVARGVLTQTLGPWRRPVAYLSKKLDPVASGWPTCLKAVAAVALLLKDADKLTLGQNVTVIASHSLESIVRQPPDRWMTNARMTHYQSLLLNERVSFAPPAVLNPATLLPVESEATPVHRCSEILAEETGTRRDLKDQPLPGVPAWYTDGSSFIAEGKRRAGAAIVDGKRTVWASSLPEGTSAQKAELVALTQALRLAEGKDINIYTDSRYAFATAHIHGAIYKQRGWLTSAGKDIKNKEEILALLEAIHLPKRVAIIHCPGHQKGNDPVATGNRRADEAAKQAALSTRVLAETTKPAGKRTADGSEFEKRTADGSEFESPKKKAKVE

SEQ ID NO: 836 - protein, 2091 aa, synthetic construct
MPAAKRVKLDGGDKKYSIGLDIGTNSVGWAVITDEYKVPSKKFKVLGNTDRHSIKKNLIGALLFDSGETAEATRLKRTARRRYTRRKNRICYLQEIFSNEMAKVDDSFFHRLEESFLVEEDKKHERHPIFGNIVDEVAYHEKYPTIYHLRKKLVDSTDKADLRLIYLALAHMIKFRGHFLIEGDLNPDNSDVDKLFIQLVQTYNQLFEENPINASGVDAKAILSARLSKSRRLENLIAQLPGEKKNGLFGNLIALSLGLTPNFKSNFDLAEDAKLQLSKDTYDDDLDNLLAQIGDQYADLFLAAKNLSDAILLSDILRVNTEITKAPLSASMIKRYDEHHQDLTLLKALVRQQLPEKYKEIFFDQSKNGYAGYIDGGASQEEFYKFIKPILEKMDGTEELLVKLNREDLLRKQRTFDNGSIPHQIHLGELHAILRRQEDFYPFLKDNREKIEKILTFRIPYYVGPLARGNSRFAWMTRKSEETITPWNFEEVVDKGASAQSFIERMTNFDKNLPNEKVLPKHSLLYEYFTVYNELTKVKYVTEGMRKPAFLSGEQKKAIVDLLFKTNRKVTVKQLKEDYFKKIECFDSVEISGVEDRFNASLGTYHDLLKIIKDKDFLDNEENEDILEDIVLTLTLFEDREMIEERLKTYAHLFDDKVMKQLKRRRYTGWGRLSRKLINGIRDKQSGKTILDFLKSDGFANRNFMQLIHDDSLTFKEDIQKAQVSGQGDSLHEHIANLAGSPAIKKGILQTVKVVDELVKVMGRHKPENIVIEMARENQTTQKGQKNSRERMKRIEEGIKELGSQILKEHPVENTQLQNEKLYLYYLQNGRDMYVDQELDINRLSDYDVDHIVPQSFLKDDSIDNKVLTRSDKARGKSDNVPSEEVVKKMKNYWRQLLNAKLITQRKFDNLTKAERGGLSELDKAGFIKRQLVETRQITKHVAQILDSRMNTKYDENDKLIREVKVITLKSKLVSDFRKDFQFYKVREINNYHHAHDAYLNAVVGTALIKKYPKLESEFVYGDYKVYDVRKMIAKSEQEIGKATAKYFFYSNIMNFFKTEITLANGEIRKRPLIETNGETGEIVWDKGRDFATVRKVLSMPQVNIVKKTEVQTGGFSKESILPKRNSDKLIARKKDWDPKKYGGFDSPTVAYSVLVVAKVEKGKSKKLKSVKELLGITIMERSSFEKNPIDFLEAKGYKEVKKDLIIKLPKYSLFELENGRKRMLASAGELQKGNELALPSKYVNFLYLASHYEKLKGSPEDNEQKQLFVEQHKHYLDEIIEQISEFSKRVILADANLDKVLSAYNKHRDKPIREQAENIIHLFTLTNLGAPAAFKYFDTTIDRKRYTSTKEVLDATLIHQSITGLYETRIDLSQLGGDGGEAAAKGSSGGVLNLEEEYRLHEKPVPSSIDPSWLQLFPTVWAERAGMGLANQVPPVVVELRSGASPVAVRQYPMSKEAREGIRPHIQRFLDLGVLVPCQSPWNTPLLPVKKPGTNDYRPVQDLREINKRVQDIHPTVPNPYNLLSSLPPSHTWYSVLDLKDAFFCLKLHPNSQPLFAFEWRDPEKGNTGQLTWTRLPQGFKNSPTLFNEALHRDLAPFRALNPQVVLLQYVDDLLVAAPTYRDCKEGTQKLLQELSKLGYRVSAKKAQLCQKEVTYLGYLLKEGKRWLTPARKATVMKIPPPTTPRQVREFLGTAGFCRLWIPGFASLAAPLYPLTKPSIPFIWTEEHQKAFDRIKEALLSAPALALPDLTKPFTLYVDERAGVARGVLTQTLGPWRRPVAYLSKKLDPVASGWPTCLKAVAAVALLLKDADKLTLGQNVTVIASHSLESIVRQPPDRWMTNARMTHYQSLLLNERVSFAPPAVLNPATLLPVESEATPVHRCSEILAEETGTRRDLKDQPLPGVPAWYTDGSSFIAEGKRRAGAAIVDGKRTVWASSLPEGTSAQKAELVALTQALRLAEGKDINIYTDSRYAFATAHIHGAIYKQRGWLTSAGKDIKNKEEILALLEAIHLPKRVAIIHCPGHQKGNDPVATGNRRADEAAKQAALSTRVLAETTKPAGKRTADGSEFEKRTADGSEFESPKKKAKVE

SEQ ID NO: 837 - protein, 2091 aa, synthetic construct
MPAAKRVKLDGGDKKYSIGLDIGTNSVGWAVITDEYKVPSKKFKVLGNTDRHSIKKNLIGALLFDSGETAEATRLKRTARRRYTRRKNRICYLQEIFSNEMAKVDDSFFHRLEESFLVEEDKKHERHPIFGNIVDEVAYHEKYPTIYHLRKKLVDSTDKADLRLIYLALAHMIKFRGHFLIEGDLNPDNSDVDKLFIQLVQTYNQLFEENPINASGVDAKAILSARLSKSRRLENLIAQLPGEKKNGLFGNLIALSLGLTPNFKSNFDLAEDAKLQLSKDTYDDDLDNLLAQIGDQYADLFLAAKNLSDAILLSDILRVNTEITKAPLSASMIKRYDEHHQDLTLLKALVRQQLPEKYKEIFFDQSKNGYAGYIDGGASQEEFYKFIKPILEKMDGTEELLVKLNREDLLRKQRTFDNGSIPHQIHLGELHAILRRQEDFYPFLKDNREKIEKILTFRIPYYVGPLARGNSRFAWMTRKSEETITPWNFEEVVDKGASAQSFIERMTNFDKNLPNEKVLPKHSLLYEYFTVYNELTKVKYVTEGMRKPAFLSGEQKKAIVDLLFKTNRKVTVKQLKEDYFKKIECFDSVEISGVEDRFNASLGTYHDLLKIIKDKDFLDNEENEDILEDIVLTLTLFEDREMIEERLKTYAHLFDDKVMKQLKRRRYTGWGRLSRKLINGIRDKQSGKTILDFLKSDGFANRNFMQLIHDDSLTFKEDIQKAQVSGQGDSLHEHIANLAGSPAIKKGILQTVKVVDELVKVMGRHKPENIVIEMARENQTTQKGQKNSRERMKRIEEGIKELGSQILKEHPVENTQLQNEKLYLYYLQNGRDMYVDQELDINRLSDYDVDHIVPQSFLKDDSIDNKVLTRSDKARGKSDNVPSEEVVKKMKNYWRQLLNAKLITQRKFDNLTKAERGGLSELDKAGFIKRQLVETRQITKHVAQILDSRMNTKYDENDKLIREVKVITLKSKLVSDFRKDFQFYKVREINNYHHAHDAYLNAVVGTALIKKYPKLESEFVYGDYKVYDVRKMIAKSEQEIGKATAKYFFYSNIMNFFKTEITLANGEIRKRPLIETNGETGEIVWDKGRDFATVRKVLSMPQVNIVKKTEVQTGGFSKESILPKRNSDKLIARKKDWDPKKYGGFDSPTVAYSVLVVAKVEKGKSKKLKSVKELLGITIMERSSFEKNPIDFLEAKGYKEVKKDLIIKLPKYSLFELENGRKRMLASAGELQKGNELALPSKYVNFLYLASHYEKLKGSPEDNEQKQLFVEQHKHYLDEIIEQISEFSKRVILADANLDKVLSAYNKHRDKPIREQAENIIHLFTLTNLGAPAAFKYFDTTIDRKRYTSTKEVLDATLIHQSITGLYETRIDLSQLGGDGGGGGEAAAKGGVLNLEEEYRLHEKPVPSSIDPSWLQLFPTVWAERAGMGLANQVPPVVVELRSGASPVAVRQYPMSKEAREGIRPHIQRFLDLGVLVPCQSPWNTPLLPVKKPGTNDYRPVQDLREINKRVQDIHPTVPNPYNLLSSLPPSHTWYSVLDLKDAFFCLKLHPNSQPLFAFEWRDPEKGNTGQLTWTRLPQGFKNSPTLFNEALHRDLAPFRALNPQVVLLQYVDDLLVAAPTYRDCKEGTQKLLQELSKLGYRVSAKKAQLCQKEVTYLGYLLKEGKRWLTPARKATVMKIPPPTTPRQVREFLGTAGFCRLWIPGFASLAAPLYPLTKPSIPFIWTEEHQKAFDRIKEALLSAPALALPDLTKPFTLYVDERAGVARGVLTQTLGPWRRPVAYLSKKLDPVASGWPTCLKAVAAVALLLKDADKLTLGQNVTVIASHSLESIVRQPPDRWMTNARMTHYQSLLLNERVSFAPPAVLNPATLLPVESEATPVHRCSEILAEETGTRRDLKDQPLPGVPAWYTDGSSFIAEGKRRAGAAIVDGKRTVWASSLPEGTSAQKAELVALTQALRLAEGKDINIYTDSRYAFATAHIHGAIYKQRGWLTSAGKDIKNKEEILALLEAIHLPKRVAIIHCPGHQKGNDPVATGNRRADEAAKQAALSTRVLAETTKPAGKRTADGSEFEKRTADGSEFESPKKKAKVE

SEQ ID NO: 838 - protein, 2091 aa, synthetic construct
MPAAKRVKLDGGDKKYSIGLDIGTNSVGWAVITDEYKVPSKKFKVLGNTDRHSIKKNLIGALLFDSGETAEATRLKRTARRRYTRRKNRICYLQEIFSNEMAKVDDSFFHRLEESFLVEEDKKHERHPIFGNIVDEVAYHEKYPTIYHLRKKLVDSTDKADLRLIYLALAHMIKFRGHFLIEGDLNPDNSDVDKLFIQLVQTYNQLFEENPINASGVDAKAILSARLSKSRRLENLIAQLPGEKKNGLFGNLIALSLGLTPNFKSNFDLAEDAKLQLSKDTYDDDLDNLLAQIGDQYADLFLAAKNLSDAILLSDILRVNTEITKAPLSASMIKRYDEHHQDLTLLKALVRQQLPEKYKEIFFDQSKNGYAGYIDGGASQEEFYKFIKPILEKMDGTEELLVKLNREDLLRKQRTFDNGSIPHQIHLGELHAILRRQEDFYPFLKDNREKIEKILTFRIPYYVGPLARGNSRFAWMTRKSEETITPWNFEEVVDKGASAQSFIERMTNFDKNLPNEKVLPKHSLLYEYFTVYNELTKVKYVTEGMRKPAFLSGEQKKAIVDLLFKTNRKVTVKQLKEDYFKKIECFDSVEISGVEDRFNASLGTYHDLLKIIKDKDFLDNEENEDILEDIVLTLTLFEDREMIEERLKTYAHLFDDKVMKQLKRRRYTGWGRLSRKLINGIRDKQSGKTILDFLKSDGFANRNFMQLIHDDSLTFKEDIQKAQVSGQGDSLHEHIANLAGSPAIKKGILQTVKVVDELVKVMGRHKPENIVIEMARENQTTQKGQKNSRERMKRIEEGIKELGSQILKEHPVENTQLQNEKLYLYYLQNGRDMYVDQELDINRLSDYDVDHIVPQSFLKDDSIDNKVLTRSDKARGKSDNVPSEEVVKKMKNYWRQLLNAKLITQRKFDNLTKAERGGLSELDKAGFIKRQLVETRQITKHVAQILDSRMNTKYDENDKLIREVKVITLKSKLVSDFRKDFQFYKVREINNYHHAHDAYLNAVVGTALIKKYPKLESEFVYGDYKVYDVRKMIAKSEQEIGKATAKYFFYSNIMNFFKTEITLANGEIRKRPLIETNGETGEIVWDKGRDFATVRKVLSMPQVNIVKKTEVQTGGFSKESILPKRNSDKLIARKKDWDPKKYGGFDSPTVAYSVLVVAKVEKGKSKKLKSVKELLGITIMERSSFEKNPIDFLEAKGYKEVKKDLIIKLPKYSLFELENGRKRMLASAGELQKGNELALPSKYVNFLYLASHYEKLKGSPEDNEQKQLFVEQHKHYLDEIIEQISEFSKRVILADANLDKVLSAYNKHRDKPIREQAENIIHLFTLTNLGAPAAFKYFDTTIDRKRYTSTKEVLDATLIHQSITGLYETRIDLSQLGGDGGGSSEAAAKGGVLNLEEEYRLHEKPVPSSIDPSWLQLFPTVWAERAGMGLANQVPPVVVELRSGASPVAVRQYPMSKEAREGIRPHIQRFLDLGVLVPCQSPWNTPLLPVKKPGTNDYRPVQDLREINKRVQDIHPTVPNPYNLLSSLPPSHTWYSVLDLKDAFFCLKLHPNSQPLFAFEWRDPEKGNTGQLTWTRLPQGFKNSPTLFNEALHRDLAPFRALNPQVVLLQYVDDLLVAAPTYRDCKEGTQKLLQELSKLGYRVSAKKAQLCQKEVTYLGYLLKEGKRWLTPARKATVMKIPPPTTPRQVREFLGTAGFCRLWIPGFASLAAPLYPLTKPSIPFIWTEEHQKAFDRIKEALLSAPALALPDLTKPFTLYVDERAGVARGVLTQTLGPWRRPVAYLSKKLDPVASGWPTCLKAVAAVALLLKDADKLTLGQNVTVIASHSLESIVRQPPDRWMTNARMTHYQSLLLNERVSFAPPAVLNPATLLPVESEATPVHRCSEILAEETGTRRDLKDQPLPGVPAWYTDGSSFIAEGKRRAGAAIVDGKRTVWASSLPEGTSAQKAELVALTQALRLAEGKDINIYTDSRYAFATAHIHGAIYKQRGWLTSAGKDIKNKEEILALLEAIHLPKRVAIIHCPGHQKGNDPVATGNRRADEAAKQAALSTRVLAETTKPAGKRTADGSEFEKRTADGSEFESPKKKAKVE

SEQ ID NO: 839 - protein, 2094 aa, synthetic construct
MPAAKRVKLDGGDKKYSIGLDIGTNSVGWAVITDEYKVPSKKFKVLGNTDRHSIKKNLIGALLFDSGETAEATRLKRTARRRYTRRKNRICYLQEIFSNEMAKVDDSFFHRLEESFLVEEDKKHERHPIFGNIVDEVAYHEKYPTIYHLRKKLVDSTDKADLRLIYLALAHMIKFRGHFLIEGDLNPDNSDVDKLFIQLVQTYNQLFEENPINASGVDAKAILSARLSKSRRLENLIAQLPGEKKNGLFGNLIALSLGLTPNFKSNFDLAEDAKLQLSKDTYDDDLDNLLAQIGDQYADLFLAAKNLSDAILLSDILRVNTEITKAPLSASMIKRYDEHHQDLTLLKALVRQQLPEKYKEIFFDQSKNGYAGYIDGGASQEEFYKFIKPILEKMDGTEELLVKLNREDLLRKQRTFDNGSIPHQIHLGELHAILRRQEDFYPFLKDNREKIEKILTFRIPYYVGPLARGNSRFAWMTRKSEETITPWNFEEVVDKGASAQSFIERMTNFDKNLPNEKVLPKHSLLYEYFTVYNELTKVKYVTEGMRKPAFLSGEQKKAIVDLLFKTNRKVTVKQLKEDYFKKIECFDSVEISGVEDRFNASLGTYHDLLKIIKDKDFLDNEENEDILEDIVLTLTLFEDREMIEERLKTYAHLFDDKVMKQLKRRRYTGWGRLSRKLINGIRDKQSGKTILDFLKSDGFANRNFMQLIHDDSLTFKEDIQKAQVSGQGDSLHEHIANLAGSPAIKKGILQTVKVVDELVKVMGRHKPENIVIEMARENQTTQKGQKNSRERMKRIEEGIKELGSQILKEHPVENTQLQNEKLYLYYLQNGRDMYVDQELDINRLSDYDVDHIVPQSFLKDDSIDNKVLTRSDKARGKSDNVPSEEVVKKMKNYWRQLLNAKLITQRKFDNLTKAERGGLSELDKAGFIKRQLVETRQITKHVAQILDSRMNTKYDENDKLIREVKVITLKSKLVSDFRKDFQFYKVREINNYHHAHDAYLNAVVGTALIKKYPKLESEFVYGDYKVYDVRKMIAKSEQEIGKATAKYFFYSNIMNFFKTEITLANGEIRKRPLIETNGETGEIVWDKGRDFATVRKVLSMPQVNIVKKTEVQTGGFSKESILPKRNSDKLIARKKDWDPKKYGGFDSPTVAYSVLVVAKVEKGKSKKLKSVKELLGITIMERSSFEKNPIDFLEAKGYKEVKKDLIIKLPKYSLFELENGRKRMLASAGELQKGNELALPSKYVNFLYLASHYEKLKGSPEDNEQKQLFVEQHKHYLDEIIEQISEFSKRVILADANLDKVLSAYNKHRDKPIREQAENIIHLFTLTNLGAPAAFKYFDTTIDRKRYTSTKEVLDATLIHQSITGLYETRIDLSQLGGDGGGSSPAPEAAAKGGVLNLEEEYRLHEKPVPSSIDPSWLQLFPTVWAERAGMGLANQVPPVVVELRSGASPVAVRQYPMSKEAREGIRPHIQRFLDLGVLVPCQSPWNTPLLPVKKPGTNDYRPVQDLREINKRVQDIHPTVPNPYNLLSSLPPSHTWYSVLDLKDAFFCLKLHPNSQPLFAFEWRDPEKGNTGQLTWTRLPQGFKNSPTLFNEALHRDLAPFRALNPQVVLLQYVDDLLVAAPTYRDCKEGTQKLLQELSKLGYRVSAKKAQLCQKEVTYLGYLLKEGKRWLTPARKATVMKIPPPTTPRQVREFLGTAGFCRLWIPGFASLAAPLYPLTKPSIPFIWTEEHQKAFDRIKEALLSAPALALPDLTKPFTLYVDERAGVARGVLTQTLGPWRRPVAYLSKKLDPVASGWPTCLKAVAAVALLLKDADKLTLGQNVTVIASHSLESIVRQPPDRWMTNARMTHYQSLLLNERVSFAPPAVLNPATLLPVESEATPVHRCSEILAEETGTRRDLKDQPLPGVPAWYTDGSSFIAEGKRRAGAAIVDGKRTVWASSLPEGTSAQKAELVALTQALRLAEGKDINIYTDSRYAFATAHIHGAIYKQRGWLTSAGKDIKNKEEILALLEAIHLPKRVAIIHCPGHQKGNDPVATGNRRADEAAKQAALSTRVLAETTKPAGKRTADGSEFEKRTADGSEFESPKKKAKVE

SEQ ID NO: 840 - protein, 2092 aa, synthetic construct
MPAAKRVKLDGGDKKYSIGLDIGTNSVGWAVITDEYKVPSKKFKVLGNTDRHSIKKNLIGALLFDSGETAEATRLKRTARRRYTRRKNRICYLQEIFSNEMAKVDDSFFHRLEESFLVEEDKKHERHPIFGNIVDEVAYHEKYPTIYHLRKKLVDSTDKADLRLIYLALAHMIKFRGHFLIEGDLNPDNSDVDKLFIQLVQTYNQLFEENPINASGVDAKAILSARLSKSRRLENLIAQLPGEKKNGLFGNLIALSLGLTPNFKSNFDLAEDAKLQLSKDTYDDDLDNLLAQIGDQYADLFLAAKNLSDAILLSDILRVNTEITKAPLSASMIKRYDEHHQDLTLLKALVRQQLPEKYKEIFFDQSKNGYAGYIDGGASQEEFYKFIKPILEKMDGTEELLVKLNREDLLRKQRTFDNGSIPHQIHLGELHAILRRQEDFYPFLKDNREKIEKILTFRIPYYVGPLARGNSRFAWMTRKSEETITPWNFEEVVDKGASAQSFIERMTNFDKNLPNEKVLPKHSLLYEYFTVYNELTKVKYVTEGMRKPAFLSGEQKKAIVDLLFKTNRKVTVKQLKEDYFKKIECFDSVEISGVEDRFNASLGTYHDLLKIIKDKDFLDNEENEDILEDIVLTLTLFEDREMIEERLKTYAHLFDDKVMKQLKRRRYTGWGRLSRKLINGIRDKQSGKTILDFLKSDGFANRNFMQLIHDDSLTFKEDIQKAQVSGQGDSLHEHIANLAGSPAIKKGILQTVKVVDELVKVMGRHKPENIVIEMARENQTTQKGQKNSRERMKRIEEGIKELGSQILKEHPVENTQLQNEKLYLYYLQNGRDMYVDQELDINRLSDYDVDHIVPQSFLKDDSIDNKVLTRSDKARGKSDNVPSEEVVKKMKNYWRQLLNAKLITQRKFDNLTKAERGGLSELDKAGFIKRQLVETRQITKHVAQILDSRMNTKYDENDKLIREVKVITLKSKLVSDFRKDFQFYKVREINNYHHAHDAYLNAVVGTALIKKYPKLESEFVYGDYKVYDVRKMIAKSEQEIGKATAKYFFYSNIMNFFKTEITLANGEIRKRPLIETNGETGEIVWDKGRDFATVRKVLSMPQVNIVKKTEVQTGGFSKESILPKRNSDKLIARKKDWDPKKYGGFDSPTVAYSVLVVAKVEKGKSKKLKSVKELLGITIMERSSFEKNPIDFLEAKGYKEVKKDLIIKLPKYSLFELENGRKRMLASAGELQKGNELALPSKYVNFLYLASHYEKLKGSPEDNEQKQLFVEQHKHYLDEIIEQISEFSKRVILADANLDKVLSAYNKHRDKPIREQAENIIHLFTLTNLGAPAAFKYFDTTIDRKRYTSTKEVLDATLIHQSITGLYETRIDLSQLGGDGGGSSPAPGGSGGVLNLEEEYRLHEKPVPSSIDPSWLQLFPTVWAERAGMGLANQVPPVVVELRSGASPVAVRQYPMSKEAREGIRPHIQRFLDLGVLVPCQSPWNTPLLPVKKPGTNDYRPVQDLREINKRVQDIHPTVPNPYNLLSSLPPSHTWYSVLDLKDAFFCLKLHPNSQPLFAFEWRDPEKGNTGQLTWTRLPQGFKNSPTLFNEALHRDLAPFRALNPQVVLLQYVDDLLVAAPTYRDCKEGTQKLLQELSKLGYRVSAKKAQLCQKEVTYLGYLLKEGKRWLTPARKATVMKIPPPTTPRQVREFLGTAGFCRLWIPGFASLAAPLYPLTKPSIPFIWTEEHQKAFDRIKEALLSAPALALPDLTKPFTLYVDERAGVARGVLTQTLGPWRRPVAYLSKKLDPVASGWPTCLKAVAAVALLLKDADKLTLGQNVTVIASHSLESIVRQPPDRWMTNARMTHYQSLLLNERVSFAPPAVLNPATLLPVESEATPVHRCSEILAEETGTRRDLKDQPLPGVPAWYTDGSSFIAEGKRRAGAAIVDGKRTVWASSLPEGTSAQKAELVALTQALRLAEGKDINIYTDSRYAFATAHIHGAIYKQRGWLTSAGKDIKNKEEILALLEAIHLPKRVAIIHCPGHQKGNDPVATGNRRADEAAKQAALSTRVLAETTKPAGKRTADGSEFEKRTADGSEFESPKKKAKVE

SEQ ID NO: 841 - protein, 2094 aa, synthetic construct
MPAAKRVKLDGGDKKYSIGLDIGTNSVGWAVITDEYKVPSKKFKVLGNTDRHSIKKNLIGALLFDSGETAEATRLKRTARRRYTRRKNRICYLQEIFSNEMAKVDDSFFHRLEESFLVEEDKKHERHPIFGNIVDEVAYHEKYPTIYHLRKKLVDSTDKADLRLIYLALAHMIKFRGHFLIEGDLNPDNSDVDKLFIQLVQTYNQLFEENPINASGVDAKAILSARLSKSRRLENLIAQLPGEKKNGLFGNLIALSLGLTPNFKSNFDLAEDAKLQLSKDTYDDDLDNLLAQIGDQYADLFLAAKNLSDAILLSDILRVNTEITKAPLSASMIKRYDEHHQDLTLLKALVRQQLPEKYKEIFFDQSKNGYAGYIDGGASQEEFYKFIKPILEKMDGTEELLVKLNREDLLRKQRTFDNGSIPHQIHLGELHAILRRQEDFYPFLKDNREKIEKILTFRIPYYVGPLARGNSRFAWMTRKSEETITPWNFEEVVDKGASAQSFIERMTNFDKNLPNEKVLPKHSLLYEYFTVYNELTKVKYVTEGMRKPAFLSGEQKKAIVDLLFKTNRKVTVKQLKEDYFKKIECFDSVEISGVEDRFNASLGTYHDLLKIIKDKDFLDNEENEDILEDIVLTLTLFEDREMIEERLKTYAHLFDDKVMKQLKRRRYTGWGRLSRKLINGIRDKQSGKTILDFLKSDGFANRNFMQLIHDDSLTFKEDIQKAQVSGQGDSLHEHIANLAGSPAIKKGILQTVKVVDELVKVMGRHKPENIVIEMARENQTTQKGQKNSRERMKRIEEGIKELGSQILKEHPVENTQLQNEKLYLYYLQNGRDMYVDQELDINRLSDYDVDHIVPQSFLKDDSIDNKVLTRSDKARGKSDNVPSEEVVKKMKNYWRQLLNAKLITQRKFDNLTKAERGGLSELDKAGFIKRQLVETRQITKHVAQILDSRMNTKYDENDKLIREVKVITLKSKLVSDFRKDFQFYKVREINNYHHAHDAYLNAVVGTALIKKYPKLESEFVYGDYKVYDVRKMIAKSEQEIGKATAKYFFYSNIMNFFKTEITLANGEIRKRPLIETNGETGEIVWDKGRDFATVRKVLSMPQVNIVKKTEVQTGGFSKESILPKRNSDKLIARKKDWDPKKYGGFDSPTVAYSVLVVAKVEKGKSKKLKSVKELLGITIMERSSFEKNPIDFLEAKGYKEVKKDLIIKLPKYSLFELENGRKRMLASAGELQKGNELALPSKYVNFLYLASHYEKLKGSPEDNEQKQLFVEQHKHYLDEIIEQISEFSKRVILADANLDKVLSAYNKHRDKPIREQAENIIHLFTLTNLGAPAAFKYFDTTIDRKRYTSTKEVLDATLIHQSITGLYETRIDLSQLGGDGGGGGEAAAKGGSGGVLNLEEEYRLHEKPVPSSIDPSWLQLFPTVWAERAGMGLANQVPPVVVELRSGASPVAVRQYPMSKEAREGIRPHIQRFLDLGVLVPCQSPWNTPLLPVKKPGTNDYRPVQDLREINKRVQDIHPTVPNPYNLLSSLPPSHTWYSVLDLKDAFFCLKLHPNSQPLFAFEWRDPEKGNTGQLTWTRLPQGFKNSPTLFNEALHRDLAPFRALNPQVVLLQYVDDLLVAAPTYRDCKEGTQKLLQELSKLGYRVSAKKAQLCQKEVTYLGYLLKEGKRWLTPARKATVMKIPPPTTPRQVREFLGTAGFCRLWIPGFASLAAPLYPLTKPSIPFIWTEEHQKAFDRIKEALLSAPALALPDLTKPFTLYVDERAGVARGVLTQTLGPWRRPVAYLSKKLDPVASGWPTCLKAVAAVALLLKDADKLTLGQNVTVIASHSLESIVRQPPDRWMTNARMTHYQSLLLNERVSFAPPAVLNPATLLPVESEATPVHRCSEILAEETGTRRDLKDQPLPGVPAWYTDGSSFIAEGKRRAGAAIVDGKRTVWASSLPEGTSAQKAELVALTQALRLAEGKDINIYTDSRYAFATAHIHGAIYKQRGWLTSAGKDIKNKEEILALLEAIHLPKRVAIIHCPGHQKGNDPVATGNRRADEAAKQAALSTRVLAETTKPAGKRTADGSEFEKRTADGSEFESPKKKAKVE

SEQ ID NO: 842 - protein, 2091 aa, synthetic construct
MPAAKRVKLDGGDKKYSIGLDIGTNSVGWAVITDEYKVPSKKFKVLGNTDRHSIKKNLIGALLFDSGETAEATRLKRTARRRYTRRKNRICYLQEIFSNEMAKVDDSFFHRLEESFLVEEDKKHERHPIFGNIVDEVAYHEKYPTIYHLRKKLVDSTDKADLRLIYLALAHMIKFRGHFLIEGDLNPDNSDVDKLFIQLVQTYNQLFEENPINASGVDAKAILSARLSKSRRLENLIAQLPGEKKNGLFGNLIALSLGLTPNFKSNFDLAEDAKLQLSKDTYDDDLDNLLAQIGDQYADLFLAAKNLSDAILLSDILRVNTEITKAPLSASMIKRYDEHHQDLTLLKALVRQQLPEKYKEIFFDQSKNGYAGYIDGGASQEEFYKFIKPILEKMDGTEELLVKLNREDLLRKQRTFDNGSIPHQIHLGELHAILRRQEDFYPFLKDNREKIEKILTFRIPYYVGPLARGNSRFAWMTRKSEETITPWNFEEVVDKGASAQSFIERMTNFDKNLPNEKVLPKHSLLYEYFTVYNELTKVKYVTEGMRKPAFLSGEQKKAIVDLLFKTNRKVTVKQLKEDYFKKIECFDSVEISGVEDRFNASLGTYHDLLKIIKDKDFLDNEENEDILEDIVLTLTLFEDREMIEERLKTYAHLFDDKVMKQLKRRRYTGWGRLSRKLINGIRDKQSGKTILDFLKSDGFANRNFMQLIHDDSLTFKEDIQKAQVSGQGDSLHEHIANLAGSPAIKKGILQTVKVVDELVKVMGRHKPENIVIEMARENQTTQKGQKNSRERMKRIEEGIKELGSQILKEHPVENTQLQNEKLYLYYLQNGRDMYVDQELDINRLSDYDVDHIVPQSFLKDDSIDNKVLTRSDKARGKSDNVPSEEVVKKMKNYWRQLLNAKLITQRKFDNLTKAERGGLSELDKAGFIKRQLVETRQITKHVAQILDSRMNTKYDENDKLIREVKVITLKSKLVSDFRKDFQFYKVREINNYHHAHDAYLNAVVGTALIKKYPKLESEFVYGDYKVYDVRKMIAKSEQEIGKATAKYFFYSNIMNFFKTEITLANGEIRKRPLIETNGETGEIVWDKGRDFATVRKVLSMPQVNIVKKTEVQTGGFSKESILPKRNSDKLIARKKDWDPKKYGGFDSPTVAYSVLVVAKVEKGKSKKLKSVKELLGITIMERSSFEKNPIDFLEAKGYKEVKKDLIIKLPKYSLFELENGRKRMLASAGELQKGNELALPSKYVNFLYLASHYEKLKGSPEDNEQKQLFVEQHKHYLDEIIEQISEFSKRVILADANLDKVLSAYNKHRDKPIREQAENIIHLFTLTNLGAPAAFKYFDTTIDRKRYTSTKEVLDATLIHQSITGLYETRIDLSQLGGDGGGGGGGGGGGGVLNLEEEYRLHEKPVPSSIDPSWLQLFPTVWAERAGMGLANQVPPVVVELRSGASPVAVRQYPMSKEAREGIRPHIQRFLDLGVLVPCQSPWNTPLLPVKKPGTNDYRPVQDLREINKRVQDIHPTVPNPYNLLSSLPPSHTWYSVLDLKDAFFCLKLHPNSQPLFAFEWRDPEKGNTGQLTWTRLPQGFKNSPTLFNEALHRDLAPFRALNPQVVLLQYVDDLLVAAPTYRDCKEGTQKLLQELSKLGYRVSAKKAQLCQKEVTYLGYLLKEGKRWLTPARKATVMKIPPPTTPRQVREFLGTAGFCRLWIPGFASLAAPLYPLTKPSIPFIWTEEHQKAFDRIKEALLSAPALALPDLTKPFTLYVDERAGVARGVLTQTLGPWRRPVAYLSKKLDPVASGWPTCLKAVAAVALLLKDADKLTLGQNVTVIASHSLESIVRQPPDRWMTNARMTHYQSLLLNERVSFAPPAVLNPATLLPVESEATPVHRCSEILAEETGTRRDLKDQPLPGVPAWYTDGSSFIAEGKRRAGAAIVDGKRTVWASSLPEGTSAQKAELVALTQALRLAEGKDINIYTDSRYAFATAHIHGAIYKQRGWLTSAGKDIKNKEEILALLEAIHLPKRVAIIHCPGHQKGNDPVATGNRRADEAAKQAALSTRVLAETTKPAGKRTADGSEFEKRTADGSEFESPKKKAKVE

SEQ ID NO: 843 - protein, 2103 aa, synthetic construct
MPAAKRVKLDGGDKKYSIGLDIGTNSVGWAVITDEYKVPSKKFKVLGNTDRHSIKKNLIGALLFDSGETAEATRLKRTARRRYTRRKNRICYLQEIFSNEMAKVDDSFFHRLEESFLVEEDKKHERHPIFGNIVDEVAYHEKYPTIYHLRKKLVDSTDKADLRLIYLALAHMIKFRGHFLIEGDLNPDNSDVDKLFIQLVQTYNQLFEENPINASGVDAKAILSARLSKSRRLENLIAQLPGEKKNGLFGNLIALSLGLTPNFKSNFDLAEDAKLQLSKDTYDDDLDNLLAQIGDQYADLFLAAKNLSDAILLSDILRVNTEITKAPLSASMIKRYDEHHQDLTLLKALVRQQLPEKYKEIFFDQSKNGYAGYIDGGASQEEFYKFIKPILEKMDGTEELLVKLNREDLLRKQRTFDNGSIPHQIHLGELHAILRRQEDFYPFLKDNREKIEKILTFRIPYYVGPLARGNSRFAWMTRKSEETITPWNFEEVVDKGASAQSFIERMTNFDKNLPNEKVLPKHSLLYEYFTVYNELTKVKYVTEGMRKPAFLSGEQKKAIVDLLFKTNRKVTVKQLKEDYFKKIECFDSVEISGVEDRFNASLGTYHDLLKIIKDKDFLDNEENEDILEDIVLTLTLFEDREMIEERLKTYAHLFDDKVMKQLKRRRYTGWGRLSRKLINGIRDKQSGKTILDFLKSDGFANRNFMQLIHDDSLTFKEDIQKAQVSGQGDSLHEHIANLAGSPAIKKGILQTVKVVDELVKVMGRHKPENIVIEMARENQTTQKGQKNSRERMKRIEEGIKELGSQILKEHPVENTQLQNEKLYLYYLQNGRDMYVDQELDINRLSDYDVDHIVPQSFLKDDSIDNKVLTRSDKARGKSDNVPSEEVVKKMKNYWRQLLNAKLITQRKFDNLTKAERGGLSELDKAGFIKRQLVETRQITKHVAQILDSRMNTKYDENDKLIREVKVITLKSKLVSDFRKDFQFYKVREINNYHHAHDAYLNAVVGTALIKKYPKLESEFVYGDYKVYDVRKMIAKSEQEIGKATAKYFFYSNIMNFFKTEITLANGEIRKRPLIETNGETGEIVWDKGRDFATVRKVLSMPQVNIVKKTEVQTGGFSKESILPKRNSDKLIARKKDWDPKKYGGFDSPTVAYSVLVVAKVEKGKSKKLKSVKELLGITIMERSSFEKNPIDFLEAKGYKEVKKDLIIKLPKYSLFELENGRKRMLASAGELQKGNELALPSKYVNFLYLASHYEKLKGSPEDNEQKQLFVEQHKHYLDEIIEQISEFSKRVILADANLDKVLSAYNKHRDKPIREQAENIIHLFTLTNLGAPAAFKYFDTTIDRKRYTSTKEVLDATLIHQSITGLYETRIDLSQLGGDGGGGGGSGGGGSGGGGSGGGGSGGVLNLEEEYRLHEKPVPSSIDPSWLQLFPTVWAERAGMGLANQVPPVVVELRSGASPVAVRQYPMSKEAREGIRPHIQRFLDLGVLVPCQSPWNTPLLPVKKPGTNDYRPVQDLREINKRVQDIHPTVPNPYNLLSSLPPSHTWYSVLDLKDAFFCLKLHPNSQPLFAFEWRDPEKGNTGQLTWTRLPQGFKNSPTLFNEALHRDLAPFRALNPQVVLLQYVDDLLVAAPTYRDCKEGTQKLLQELSKLGYRVSAKKAQLCQKEVTYLGYLLKEGKRWLTPARKATVMKIPPPTTPRQVREFLGTAGFCRLWIPGFASLAAPLYPLTKPSIPFIWTEEHQKAFDRIKEALLSAPALALPDLTKPFTLYVDERAGVARGVLTQTLGPWRRPVAYLSKKLDPVASGWPTCLKAVAAVALLLKDADKLTLGQNVTVIASHSLESIVRQPPDRWMTNARMTHYQSLLLNERVSFAPPAVLNPATLLPVESEATPVHRCSEILAEETGTRRDLKDQPLPGVPAWYTDGSSFIAEGKRRAGAAIVDGKRTVWASSLPEGTSAQKAELVALTQALRLAEGKDINIYTDSRYAFATAHIHGAIYKQRGWLTSAGKDIKNKEEILALLEAIHLPKRVAIIHCPGHQKGNDPVATGNRRADEAAKQAALSTRVLAETTKPAGKRTADGSEFEKRTADGSEFESPKKKAKVE

SEQ ID NO: 844 - protein, 2094 aa, synthetic construct
MPAAKRVKLDGGDKKYSIGLDIGTNSVGWAVITDEYKVPSKKFKVLGNTDRHSIKKNLIGALLFDSGETAEATRLKRTARRRYTRRKNRICYLQEIFSNEMAKVDDSFFHRLEESFLVEEDKKHERHPIFGNIVDEVAYHEKYPTIYHLRKKLVDSTDKADLRLIYLALAHMIKFRGHFLIEGDLNPDNSDVDKLFIQLVQTYNQLFEENPINASGVDAKAILSARLSKSRRLENLIAQLPGEKKNGLFGNLIALSLGLTPNFKSNFDLAEDAKLQLSKDTYDDDLDNLLAQIGDQYADLFLAAKNLSDAILLSDILRVNTEITKAPLSASMIKRYDEHHQDLTLLKALVRQQLPEKYKEIFFDQSKNGYAGYIDGGASQEEFYKFIKPILEKMDGTEELLVKLNREDLLRKQRTFDNGSIPHQIHLGELHAILRRQEDFYPFLKDNREKIEKILTFRIPYYVGPLARGNSRFAWMTRKSEETITPWNFEEVVDKGASAQSFIERMTNFDKNLPNEKVLPKHSLLYEYFTVYNELTKVKYVTEGMRKPAFLSGEQKKAIVDLLFKTNRKVTVKQLKEDYFKKIECFDSVEISGVEDRFNASLGTYHDLLKIIKDKDFLDNEENEDILEDIVLTLTLFEDREMIEERLKTYAHLFDDKVMKQLKRRRYTGWGRLSRKLINGIRDKQSGKTILDFLKSDGFANRNFMQLIHDDSLTFKEDIQKAQVSGQGDSLHEHIANLAGSPAIKKGILQTVKVVDELVKVMGRHKPENIVIEMARENQTTQKGQKNSRERMKRIEEGIKELGSQILKEHPVENTQLQNEKLYLYYLQNGRDMYVDQELDINRLSDYDVDHIVPQSFLKDDSIDNKVLTRSDKARGKSDNVPSEEVVKKMKNYWRQLLNAKLITQRKFDNLTKAERGGLSELDKAGFIKRQLVETRQITKHVAQILDSRMNTKYDENDKLIREVKVITLKSKLVSDFRKDFQFYKVREINNYHHAHDAYLNAVVGTALIKKYPKLESEFVYGDYKVYDVRKMIAKSEQEIGKATAKYFFYSNIMNFFKTEITLANGEIRKRPLIETNGETGEIVWDKGRDFATVRKVLSMPQVNIVKKTEVQTGGFSKESILPKRNSDKLIARKKDWDPKKYGGFDSPTVAYSVLVVAKVEKGKSKKLKSVKELLGITIMERSSFEKNPIDFLEAKGYKEVKKDLIIKLPKYSLFELENGRKRMLASAGELQKGNELALPSKYVNFLYLASHYEKLKGSPEDNEQKQLFVEQHKHYLDEIIEQISEFSKRVILADANLDKVLSAYNKHRDKPIREQAENIIHLFTLTNLGAPAAFKYFDTTIDRKRYTSTKEVLDATLIHQSITGLYETRIDLSQLGGDGGGGSEAAAKPAPGGVLNLEEEYRLHEKPVPSSIDPSWLQLFPTVWAERAGMGLANQVPPVVVELRSGASPVAVRQYPMSKEAREGIRPHIQRFLDLGVLVPCQSPWNTPLLPVKKPGTNDYRPVQDLREINKRVQDIHPTVPNPYNLLSSLPPSHTWYSVLDLKDAFFCLKLHPNSQPLFAFEWRDPEKGNTGQLTWTRLPQGFKNSPTLFNEALHRDLAPFRALNPQVVLLQYVDDLLVAAPTYRDCKEGTQKLLQELSKLGYRVSAKKAQLCQKEVTYLGYLLKEGKRWLTPARKATVMKIPPPTTPRQVREFLGTAGFCRLWIPGFASLAAPLYPLTKPSIPFIWTEEHQKAFDRIKEALLSAPALALPDLTKPFTLYVDERAGVARGVLTQTLGPWRRPVAYLSKKLDPVASGWPTCLKAVAAVALLLKDADKLTLGQNVTVIASHSLESIVRQPPDRWMTNARMTHYQSLLLNERVSFAPPAVLNPATLLPVESEATPVHRCSEILAEETGTRRDLKDQPLPGVPAWYTDGSSFIAEGKRRAGAAIVDGKRTVWASSLPEGTSAQKAELVALTQALRLAEGKDINIYTDSRYAFATAHIHGAIYKQRGWLTSAGKDIKNKEEILALLEAIHLPKRVAIIHCPGHQKGNDPVATGNRRADEAAKQAALSTRVLAETTKPAGKRTADGSEFEKRTADGSEFESPKKKAKVE

SEQ ID NO: 845 - protein, 2092 aa, synthetic construct
MPAAKRVKLDGGDKKYSIGLDIGTNSVGWAVITDEYKVPSKKFKVLGNTDRHSIKKNLIGALLFDSGETAEATRLKRTARRRYTRRKNRICYLQEIFSNEMAKVDDSFFHRLEESFLVEEDKKHERHPIFGNIVDEVAYHEKYPTIYHLRKKLVDSTDKADLRLIYLALAHMIKFRGHFLIEGDLNPDNSDVDKLFIQLVQTYNQLFEENPINASGVDAKAILSARLSKSRRLENLIAQLPGEKKNGLFGNLIALSLGLTPNFKSNFDLAEDAKLQLSKDTYDDDLDNLLAQIGDQYADLFLAAKNLSDAILLSDILRVNTEITKAPLSASMIKRYDEHHQDLTLLKALVRQQLPEKYKEIFFDQSKNGYAGYIDGGASQEEFYKFIKPILEKMDGTEELLVKLNREDLLRKQRTFDNGSIPHQIHLGELHAILRRQEDFYPFLKDNREKIEKILTFRIPYYVGPLARGNSRFAWMTRKSEETITPWNFEEVVDKGASAQSFIERMTNFDKNLPNEKVLPKHSLLYEYFTVYNELTKVKYVTEGMRKPAFLSGEQKKAIVDLLFKTNRKVTVKQLKEDYFKKIECFDSVEISGVEDRFNASLGTYHDLLKIIKDKDFLDNEENEDILEDIVLTLTLFEDREMIEERLKTYAHLFDDKVMKQLKRRRYTGWGRLSRKLINGIRDKQSGKTILDFLKSDGFANRNFMQLIHDDSLTFKEDIQKAQVSGQGDSLHEHIANLAGSPAIKKGILQTVKVVDELVKVMGRHKPENIVIEMARENQTTQKGQKNSRERMKRIEEGIKELGSQILKEHPVENTQLQNEKLYLYYLQNGRDMYVDQELDINRLSDYDVDHIVPQSFLKDDSIDNKVLTRSDKARGKSDNVPSEEVVKKMKNYWRQLLNAKLITQRKFDNLTKAERGGLSELDKAGFIKRQLVETRQITKHVAQILDSRMNTKYDENDKLIREVKVITLKSKLVSDFRKDFQFYKVREINNYHHAHDAYLNAVVGTALIKKYPKLESEFVYGDYKVYDVRKMIAKSEQEIGKATAKYFFYSNIMNFFKTEITLANGEIRKRPLIETNGETGEIVWDKGRDFATVRKVLSMPQVNIVKKTEVQTGGFSKESILPKRNSDKLIARKKDWDPKKYGGFDSPTVAYSVLVVAKVEKGKSKKLKSVKELLGITIMERSSFEKNPIDFLEAKGYKEVKKDLIIKLPKYSLFELENGRKRMLASAGELQKGNELALPSKYVNFLYLASHYEKLKGSPEDNEQKQLFVEQHKHYLDEIIEQISEFSKRVILADANLDKVLSAYNKHRDKPIREQAENIIHLFTLTNLGAPAAFKYFDTTIDRKRYTSTKEVLDATLIHQSITGLYETRIDLSQLGGDGGGSSPAPGGGGGVLNLEEEYRLHEKPVPSSIDPSWLQLFPTVWAERAGMGLANQVPPVVVELRSGASPVAVRQYPMSKEAREGIRPHIQRFLDLGVLVPCQSPWNTPLLPVKKPGTNDYRPVQDLREINKRVQDIHPTVPNPYNLLSSLPPSHTWYSVLDLKDAFFCLKLHPNSQPLFAFEWRDPEKGNTGQLTWTRLPQGFKNSPTLFNEALHRDLAPFRALNPQVVLLQYVDDLLVAAPTYRDCKEGTQKLLQELSKLGYRVSAKKAQLCQKEVTYLGYLLKEGKRWLTPARKATVMKIPPPTTPRQVREFLGTAGFCRLWIPGFASLAAPLYPLTKPSIPFIWTEEHQKAFDRIKEALLSAPALALPDLTKPFTLYVDERAGVARGVLTQTLGPWRRPVAYLSKKLDPVASGWPTCLKAVAAVALLLKDADKLTLGQNVTVIASHSLESIVRQPPDRWMTNARMTHYQSLLLNERVSFAPPAVLNPATLLPVESEATPVHRCSEILAEETGTRRDLKDQPLPGVPAWYTDGSSFIAEGKRRAGAAIVDGKRTVWASSLPEGTSAQKAELVALTQALRLAEGKDINIYTDSRYAFATAHIHGAIYKQRGWLTSAGKDIKNKEEILALLEAIHLPKRVAIIHCPGHQKGNDPVATGNRRADEAAKQAALSTRVLAETTKPAGKRTADGSEFEKRTADGSEFESPKKKAKVE

SEQ ID NO: 846 - protein, 2095 aa, synthetic construct
MPAAKRVKLDGGDKKYSIGLDIGTNSVGWAVITDEYKVPSKKFKVLGNTDRHSIKKNLIGALLFDSGETAEATRLKRTARRRYTRRKNRICYLQEIFSNEMAKVDDSFFHRLEESFLVEEDKKHERHPIFGNIVDEVAYHEKYPTIYHLRKKLVDSTDKADLRLIYLALAHMIKFRGHFLIEGDLNPDNSDVDKLFIQLVQTYNQLFEENPINASGVDAKAILSARLSKSRRLENLIAQLPGEKKNGLFGNLIALSLGLTPNFKSNFDLAEDAKLQLSKDTYDDDLDNLLAQIGDQYADLFLAAKNLSDAILLSDILRVNTEITKAPLSASMIKRYDEHHQDLTLLKALVRQQLPEKYKEIFFDQSKNGYAGYIDGGASQEEFYKFIKPILEKMDGTEELLVKLNREDLLRKQRTFDNGSIPHQIHLGELHAILRRQEDFYPFLKDNREKIEKILTFRIPYYVGPLARGNSRFAWMTRKSEETITPWNFEEVVDKGASAQSFIERMTNFDKNLPNEKVLPKHSLLYEYFTVYNELTKVKYVTEGMRKPAFLSGEQKKAIVDLLFKTNRKVTVKQLKEDYFKKIECFDSVEISGVEDRFNASLGTYHDLLKIIKDKDFLDNEENEDILEDIVLTLTLFEDREMIEERLKTYAHLFDDKVMKQLKRRRYTGWGRLSRKLINGIRDKQSGKTILDFLKSDGFANRNFMQLIHDDSLTFKEDIQKAQVSGQGDSLHEHIANLAGSPAIKKGILQTVKVVDELVKVMGRHKPENIVIEMARENQTTQKGQKNSRERMKRIEEGIKELGSQILKEHPVENTQLQNEKLYLYYLQNGRDMYVDQELDINRLSDYDVDHIVPQSFLKDDSIDNKVLTRSDKARGKSDNVPSEEVVKKMKNYWRQLLNAKLITQRKFDNLTKAERGGLSELDKAGFIKRQLVETRQITKHVAQILDSRMNTKYDENDKLIREVKVITLKSKLVSDFRKDFQFYKVREINNYHHAHDAYLNAVVGTALIKKYPKLESEFVYGDYKVYDVRKMIAKSEQEIGKATAKYFFYSNIMNFFKTEITLANGEIRKRPLIETNGETGEIVWDKGRDFATVRKVLSMPQVNIVKKTEVQTGGFSKESILPKRNSDKLIARKKDWDPKKYGGFDSPTVAYSVLVVAKVEKGKSKKLKSVKELLGITIMERSSFEKNPIDFLEAKGYKEVKKDLIIKLPKYSLFELENGRKRMLASAGELQKGNELALPSKYVNFLYLASHYEKLKGSPEDNEQKQLFVEQHKHYLDEIIEQISEFSKRVILADANLDKVLSAYNKHRDKPIREQAENIIHLFTLTNLGAPAAFKYFDTTIDRKRYTSTKEVLDATLIHQSITGLYETRIDLSQLGGDGGGSSGSSGSSGSSGGVLNLEEEYRLHEKPVPSSIDPSWLQLFPTVWAERAGMGLANQVPPVVVELRSGASPVAVRQYPMSKEAREGIRPHIQRFLDLGVLVPCQSPWNTPLLPVKKPGTNDYRPVQDLREINKRVQDIHPTVPNPYNLLSSLPPSHTWYSVLDLKDAFFCLKLHPNSQPLFAFEWRDPEKGNTGQLTWTRLPQGFKNSPTLFNEALHRDLAPFRALNPQVVLLQYVDDLLVAAPTYRDCKEGTQKLLQELSKLGYRVSAKKAQLCQKEVTYLGYLLKEGKRWLTPARKATVMKIPPPTTPRQVREFLGTAGFCRLWIPGFASLAAPLYPLTKPSIPFIWTEEHQKAFDRIKEALLSAPALALPDLTKPFTLYVDERAGVARGVLTQTLGPWRRPVAYLSKKLDPVASGWPTCLKAVAAVALLLKDADKLTLGQNVTVIASHSLESIVRQPPDRWMTNARMTHYQSLLLNERVSFAPPAVLNPATLLPVESEATPVHRCSEILAEETGTRRDLKDQPLPGVPAWYTDGSSFIAEGKRRAGAAIVDGKRTVWASSLPEGTSAQKAELVALTQALRLAEGKDINIYTDSRYAFATAHIHGAIYKQRGWLTSAGKDIKNKEEILALLEAIHLPKRVAIIHCPGHQKGNDPVATGNRRADEAAKQAALSTRVLAETTKPAGKRTADGSEFEKRTADGSEFESPKKKAKVE

SEQ ID NO: 847 - protein, 2094 aa, synthetic construct
MPAAKRVKLDGGDKKYSIGLDIGTNSVGWAVITDEYKVPSKKFKVLGNTDRHSIKKNLIGALLFDSGETAEATRLKRTARRRYTRRKNRICYLQEIFSNEMAKVDDSFFHRLEESFLVEEDKKHERHPIFGNIVDEVAYHEKYPTIYHLRKKLVDSTDKADLRLIYLALAHMIKFRGHFLIEGDLNPDNSDVDKLFIQLVQTYNQLFEENPINASGVDAKAILSARLSKSRRLENLIAQLPGEKKNGLFGNLIALSLGLTPNFKSNFDLAEDAKLQLSKDTYDDDLDNLLAQIGDQYADLFLAAKNLSDAILLSDILRVNTEITKAPLSASMIKRYDEHHQDLTLLKALVRQQLPEKYKEIFFDQSKNGYAGYIDGGASQEEFYKFIKPILEKMDGTEELLVKLNREDLLRKQRTFDNGSIPHQIHLGELHAILRRQEDFYPFLKDNREKIEKILTFRIPYYVGPLARGNSRFAWMTRKSEETITPWNFEEVVDKGASAQSFIERMTNFDKNLPNEKVLPKHSLLYEYFTVYNELTKVKYVTEGMRKPAFLSGEQKKAIVDLLFKTNRKVTVKQLKEDYFKKIECFDSVEISGVEDRFNASLGTYHDLLKIIKDKDFLDNEENEDILEDIVLTLTLFEDREMIEERLKTYAHLFDDKVMKQLKRRRYTGWGRLSRKLINGIRDKQSGKTILDFLKSDGFANRNFMQLIHDDSLTFKEDIQKAQVSGQGDSLHEHIANLAGSPAIKKGILQTVKVVDELVKVMGRHKPENIVIEMARENQTTQKGQKNSRERMKRIEEGIKELGSQILKEHPVENTQLQNEKLYLYYLQNGRDMYVDQELDINRLSDYDVDHIVPQSFLKDDSIDNKVLTRSDKARGKSDNVPSEEVVKKMKNYWRQLLNAKLITQRKFDNLTKAERGGLSELDKAGFIKRQLVETRQITKHVAQILDSRMNTKYDENDKLIREVKVITLKSKLVSDFRKDFQFYKVREINNYHHAHDAYLNAVVGTALIKKYPKLESEFVYGDYKVYDVRKMIAKSEQEIGKATAKYFFYSNIMNFFKTEITLANGEIRKRPLIETNGETGEIVWDKGRDFATVRKVLSMPQVNIVKKTEVQTGGFSKESILPKRNSDKLIARKKDWDPKKYGGFDSPTVAYSVLVVAKVEKGKSKKLKSVKELLGITIMERSSFEKNPIDFLEAKGYKEVKKDLIIKLPKYSLFELENGRKRMLASAGELQKGNELALPSKYVNFLYLASHYEKLKGSPEDNEQKQLFVEQHKHYLDEIIEQISEFSKRVILADANLDKVLSAYNKHRDKPIREQAENIIHLFTLTNLGAPAAFKYFDTTIDRKRYTSTKEVLDATLIHQSITGLYETRIDLSQLGGDGGPAPGGSEAAAKGGVLNLEEEYRLHEKPVPSSIDPSWLQLFPTVWAERAGMGLANQVPPVVVELRSGASPVAVRQYPMSKEAREGIRPHIQRFLDLGVLVPCQSPWNTPLLPVKKPGTNDYRPVQDLREINKRVQDIHPTVPNPYNLLSSLPPSHTWYSVLDLKDAFFCLKLHPNSQPLFAFEWRDPEKGNTGQLTWTRLPQGFKNSPTLFNEALHRDLAPFRALNPQVVLLQYVDDLLVAAPTYRDCKEGTQKLLQELSKLGYRVSAKKAQLCQKEVTYLGYLLKEGKRWLTPARKATVMKIPPPTTPRQVREFLGTAGFCRLWIPGFASLAAPLYPLTKPSIPFIWTEEHQKAFDRIKEALLSAPALALPDLTKPFTLYVDERAGVARGVLTQTLGPWRRPVAYLSKKLDPVASGWPTCLKAVAAVALLLKDADKLTLGQNVTVIASHSLESIVRQPPDRWMTNARMTHYQSLLLNERVSFAPPAVLNPATLLPVESEATPVHRCSEILAEETGTRRDLKDQPLPGVPAWYTDGSSFIAEGKRRAGAAIVDGKRTVWASSLPEGTSAQKAELVALTQALRLAEGKDINIYTDSRYAFATAHIHGAIYKQRGWLTSAGKDIKNKEEILALLEAIHLPKRVAIIHCPGHQKGNDPVATGNRRADEAAKQAALSTRVLAETTKPAGKRTADGSEFEKRTADGSEFESPKKKAKVE

SEQ ID NO: 848 - protein, 2088 aa, synthetic construct
MPAAKRVKLDGGDKKYSIGLDIGTNSVGWAVITDEYKVPSKKFKVLGNTDRHSIKKNLIGALLFDSGETAEATRLKRTARRRYTRRKNRICYLQEIFSNEMAKVDDSFFHRLEESFLVEEDKKHERHPIFGNIVDEVAYHEKYPTIYHLRKKLVDSTDKADLRLIYLALAHMIKFRGHFLIEGDLNPDNSDVDKLFIQLVQTYNQLFEENPINASGVDAKAILSARLSKSRRLENLIAQLPGEKKNGLFGNLIALSLGLTPNFKSNFDLAEDAKLQLSKDTYDDDLDNLLAQIGDQYADLFLAAKNLSDAILLSDILRVNTEITKAPLSASMIKRYDEHHQDLTLLKALVRQQLPEKYKEIFFDQSKNGYAGYIDGGASQEEFYKFIKPILEKMDGTEELLVKLNREDLLRKQRTFDNGSIPHQIHLGELHAILRRQEDFYPFLKDNREKIEKILTFRIPYYVGPLARGNSRFAWMTRKSEETITPWNFEEVVDKGASAQSFIERMTNFDKNLPNEKVLPKHSLLYEYFTVYNELTKVKYVTEGMRKPAFLSGEQKKAIVDLLFKTNRKVTVKQLKEDYFKKIECFDSVEISGVEDRFNASLGTYHDLLKIIKDKDFLDNEENEDILEDIVLTLTLFEDREMIEERLKTYAHLFDDKVMKQLKRRRYTGWGRLSRKLINGIRDKQSGKTILDFLKSDGFANRNFMQLIHDDSLTFKEDIQKAQVSGQGDSLHEHIANLAGSPAIKKGILQTVKVVDELVKVMGRHKPENIVIEMARENQTTQKGQKNSRERMKRIEEGIKELGSQILKEHPVENTQLQNEKLYLYYLQNGRDMYVDQELDINRLSDYDVDHIVPQSFLKDDSIDNKVLTRSDKARGKSDNVPSEEVVKKMKNYWRQLLNAKLITQRKFDNLTKAERGGLSELDKAGFIKRQLVETRQITKHVAQILDSRMNTKYDENDKLIREVKVITLKSKLVSDFRKDFQFYKVREINNYHHAHDAYLNAVVGTALIKKYPKLESEFVYGDYKVYDVRKMIAKSEQEIGKATAKYFFYSNIMNFFKTEITLANGEIRKRPLIETNGETGEIVWDKGRDFATVRKVLSMPQVNIVKKTEVQTGGFSKESILPKRNSDKLIARKKDWDPKKYGGFDSPTVAYSVLVVAKVEKGKSKKLKSVKELLGITIMERSSFEKNPIDFLEAKGYKEVKKDLIIKLPKYSLFELENGRKRMLASAGELQKGNELALPSKYVNFLYLASHYEKLKGSPEDNEQKQLFVEQHKHYLDEIIEQISEFSKRVILADANLDKVLSAYNKHRDKPIREQAENIIHLFTLTNLGAPAAFKYFDTTIDRKRYTSTKEVLDATLIHQSITGLYETRIDLSQLGGDGGPAPAPGGVLNLEEEYRLHEKPVPSSIDPSWLQLFPTVWAERAGMGLANQVPPVVVELRSGASPVAVRQYPMSKEAREGIRPHIQRFLDLGVLVPCQSPWNTPLLPVKKPGTNDYRPVQDLREINKRVQDIHPTVPNPYNLLSSLPPSHTWYSVLDLKDAFFCLKLHPNSQPLFAFEWRDPEKGNTGQLTWTRLPQGFKNSPTLFNEALHRDLAPFRALNPQVVLLQYVDDLLVAAPTYRDCKEGTQKLLQELSKLGYRVSAKKAQLCQKEVTYLGYLLKEGKRWLTPARKATVMKIPPPTTPRQVREFLGTAGFCRLWIPGFASLAAPLYPLTKPSIPFIWTEEHQKAFDRIKEALLSAPALALPDLTKPFTLYVDERAGVARGVLTQTLGPWRRPVAYLSKKLDPVASGWPTCLKAVAAVALLLKDADKLTLGQNVTVIASHSLESIVRQPPDRWMTNARMTHYQSLLLNERVSFAPPAVLNPATLLPVESEATPVHRCSEILAEETGTRRDLKDQPLPGVPAWYTDGSSFIAEGKRRAGAAIVDGKRTVWASSLPEGTSAQKAELVALTQALRLAEGKDINIYTDSRYAFATAHIHGAIYKQRGWLTSAGKDIKNKEEILALLEAIHLPKRVAIIHCPGHQKGNDPVATGNRRADEAAKQAALSTRVLAETTKPAGKRTADGSEFEKRTADGSEFESPKKKAKVE

SEQ ID NO: 849 - protein, 2092 aa, synthetic construct
MPAAKRVKLDGGDKKYSIGLDIGTNSVGWAVITDEYKVPSKKFKVLGNTDRHSIKKNLIGALLFDSGETAEATRLKRTARRRYTRRKNRICYLQEIFSNEMAKVDDSFFHRLEESFLVEEDKKHERHPIFGNIVDEVAYHEKYPTIYHLRKKLVDSTDKADLRLIYLALAHMIKFRGHFLIEGDLNPDNSDVDKLFIQLVQTYNQLFEENPINASGVDAKAILSARLSKSRRLENLIAQLPGEKKNGLFGNLIALSLGLTPNFKSNFDLAEDAKLQLSKDTYDDDLDNLLAQIGDQYADLFLAAKNLSDAILLSDILRVNTEITKAPLSASMIKRYDEHHQDLTLLKALVRQQLPEKYKEIFFDQSKNGYAGYIDGGASQEEFYKFIKPILEKMDGTEELLVKLNREDLLRKQRTFDNGSIPHQIHLGELHAILRRQEDFYPFLKDNREKIEKILTFRIPYYVGPLARGNSRFAWMTRKSEETITPWNFEEVVDKGASAQSFIERMTNFDKNLPNEKVLPKHSLLYEYFTVYNELTKVKYVTEGMRKPAFLSGEQKKAIVDLLFKTNRKVTVKQLKEDYFKKIECFDSVEISGVEDRFNASLGTYHDLLKIIKDKDFLDNEENEDILEDIVLTLTLFEDREMIEERLKTYAHLFDDKVMKQLKRRRYTGWGRLSRKLINGIRDKQSGKTILDFLKSDGFANRNFMQLIHDDSLTFKEDIQKAQVSGQGDSLHEHIANLAGSPAIKKGILQTVKVVDELVKVMGRHKPENIVIEMARENQTTQKGQKNSRERMKRIEEGIKELGSQILKEHPVENTQLQNEKLYLYYLQNGRDMYVDQELDINRLSDYDVDHIVPQSFLKDDSIDNKVLTRSDKARGKSDNVPSEEVVKKMKNYWRQLLNAKLITQRKFDNLTKAERGGLSELDKAGFIKRQLVETRQITKHVAQILDSRMNTKYDENDKLIREVKVITLKSKLVSDFRKDFQFYKVREINNYHHAHDAYLNAVVGTALIKKYPKLESEFVYGDYKVYDVRKMIAKSEQEIGKATAKYFFYSNIMNFFKTEITLANGEIRKRPLIETNGETGEIVWDKGRDFATVRKVLSMPQVNIVKKTEVQTGGFSKESILPKRNSDKLIARKKDWDPKKYGGFDSPTVAYSVLVVAKVEKGKSKKLKSVKELLGITIMERSSFEKNPIDFLEAKGYKEVKKDLIIKLPKYSLFELENGRKRMLASAGELQKGNELALPSKYVNFLYLASHYEKLKGSPEDNEQKQLFVEQHKHYLDEIIEQISEFSKRVILADANLDKVLSAYNKHRDKPIREQAENIIHLFTLTNLGAPAAFKYFDTTIDRKRYTSTKEVLDATLIHQSITGLYETRIDLSQLGGDGGGSSGGGGGSGGVLNLEEEYRLHEKPVPSSIDPSWLQLFPTVWAERAGMGLANQVPPVVVELRSGASPVAVRQYPMSKEAREGIRPHIQRFLDLGVLVPCQSPWNTPLLPVKKPGTNDYRPVQDLREINKRVQDIHPTVPNPYNLLSSLPPSHTWYSVLDLKDAFFCLKLHPNSQPLFAFEWRDPEKGNTGQLTWTRLPQGFKNSPTLFNEALHRDLAPFRALNPQVVLLQYVDDLLVAAPTYRDCKEGTQKLLQELSKLGYRVSAKKAQLCQKEVTYLGYLLKEGKRWLTPARKATVMKIPPPTTPRQVREFLGTAGFCRLWIPGFASLAAPLYPLTKPSIPFIWTEEHQKAFDRIKEALLSAPALALPDLTKPFTLYVDERAGVARGVLTQTLGPWRRPVAYLSKKLDPVASGWPTCLKAVAAVALLLKDADKLTLGQNVTVIASHSLESIVRQPPDRWMTNARMTHYQSLLLNERVSFAPPAVLNPATLLPVESEATPVHRCSEILAEETGTRRDLKDQPLPGVPAWYTDGSSFIAEGKRRAGAAIVDGKRTVWASSLPEGTSAQKAELVALTQALRLAEGKDINIYTDSRYAFATAHIHGAIYKQRGWLTSAGKDIKNKEEILALLEAIHLPKRVAIIHCPGHQKGNDPVATGNRRADEAAKQAALSTRVLAETTKPAGKRTADGSEFEKRTADGSEFESPKKKAKVE

SEQ ID NO: 850 - protein, 2092 aa, synthetic construct
MPAAKRVKLDGGDKKYSIGLDIGTNSVGWAVITDEYKVPSKKFKVLGNTDRHSIKKNLIGALLFDSGETAEATRLKRTARRRYTRRKNRICYLQEIFSNEMAKVDDSFFHRLEESFLVEEDKKHERHPIFGNIVDEVAYHEKYPTIYHLRKKLVDSTDKADLRLIYLALAHMIKFRGHFLIEGDLNPDNSDVDKLFIQLVQTYNQLFEENPINASGVDAKAILSARLSKSRRLENLIAQLPGEKKNGLFGNLIALSLGLTPNFKSNFDLAEDAKLQLSKDTYDDDLDNLLAQIGDQYADLFLAAKNLSDAILLSDILRVNTEITKAPLSASMIKRYDEHHQDLTLLKALVRQQLPEKYKEIFFDQSKNGYAGYIDGGASQEEFYKFIKPILEKMDGTEELLVKLNREDLLRKQRTFDNGSIPHQIHLGELHAILRRQEDFYPFLKDNREKIEKILTFRIPYYVGPLARGNSRFAWMTRKSEETITPWNFEEVVDKGASAQSFIERMTNFDKNLPNEKVLPKHSLLYEYFTVYNELTKVKYVTEGMRKPAFLSGEQKKAIVDLLFKTNRKVTVKQLKEDYFKKIECFDSVEISGVEDRFNASLGTYHDLLKIIKDKDFLDNEENEDILEDIVLTLTLFEDREMIEERLKTYAHLFDDKVMKQLKRRRYTGWGRLSRKLINGIRDKQSGKTILDFLKSDGFANRNFMQLIHDDSLTFKEDIQKAQVSGQGDSLHEHIANLAGSPAIKKGILQTVKVVDELVKVMGRHKPENIVIEMARENQTTQKGQKNSRERMKRIEEGIKELGSQILKEHPVENTQLQNEKLYLYYLQNGRDMYVDQELDINRLSDYDVDHIVPQSFLKDDSIDNKVLTRSDKARGKSDNVPSEEVVKKMKNYWRQLLNAKLITQRKFDNLTKAERGGLSELDKAGFIKRQLVETRQITKHVAQILDSRMNTKYDENDKLIREVKVITLKSKLVSDFRKDFQFYKVREINNYHHAHDAYLNAVVGTALIKKYPKLESEFVYGDYKVYDVRKMIAKSEQEIGKATAKYFFYSNIMNFFKTEITLANGEIRKRPLIETNGETGEIVWDKGRDFATVRKVLSMPQVNIVKKTEVQTGGFSKESILPKRNSDKLIARKKDWDPKKYGGFDSPTVAYSVLVVAKVEKGKSKKLKSVKELLGITIMERSSFEKNPIDFLEAKGYKEVKKDLIIKLPKYSLFELENGRKRMLASAGELQKGNELALPSKYVNFLYLASHYEKLKGSPEDNEQKQLFVEQHKHYLDEIIEQISEFSKRVILADANLDKVLSAYNKHRDKPIREQAENIIHLFTLTNLGAPAAFKYFDTTIDRKRYTSTKEVLDATLIHQSITGLYETRIDLSQLGGDGGGGSGGSGGSGGVLNLEEEYRLHEKPVPSSIDPSWLQLFPTVWAERAGMGLANQVPPVVVELRSGASPVAVRQYPMSKEAREGIRPHIQRFLDLGVLVPCQSPWNTPLLPVKKPGTNDYRPVQDLREINKRVQDIHPTVPNPYNLLSSLPPSHTWYSVLDLKDAFFCLKLHPNSQPLFAFEWRDPEKGNTGQLTWTRLPQGFKNSPTLFNEALHRDLAPFRALNPQVVLLQYVDDLLVAAPTYRDCKEGTQKLLQELSKLGYRVSAKKAQLCQKEVTYLGYLLKEGKRWLTPARKATVMKIPPPTTPRQVREFLGTAGFCRLWIPGFASLAAPLYPLTKPSIPFIWTEEHQKAFDRIKEALLSAPALALPDLTKPFTLYVDERAGVARGVLTQTLGPWRRPVAYLSKKLDPVASGWPTCLKAVAAVALLLKDADKLTLGQNVTVIASHSLESIVRQPPDRWMTNARMTHYQSLLLNERVSFAPPAVLNPATLLPVESEATPVHRCSEILAEETGTRRDLKDQPLPGVPAWYTDGSSFIAEGKRRAGAAIVDGKRTVWASSLPEGTSAQKAELVALTQALRLAEGKDINIYTDSRYAFATAHIHGAIYKQRGWLTSAGKDIKNKEEILALLEAIHLPKRVAIIHCPGHQKGNDPVATGNRRADEAAKQAALSTRVLAETTKPAGKRTADGSEFEKRTADGSEFESPKKKAKVE

SEQ ID NO: 851 - protein, 2086 aa, synthetic construct
MPAAKRVKLDGGDKKYSIGLDIGTNSVGWAVITDEYKVPSKKFKVLGNTDRHSIKKNLIGALLFDSGETAEATRLKRTARRRYTRRKNRICYLQEIFSNEMAKVDDSFFHRLEESFLVEEDKKHERHPIFGNIVDEVAYHEKYPTIYHLRKKLVDSTDKADLRLIYLALAHMIKFRGHFLIEGDLNPDNSDVDKLFIQLVQTYNQLFEENPINASGVDAKAILSARLSKSRRLENLIAQLPGEKKNGLFGNLIALSLGLTPNFKSNFDLAEDAKLQLSKDTYDDDLDNLLAQIGDQYADLFLAAKNLSDAILLSDILRVNTEITKAPLSASMIKRYDEHHQDLTLLKALVRQQLPEKYKEIFFDQSKNGYAGYIDGGASQEEFYKFIKPILEKMDGTEELLVKLNREDLLRKQRTFDNGSIPHQIHLGELHAILRRQEDFYPFLKDNREKIEKILTFRIPYYVGPLARGNSRFAWMTRKSEETITPWNFEEVVDKGASAQSFIERMTNFDKNLPNEKVLPKHSLLYEYFTVYNELTKVKYVTEGMRKPAFLSGEQKKAIVDLLFKTNRKVTVKQLKEDYFKKIECFDSVEISGVEDRFNASLGTYHDLLKIIKDKDFLDNEENEDILEDIVLTLTLFEDREMIEERLKTYAHLFDDKVMKQLKRRRYTGWGRLSRKLINGIRDKQSGKTILDFLKSDGFANRNFMQLIHDDSLTFKEDIQKAQVSGQGDSLHEHIANLAGSPAIKKGILQTVKVVDELVKVMGRHKPENIVIEMARENQTTQKGQKNSRERMKRIEEGIKELGSQILKEHPVENTQLQNEKLYLYYLQNGRDMYVDQELDINRLSDYDVDHIVPQSFLKDDSIDNKVLTRSDKARGKSDNVPSEEVVKKMKNYWRQLLNAKLITQRKFDNLTKAERGGLSELDKAGFIKRQLVETRQITKHVAQILDSRMNTKYDENDKLIREVKVITLKSKLVSDFRKDFQFYKVREINNYHHAHDAYLNAVVGTALIKKYPKLESEFVYGDYKVYDVRKMIAKSEQEIGKATAKYFFYSNIMNFFKTEITLANGEIRKRPLIETNGETGEIVWDKGRDFATVRKVLSMPQVNIVKKTEVQTGGFSKESILPKRNSDKLIARKKDWDPKKYGGFDSPTVAYSVLVVAKVEKGKSKKLKSVKELLGITIMERSSFEKNPIDFLEAKGYKEVKKDLIIKLPKYSLFELENGRKRMLASAGELQKGNELALPSKYVNFLYLASHYEKLKGSPEDNEQKQLFVEQHKHYLDEIIEQISEFSKRVILADANLDKVLSAYNKHRDKPIREQAENIIHLFTLTNLGAPAAFKYFDTTIDRKRYTSTKEVLDATLIHQSITGLYETRIDLSQLGGDGGGGSGGVLNLEEEYRLHEKPVPSSIDPSWLQLFPTVWAERAGMGLANQVPPVVVELRSGASPVAVRQYPMSKEAREGIRPHIQRFLDLGVLVPCQSPWNTPLLPVKKPGTNDYRPVQDLREINKRVQDIHPTVPNPYNLLSSLPPSHTWYSVLDLKDAFFCLKLHPNSQPLFAFEWRDPEKGNTGQLTWTRLPQGFKNSPTLFNEALHRDLAPFRALNPQVVLLQYVDDLLVAAPTYRDCKEGTQKLLQELSKLGYRVSAKKAQLCQKEVTYLGYLLKEGKRWLTPARKATVMKIPPPTTPRQVREFLGTAGFCRLWIPGFASLAAPLYPLTKPSIPFIWTEEHQKAFDRIKEALLSAPALALPDLTKPFTLYVDERAGVARGVLTQTLGPWRRPVAYLSKKLDPVASGWPTCLKAVAAVALLLKDADKLTLGQNVTVIASHSLESIVRQPPDRWMTNARMTHYQSLLLNERVSFAPPAVLNPATLLPVESEATPVHRCSEILAEETGTRRDLKDQPLPGVPAWYTDGSSFIAEGKRRAGAAIVDGKRTVWASSLPEGTSAQKAELVALTQALRLAEGKDINIYTDSRYAFATAHIHGAIYKQRGWLTSAGKDIKNKEEILALLEAIHLPKRVAIIHCPGHQKGNDPVATGNRRADEAAKQAALSTRVLAETTKPAGKRTADGSEFEKRTADGSEFESPKKKAKVE

SEQ ID NO: 852 - protein, 2091 aa, synthetic construct
MPAAKRVKLDGGDKKYSIGLDIGTNSVGWAVITDEYKVPSKKFKVLGNTDRHSIKKNLIGALLFDSGETAEATRLKRTARRRYTRRKNRICYLQEIFSNEMAKVDDSFFHRLEESFLVEEDKKHERHPIFGNIVDEVAYHEKYPTIYHLRKKLVDSTDKADLRLIYLALAHMIKFRGHFLIEGDLNPDNSDVDKLFIQLVQTYNQLFEENPINASGVDAKAILSARLSKSRRLENLIAQLPGEKKNGLFGNLIALSLGLTPNFKSNFDLAEDAKLQLSKDTYDDDLDNLLAQIGDQYADLFLAAKNLSDAILLSDILRVNTEITKAPLSASMIKRYDEHHQDLTLLKALVRQQLPEKYKEIFFDQSKNGYAGYIDGGASQEEFYKFIKPILEKMDGTEELLVKLNREDLLRKQRTFDNGSIPHQIHLGELHAILRRQEDFYPFLKDNREKIEKILTFRIPYYVGPLARGNSRFAWMTRKSEETITPWNFEEVVDKGASAQSFIERMTNFDKNLPNEKVLPKHSLLYEYFTVYNELTKVKYVTEGMRKPAFLSGEQKKAIVDLLFKTNRKVTVKQLKEDYFKKIECFDSVEISGVEDRFNASLGTYHDLLKIIKDKDFLDNEENEDILEDIVLTLTLFEDREMIEERLKTYAHLFDDKVMKQLKRRRYTGWGRLSRKLINGIRDKQSGKTILDFLKSDGFANRNFMQLIHDDSLTFKEDIQKAQVSGQGDSLHEHIANLAGSPAIKKGILQTVKVVDELVKVMGRHKPENIVIEMARENQTTQKGQKNSRERMKRIEEGIKELGSQILKEHPVENTQLQNEKLYLYYLQNGRDMYVDQELDINRLSDYDVDHIVPQSFLKDDSIDNKVLTRSDKARGKSDNVPSEEVVKKMKNYWRQLLNAKLITQRKFDNLTKAERGGLSELDKAGFIKRQLVETRQITKHVAQILDSRMNTKYDENDKLIREVKVITLKSKLVSDFRKDFQFYKVREINNYHHAHDAYLNAVVGTALIKKYPKLESEFVYGDYKVYDVRKMIAKSEQEIGKATAKYFFYSNIMNFFKTEITLANGEIRKRPLIETNGETGEIVWDKGRDFATVRKVLSMPQVNIVKKTEVQTGGFSKESILPKRNSDKLIARKKDWDPKKYGGFDSPTVAYSVLVVAKVEKGKSKKLKSVKELLGITIMERSSFEKNPIDFLEAKGYKEVKKDLIIKLPKYSLFELENGRKRMLASAGELQKGNELALPSKYVNFLYLASHYEKLKGSPEDNEQKQLFVEQHKHYLDEIIEQISEFSKRVILADANLDKVLSAYNKHRDKPIREQAENIIHLFTLTNLGAPAAFKYFDTTIDRKRYTSTKEVLDATLIHQSITGLYETRIDLSQLGGDGGGGSEAAAKGGVLNLEEEYRLHEKPVPSSIDPSWLQLFPTVWAERAGMGLANQVPPVVVELRSGASPVAVRQYPMSKEAREGIRPHIQRFLDLGVLVPCQSPWNTPLLPVKKPGTNDYRPVQDLREINKRVQDIHPTVPNPYNLLSSLPPSHTWYSVLDLKDAFFCLKLHPNSQPLFAFEWRDPEKGNTGQLTWTRLPQGFKNSPTLFNEALHRDLAPFRALNPQVVLLQYVDDLLVAAPTYRDCKEGTQKLLQELSKLGYRVSAKKAQLCQKEVTYLGYLLKEGKRWLTPARKATVMKIPPPTTPRQVREFLGTAGFCRLWIPGFASLAAPLYPLTKPSIPFIWTEEHQKAFDRIKEALLSAPALALPDLTKPFTLYVDERAGVARGVLTQTLGPWRRPVAYLSKKLDPVASGWPTCLKAVAAVALLLKDADKLTLGQNVTVIASHSLESIVRQPPDRWMTNARMTHYQSLLLNERVSFAPPAVLNPATLLPVESEATPVHRCSEILAEETGTRRDLKDQPLPGVPAWYTDGSSFIAEGKRRAGAAIVDGKRTVWASSLPEGTSAQKAELVALTQALRLAEGKDINIYTDSRYAFATAHIHGAIYKQRGWLTSAGKDIKNKEEILALLEAIHLPKRVAIIHCPGHQKGNDPVATGNRRADEAAKQAALSTRVLAETTKPAGKRTADGSEFEKRTADGSEFESPKKKAKVE

SEQ ID NO: 853 - protein, 2094 aa, synthetic construct
MPAAKRVKLDGGDKKYSIGLDIGTNSVGWAVITDEYKVPSKKFKVLGNTDRHSIKKNLIGALLFDSGETAEATRLKRTARRRYTRRKNRICYLQEIFSNEMAKVDDSFFHRLEESFLVEEDKKHERHPIFGNIVDEVAYHEKYPTIYHLRKKLVDSTDKADLRLIYLALAHMIKFRGHFLIEGDLNPDNSDVDKLFIQLVQTYNQLFEENPINASGVDAKAILSARLSKSRRLENLIAQLPGEKKNGLFGNLIALSLGLTPNFKSNFDLAEDAKLQLSKDTYDDDLDNLLAQIGDQYADLFLAAKNLSDAILLSDILRVNTEITKAPLSASMIKRYDEHHQDLTLLKALVRQQLPEKYKEIFFDQSKNGYAGYIDGGASQEEFYKFIKPILEKMDGTEELLVKLNREDLLRKQRTFDNGSIPHQIHLGELHAILRRQEDFYPFLKDNREKIEKILTFRIPYYVGPLARGNSRFAWMTRKSEETITPWNFEEVVDKGASAQSFIERMTNFDKNLPNEKVLPKHSLLYEYFTVYNELTKVKYVTEGMRKPAFLSGEQKKAIVDLLFKTNRKVTVKQLKEDYFKKIECFDSVEISGVEDRFNASLGTYHDLLKIIKDKDFLDNEENEDILEDIVLTLTLFEDREMIEERLKTYAHLFDDKVMKQLKRRRYTGWGRLSRKLINGIRDKQSGKTILDFLKSDGFANRNFMQLIHDDSLTFKEDIQKAQVSGQGDSLHEHIANLAGSPAIKKGILQTVKVVDELVKVMGRHKPENIVIEMARENQTTQKGQKNSRERMKRIEEGIKELGSQILKEHPVENTQLQNEKLYLYYLQNGRDMYVDQELDINRLSDYDVDHIVPQSFLKDDSIDNKVLTRSDKARGKSDNVPSEEVVKKMKNYWRQLLNAKLITQRKFDNLTKAERGGLSELDKAGFIKRQLVETRQITKHVAQILDSRMNTKYDENDKLIREVKVITLKSKLVSDFRKDFQFYKVREINNYHHAHDAYLNAVVGTALIKKYPKLESEFVYGDYKVYDVRKMIAKSEQEIGKATAKYFFYSNIMNFFKTEITLANGEIRKRPLIETNGETGEIVWDKGRDFATVRKVLSMPQVNIVKKTEVQTGGFSKESILPKRNSDKLIARKKDWDPKKYGGFDSPTVAYSVLVVAKVEKGKSKKLKSVKELLGITIMERSSFEKNPIDFLEAKGYKEVKKDLIIKLPKYSLFELENGRKRMLASAGELQKGNELALPSKYVNFLYLASHYEKLKGSPEDNEQKQLFVEQHKHYLDEIIEQISEFSKRVILADANLDKVLSAYNKHRDKPIREQAENIIHLFTLTNLGAPAAFKYFDTTIDRKRYTSTKEVLDATLIHQSITGLYETRIDLSQLGGDGGGSSEAAAKGGGGGVLNLEEEYRLHEKPVPSSIDPSWLQLFPTVWAERAGMGLANQVPPVVVELRSGASPVAVRQYPMSKEAREGIRPHIQRFLDLGVLVPCQSPWNTPLLPVKKPGTNDYRPVQDLREINKRVQDIHPTVPNPYNLLSSLPPSHTWYSVLDLKDAFFCLKLHPNSQPLFAFEWRDPEKGNTGQLTWTRLPQGFKNSPTLFNEALHRDLAPFRALNPQVVLLQYVDDLLVAAPTYRDCKEGTQKLLQELSKLGYRVSAKKAQLCQKEVTYLGYLLKEGKRWLTPARKATVMKIPPPTTPRQVREFLGTAGFCRLWIPGFASLAAPLYPLTKPSIPFIWTEEHQKAFDRIKEALLSAPALALPDLTKPFTLYVDERAGVARGVLTQTLGPWRRPVAYLSKKLDPVASGWPTCLKAVAAVALLLKDADKLTLGQNVTVIASHSLESIVRQPPDRWMTNARMTHYQSLLLNERVSFAPPAVLNPATLLPVESEATPVHRCSEILAEETGTRRDLKDQPLPGVPAWYTDGSSFIAEGKRRAGAAIVDGKRTVWASSLPEGTSAQKAELVALTQALRLAEGKDINIYTDSRYAFATAHIHGAIYKQRGWLTSAGKDIKNKEEILALLEAIHLPKRVAIIHCPGHQKGNDPVATGNRRADEAAKQAALSTRVLAETTKPAGKRTADGSEFEKRTADGSEFESPKKKAKVE

SEQ ID NO: 854 - protein, 2094 aa, synthetic construct
MPAAKRVKLDGGDKKYSIGLDIGTNSVGWAVITDEYKVPSKKFKVLGNTDRHSIKKNLIGALLFDSGETAEATRLKRTARRRYTRRKNRICYLQEIFSNEMAKVDDSFFHRLEESFLVEEDKKHERHPIFGNIVDEVAYHEKYPTIYHLRKKLVDSTDKADLRLIYLALAHMIKFRGHFLIEGDLNPDNSDVDKLFIQLVQTYNQLFEENPINASGVDAKAILSARLSKSRRLENLIAQLPGEKKNGLFGNLIALSLGLTPNFKSNFDLAEDAKLQLSKDTYDDDLDNLLAQIGDQYADLFLAAKNLSDAILLSDILRVNTEITKAPLSASMIKRYDEHHQDLTLLKALVRQQLPEKYKEIFFDQSKNGYAGYIDGGASQEEFYKFIKPILEKMDGTEELLVKLNREDLLRKQRTFDNGSIPHQIHLGELHAILRRQEDFYPFLKDNREKIEKILTFRIPYYVGPLARGNSRFAWMTRKSEETITPWNFEEVVDKGASAQSFIERMTNFDKNLPNEKVLPKHSLLYEYFTVYNELTKVKYVTEGMRKPAFLSGEQKKAIVDLLFKTNRKVTVKQLKEDYFKKIECFDSVEISGVEDRFNASLGTYHDLLKIIKDKDFLDNEENEDILEDIVLTLTLFEDREMIEERLKTYAHLFDDKVMKQLKRRRYTGWGRLSRKLINGIRDKQSGKTILDFLKSDGFANRNFMQLIHDDSLTFKEDIQKAQVSGQGDSLHEHIANLAGSPAIKKGILQTVKVVDELVKVMGRHKPENIVIEMARENQTTQKGQKNSRERMKRIEEGIKELGSQILKEHPVENTQLQNEKLYLYYLQNGRDMYVDQELDINRLSDYDVDHIVPQSFLKDDSIDNKVLTRSDKARGKSDNVPSEEVVKKMKNYWRQLLNAKLITQRKFDNLTKAERGGLSELDKAGFIKRQLVETRQITKHVAQILDSRMNTKYDENDKLIREVKVITLKSKLVSDFRKDFQFYKVREINNYHHAHDAYLNAVVGTALIKKYPKLESEFVYGDYKVYDVRKMIAKSEQEIGKATAKYFFYSNIMNFFKTEITLANGEIRKRPLIETNGETGEIVWDKGRDFATVRKVLSMPQVNIVKKTEVQTGGFSKESILPKRNSDKLIARKKDWDPKKYGGFDSPTVAYSVLVVAKVEKGKSKKLKSVKELLGITIMERSSFEKNPIDFLEAKGYKEVKKDLIIKLPKYSLFELENGRKRMLASAGELQKGNELALPSKYVNFLYLASHYEKLKGSPEDNEQKQLFVEQHKHYLDEIIEQISEFSKRVILADANLDKVLSAYNKHRDKPIREQAENIIHLFTLTNLGAPAAFKYFDTTIDRKRYTSTKEVLDATLIHQSITGLYETRIDLSQLGGDGGGGSEAAAKGGGGGVLNLEEEYRLHEKPVPSSIDPSWLQLFPTVWAERAGMGLANQVPPVVVELRSGASPVAVRQYPMSKEAREGIRPHIQRFLDLGVLVPCQSPWNTPLLPVKKPGTNDYRPVQDLREINKRVQDIHPTVPNPYNLLSSLPPSHTWYSVLDLKDAFFCLKLHPNSQPLFAFEWRDPEKGNTGQLTWTRLPQGFKNSPTLFNEALHRDLAPFRALNPQVVLLQYVDDLLVAAPTYRDCKEGTQKLLQELSKLGYRVSAKKAQLCQKEVTYLGYLLKEGKRWLTPARKATVMKIPPPTTPRQVREFLGTAGFCRLWIPGFASLAAPLYPLTKPSIPFIWTEEHQKAFDRIKEALLSAPALALPDLTKPFTLYVDERAGVARGVLTQTLGPWRRPVAYLSKKLDPVASGWPTCLKAVAAVALLLKDADKLTLGQNVTVIASHSLESIVRQPPDRWMTNARMTHYQSLLLNERVSFAPPAVLNPATLLPVESEATPVHRCSEILAEETGTRRDLKDQPLPGVPAWYTDGSSFIAEGKRRAGAAIVDGKRTVWASSLPEGTSAQKAELVALTQALRLAEGKDINIYTDSRYAFATAHIHGAIYKQRGWLTSAGKDIKNKEEILALLEAIHLPKRVAIIHCPGHQKGNDPVATGNRRADEAAKQAALSTRVLAETTKPAGKRTADGSEFEKRTADGSEFESPKKKAKVE

SEQ ID NO: 855 - protein, 2089 aa, synthetic construct
MPAAKRVKLDGGDKKYSIGLDIGTNSVGWAVITDEYKVPSKKFKVLGNTDRHSIKKNLIGALLFDSGETAEATRLKRTARRRYTRRKNRICYLQEIFSNEMAKVDDSFFHRLEESFLVEEDKKHERHPIFGNIVDEVAYHEKYPTIYHLRKKLVDSTDKADLRLIYLALAHMIKFRGHFLIEGDLNPDNSDVDKLFIQLVQTYNQLFEENPINASGVDAKAILSARLSKSRRLENLIAQLPGEKKNGLFGNLIALSLGLTPNFKSNFDLAEDAKLQLSKDTYDDDLDNLLAQIGDQYADLFLAAKNLSDAILLSDILRVNTEITKAPLSASMIKRYDEHHQDLTLLKALVRQQLPEKYKEIFFDQSKNGYAGYIDGGASQEEFYKFIKPILEKMDGTEELLVKLNREDLLRKQRTFDNGSIPHQIHLGELHAILRRQEDFYPFLKDNREKIEKILTFRIPYYVGPLARGNSRFAWMTRKSEETITPWNFEEVVDKGASAQSFIERMTNFDKNLPNEKVLPKHSLLYEYFTVYNELTKVKYVTEGMRKPAFLSGEQKKAIVDLLFKTNRKVTVKQLKEDYFKKIECFDSVEISGVEDRFNASLGTYHDLLKIIKDKDFLDNEENEDILEDIVLTLTLFEDREMIEERLKTYAHLFDDKVMKQLKRRRYTGWGRLSRKLINGIRDKQSGKTILDFLKSDGFANRNFMQLIHDDSLTFKEDIQKAQVSGQGDSLHEHIANLAGSPAIKKGILQTVKVVDELVKVMGRHKPENIVIEMARENQTTQKGQKNSRERMKRIEEGIKELGSQILKEHPVENTQLQNEKLYLYYLQNGRDMYVDQELDINRLSDYDVDHIVPQSFLKDDSIDNKVLTRSDKARGKSDNVPSEEVVKKMKNYWRQLLNAKLITQRKFDNLTKAERGGLSELDKAGFIKRQLVETRQITKHVAQILDSRMNTKYDENDKLIREVKVITLKSKLVSDFRKDFQFYKVREINNYHHAHDAYLNAVVGTALIKKYPKLESEFVYGDYKVYDVRKMIAKSEQEIGKATAKYFFYSNIMNFFKTEITLANGEIRKRPLIETNGETGEIVWDKGRDFATVRKVLSMPQVNIVKKTEVQTGGFSKESILPKRNSDKLIARKKDWDPKKYGGFDSPTVAYSVLVVAKVEKGKSKKLKSVKELLGITIMERSSFEKNPIDFLEAKGYKEVKKDLIIKLPKYSLFELENGRKRMLASAGELQKGNELALPSKYVNFLYLASHYEKLKGSPEDNEQKQLFVEQHKHYLDEIIEQISEFSKRVILADANLDKVLSAYNKHRDKPIREQAENIIHLFTLTNLGAPAAFKYFDTTIDRKRYTSTKEVLDATLIHQSITGLYETRIDLSQLGGDGGGGSGGGGGVLNLEEEYRLHEKPVPSSIDPSWLQLFPTVWAERAGMGLANQVPPVVVELRSGASPVAVRQYPMSKEAREGIRPHIQRFLDLGVLVPCQSPWNTPLLPVKKPGTNDYRPVQDLREINKRVQDIHPTVPNPYNLLSSLPPSHTWYSVLDLKDAFFCLKLHPNSQPLFAFEWRDPEKGNTGQLTWTRLPQGFKNSPTLFNEALHRDLAPFRALNPQVVLLQYVDDLLVAAPTYRDCKEGTQKLLQELSKLGYRVSAKKAQLCQKEVTYLGYLLKEGKRWLTPARKATVMKIPPPTTPRQVREFLGTAGFCRLWIPGFASLAAPLYPLTKPSIPFIWTEEHQKAFDRIKEALLSAPALALPDLTKPFTLYVDERAGVARGVLTQTLGPWRRPVAYLSKKLDPVASGWPTCLKAVAAVALLLKDADKLTLGQNVTVIASHSLESIVRQPPDRWMTNARMTHYQSLLLNERVSFAPPAVLNPATLLPVESEATPVHRCSEILAEETGTRRDLKDQPLPGVPAWYTDGSSFIAEGKRRAGAAIVDGKRTVWASSLPEGTSAQKAELVALTQALRLAEGKDINIYTDSRYAFATAHIHGAIYKQRGWLTSAGKDIKNKEEILALLEAIHLPKRVAIIHCPGHQKGNDPVATGNRRADEAAKQAALSTRVLAETTKPAGKRTADGSEFEKRTADGSEFESPKKKAKVE

SEQ ID NO: 856 - protein, 2094 aa, synthetic construct
MPAAKRVKLDGGDKKYSIGLDIGTNSVGWAVITDEYKVPSKKFKVLGNTDRHSIKKNLIGALLFDSGETAEATRLKRTARRRYTRRKNRICYLQEIFSNEMAKVDDSFFHRLEESFLVEEDKKHERHPIFGNIVDEVAYHEKYPTIYHLRKKLVDSTDKADLRLIYLALAHMIKFRGHFLIEGDLNPDNSDVDKLFIQLVQTYNQLFEENPINASGVDAKAILSARLSKSRRLENLIAQLPGEKKNGLFGNLIALSLGLTPNFKSNFDLAEDAKLQLSKDTYDDDLDNLLAQIGDQYADLFLAAKNLSDAILLSDILRVNTEITKAPLSASMIKRYDEHHQDLTLLKALVRQQLPEKYKEIFFDQSKNGYAGYIDGGASQEEFYKFIKPILEKMDGTEELLVKLNREDLLRKQRTFDNGSIPHQIHLGELHAILRRQEDFYPFLKDNREKIEKILTFRIPYYVGPLARGNSRFAWMTRKSEETITPWNFEEVVDKGASAQSFIERMTNFDKNLPNEKVLPKHSLLYEYFTVYNELTKVKYVTEGMRKPAFLSGEQKKAIVDLLFKTNRKVTVKQLKEDYFKKIECFDSVEISGVEDRFNASLGTYHDLLKIIKDKDFLDNEENEDILEDIVLTLTLFEDREMIEERLKTYAHLFDDKVMKQLKRRRYTGWGRLSRKLINGIRDKQSGKTILDFLKSDGFANRNFMQLIHDDSLTFKEDIQKAQVSGQGDSLHEHIANLAGSPAIKKGILQTVKVVDELVKVMGRHKPENIVIEMARENQTTQKGQKNSRERMKRIEEGIKELGSQILKEHPVENTQLQNEKLYLYYLQNGRDMYVDQELDINRLSDYDVDHIVPQSFLKDDSIDNKVLTRSDKARGKSDNVPSEEVVKKMKNYWRQLLNAKLITQRKFDNLTKAERGGLSELDKAGFIKRQLVETRQITKHVAQILDSRMNTKYDENDKLIREVKVITLKSKLVSDFRKDFQFYKVREINNYHHAHDAYLNAVVGTALIKKYPKLESEFVYGDYKVYDVRKMIAKSEQEIGKATAKYFFYSNIMNFFKTEITLANGEIRKRPLIETNGETGEIVWDKGRDFATVRKVLSMPQVNIVKKTEVQTGGFSKESILPKRNSDKLIARKKDWDPKKYGGFDSPTVAYSVLVVAKVEKGKSKKLKSVKELLGITIMERSSFEKNPIDFLEAKGYKEVKKDLIIKLPKYSLFELENGRKRMLASAGELQKGNELALPSKYVNFLYLASHYEKLKGSPEDNEQKQLFVEQHKHYLDEIIEQISEFSKRVILADANLDKVLSAYNKHRDKPIREQAENIIHLFTLTNLGAPAAFKYFDTTIDRKRYTSTKEVLDATLIHQSITGLYETRIDLSQLGGDGGEAAAKPAPGGGGGVLNLEEEYRLHEKPVPSSIDPSWLQLFPTVWAERAGMGLANQVPPVVVELRSGASPVAVRQYPMSKEAREGIRPHIQRFLDLGVLVPCQSPWNTPLLPVKKPGTNDYRPVQDLREINKRVQDIHPTVPNPYNLLSSLPPSHTWYSVLDLKDAFFCLKLHPNSQPLFAFEWRDPEKGNTGQLTWTRLPQGFKNSPTLFNEALHRDLAPFRALNPQVVLLQYVDDLLVAAPTYRDCKEGTQKLLQELSKLGYRVSAKKAQLCQKEVTYLGYLLKEGKRWLTPARKATVMKIPPPTTPRQVREFLGTAGFCRLWIPGFASLAAPLYPLTKPSIPFIWTEEHQKAFDRIKEALLSAPALALPDLTKPFTLYVDERAGVARGVLTQTLGPWRRPVAYLSKKLDPVASGWPTCLKAVAAVALLLKDADKLTLGQNVTVIASHSLESIVRQPPDRWMTNARMTHYQSLLLNERVSFAPPAVLNPATLLPVESEATPVHRCSEILAEETGTRRDLKDQPLPGVPAWYTDGSSFIAEGKRRAGAAIVDGKRTVWASSLPEGTSAQKAELVALTQALRLAEGKDINIYTDSRYAFATAHIHGAIYKQRGWLTSAGKDIKNKEEILALLEAIHLPKRVAIIHCPGHQKGNDPVATGNRRADEAAKQAALSTRVLAETTKPAGKRTADGSEFEKRTADGSEFESPKKKAKVE

SEQ ID NO: 857 - protein, 2094 aa, synthetic construct
MPAAKRVKLDGGDKKYSIGLDIGTNSVGWAVITDEYKVPSKKFKVLGNTDRHSIKKNLIGALLFDSGETAEATRLKRTARRRYTRRKNRICYLQEIFSNEMAKVDDSFFHRLEESFLVEEDKKHERHPIFGNIVDEVAYHEKYPTIYHLRKKLVDSTDKADLRLIYLALAHMIKFRGHFLIEGDLNPDNSDVDKLFIQLVQTYNQLFEENPINASGVDAKAILSARLSKSRRLENLIAQLPGEKKNGLFGNLIALSLGLTPNFKSNFDLAEDAKLQLSKDTYDDDLDNLLAQIGDQYADLFLAAKNLSDAILLSDILRVNTEITKAPLSASMIKRYDEHHQDLTLLKALVRQQLPEKYKEIFFDQSKNGYAGYIDGGASQEEFYKFIKPILEKMDGTEELLVKLNREDLLRKQRTFDNGSIPHQIHLGELHAILRRQEDFYPFLKDNREKIEKILTFRIPYYVGPLARGNSRFAWMTRKSEETITPWNFEEVVDKGASAQSFIERMTNFDKNLPNEKVLPKHSLLYEYFTVYNELTKVKYVTEGMRKPAFLSGEQKKAIVDLLFKTNRKVTVKQLKEDYFKKIECFDSVEISGVEDRFNASLGTYHDLLKIIKDKDFLDNEENEDILEDIVLTLTLFEDREMIEERLKTYAHLFDDKVMKQLKRRRYTGWGRLSRKLINGIRDKQSGKTILDFLKSDGFANRNFMQLIHDDSLTFKEDIQKAQVSGQGDSLHEHIANLAGSPAIKKGILQTVKVVDELVKVMGRHKPENIVIEMARENQTTQKGQKNSRERMKRIEEGIKELGSQILKEHPVENTQLQNEKLYLYYLQNGRDMYVDQELDINRLSDYDVDHIVPQSFLKDDSIDNKVLTRSDKARGKSDNVPSEEVVKKMKNYWRQLLNAKLITQRKFDNLTKAERGGLSELDKAGFIKRQLVETRQITKHVAQILDSRMNTKYDENDKLIREVKVITLKSKLVSDFRKDFQFYKVREINNYHHAHDAYLNAVVGTALIKKYPKLESEFVYGDYKVYDVRKMIAKSEQEIGKATAKYFFYSNIMNFFKTEITLANGEIRKRPLIETNGETGEIVWDKGRDFATVRKVLSMPQVNIVKKTEVQTGGFSKESILPKRNSDKLIARKKDWDPKKYGGFDSPTVAYSVLVVAKVEKGKSKKLKSVKELLGITIMERSSFEKNPIDFLEAKGYKEVKKDLIIKLPKYSLFELENGRKRMLASAGELQKGNELALPSKYVNFLYLASHYEKLKGSPEDNEQKQLFVEQHKHYLDEIIEQISEFSKRVILADANLDKVLSAYNKHRDKPIREQAENIIHLFTLTNLGAPAAFKYFDTTIDRKRYTSTKEVLDATLIHQSITGLYETRIDLSQLGGDGGGSSEAAAKGGSGGVLNLEEEYRLHEKPVPSSIDPSWLQLFPTVWAERAGMGLANQVPPVVVELRSGASPVAVRQYPMSKEAREGIRPHIQRFLDLGVLVPCQSPWNTPLLPVKKPGTNDYRPVQDLREINKRVQDIHPTVPNPYNLLSSLPPSHTWYSVLDLKDAFFCLKLHPNSQPLFAFEWRDPEKGNTGQLTWTRLPQGFKNSPTLFNEALHRDLAPFRALNPQVVLLQYVDDLLVAAPTYRDCKEGTQKLLQELSKLGYRVSAKKAQLCQKEVTYLGYLLKEGKRWLTPARKATVMKIPPPTTPRQVREFLGTAGFCRLWIPGFASLAAPLYPLTKPSIPFIWTEEHQKAFDRIKEALLSAPALALPDLTKPFTLYVDERAGVARGVLTQTLGPWRRPVAYLSKKLDPVASGWPTCLKAVAAVALLLKDADKLTLGQNVTVIASHSLESIVRQPPDRWMTNARMTHYQSLLLNERVSFAPPAVLNPATLLPVESEATPVHRCSEILAEETGTRRDLKDQPLPGVPAWYTDGSSFIAEGKRRAGAAIVDGKRTVWASSLPEGTSAQKAELVALTQALRLAEGKDINIYTDSRYAFATAHIHGAIYKQRGWLTSAGKDIKNKEEILALLEAIHLPKRVAIIHCPGHQKGNDPVATGNRRADEAAKQAALSTRVLAETTKPAGKRTADGSEFEKRTADGSEFESPKKKAKVE

SEQ ID NO: 858 - protein, 2092 aa, synthetic construct
MPAAKRVKLDGGDKKYSIGLDIGTNSVGWAVITDEYKVPSKKFKVLGNTDRHSIKKNLIGALLFDSGETAEATRLKRTARRRYTRRKNRICYLQEIFSNEMAKVDDSFFHRLEESFLVEEDKKHERHPIFGNIVDEVAYHEKYPTIYHLRKKLVDSTDKADLRLIYLALAHMIKFRGHFLIEGDLNPDNSDVDKLFIQLVQTYNQLFEENPINASGVDAKAILSARLSKSRRLENLIAQLPGEKKNGLFGNLIALSLGLTPNFKSNFDLAEDAKLQLSKDTYDDDLDNLLAQIGDQYADLFLAAKNLSDAILLSDILRVNTEITKAPLSASMIKRYDEHHQDLTLLKALVRQQLPEKYKEIFFDQSKNGYAGYIDGGASQEEFYKFIKPILEKMDGTEELLVKLNREDLLRKQRTFDNGSIPHQIHLGELHAILRRQEDFYPFLKDNREKIEKILTFRIPYYVGPLARGNSRFAWMTRKSEETITPWNFEEVVDKGASAQSFIERMTNFDKNLPNEKVLPKHSLLYEYFTVYNELTKVKYVTEGMRKPAFLSGEQKKAIVDLLFKTNRKVTVKQLKEDYFKKIECFDSVEISGVEDRFNASLGTYHDLLKIIKDKDFLDNEENEDILEDIVLTLTLFEDREMIEERLKTYAHLFDDKVMKQLKRRRYTGWGRLSRKLINGIRDKQSGKTILDFLKSDGFANRNFMQLIHDDSLTFKEDIQKAQVSGQGDSLHEHIANLAGSPAIKKGILQTVKVVDELVKVMGRHKPENIVIEMARENQTTQKGQKNSRERMKRIEEGIKELGSQILKEHPVENTQLQNEKLYLYYLQNGRDMYVDQELDINRLSDYDVDHIVPQSFLKDDSIDNKVLTRSDKARGKSDNVPSEEVVKKMKNYWRQLLNAKLITQRKFDNLTKAERGGLSELDKAGFIKRQLVETRQITKHVAQILDSRMNTKYDENDKLIREVKVITLKSKLVSDFRKDFQFYKVREINNYHHAHDAYLNAVVGTALIKKYPKLESEFVYGDYKVYDVRKMIAKSEQEIGKATAKYFFYSNIMNFFKTEITLANGEIRKRPLIETNGETGEIVWDKGRDFATVRKVLSMPQVNIVKKTEVQTGGFSKESILPKRNSDKLIARKKDWDPKKYGGFDSPTVAYSVLVVAKVEKGKSKKLKSVKELLGITIMERSSFEKNPIDFLEAKGYKEVKKDLIIKLPKYSLFELENGRKRMLASAGELQKGNELALPSKYVNFLYLASHYEKLKGSPEDNEQKQLFVEQHKHYLDEIIEQISEFSKRVILADANLDKVLSAYNKHRDKPIREQAENIIHLFTLTNLGAPAAFKYFDTTIDRKRYTSTKEVLDATLIHQSITGLYETRIDLSQLGGDGGPAPGGSGGGGGVLNLEEEYRLHEKPVPSSIDPSWLQLFPTVWAERAGMGLANQVPPVVVELRSGASPVAVRQYPMSKEAREGIRPHIQRFLDLGVLVPCQSPWNTPLLPVKKPGTNDYRPVQDLREINKRVQDIHPTVPNPYNLLSSLPPSHTWYSVLDLKDAFFCLKLHPNSQPLFAFEWRDPEKGNTGQLTWTRLPQGFKNSPTLFNEALHRDLAPFRALNPQVVLLQYVDDLLVAAPTYRDCKEGTQKLLQELSKLGYRVSAKKAQLCQKEVTYLGYLLKEGKRWLTPARKATVMKIPPPTTPRQVREFLGTAGFCRLWIPGFASLAAPLYPLTKPSIPFIWTEEHQKAFDRIKEALLSAPALALPDLTKPFTLYVDERAGVARGVLTQTLGPWRRPVAYLSKKLDPVASGWPTCLKAVAAVALLLKDADKLTLGQNVTVIASHSLESIVRQPPDRWMTNARMTHYQSLLLNERVSFAPPAVLNPATLLPVESEATPVHRCSEILAEETGTRRDLKDQPLPGVPAWYTDGSSFIAEGKRRAGAAIVDGKRTVWASSLPEGTSAQKAELVALTQALRLAEGKDINIYTDSRYAFATAHIHGAIYKQRGWLTSAGKDIKNKEEILALLEAIHLPKRVAIIHCPGHQKGNDPVATGNRRADEAAKQAALSTRVLAETTKPAGKRTADGSEFEKRTADGSEFESPKKKAKVE

SEQ ID NO: 859 - protein, 2089 aa, synthetic construct
MPAAKRVKLDGGDKKYSIGLDIGTNSVGWAVITDEYKVPSKKFKVLGNTDRHSIKKNLIGALLFDSGETAEATRLKRTARRRYTRRKNRICYLQEIFSNEMAKVDDSFFHRLEESFLVEEDKKHERHPIFGNIVDEVAYHEKYPTIYHLRKKLVDSTDKADLRLIYLALAHMIKFRGHFLIEGDLNPDNSDVDKLFIQLVQTYNQLFEENPINASGVDAKAILSARLSKSRRLENLIAQLPGEKKNGLFGNLIALSLGLTPNFKSNFDLAEDAKLQLSKDTYDDDLDNLLAQIGDQYADLFLAAKNLSDAILLSDILRVNTEITKAPLSASMIKRYDEHHQDLTLLKALVRQQLPEKYKEIFFDQSKNGYAGYIDGGASQEEFYKFIKPILEKMDGTEELLVKLNREDLLRKQRTFDNGSIPHQIHLGELHAILRRQEDFYPFLKDNREKIEKILTFRIPYYVGPLARGNSRFAWMTRKSEETITPWNFEEVVDKGASAQSFIERMTNFDKNLPNEKVLPKHSLLYEYFTVYNELTKVKYVTEGMRKPAFLSGEQKKAIVDLLFKTNRKVTVKQLKEDYFKKIECFDSVEISGVEDRFNASLGTYHDLLKIIKDKDFLDNEENEDILEDIVLTLTLFEDREMIEERLKTYAHLFDDKVMKQLKRRRYTGWGRLSRKLINGIRDKQSGKTILDFLKSDGFANRNFMQLIHDDSLTFKEDIQKAQVSGQGDSLHEHIANLAGSPAIKKGILQTVKVVDELVKVMGRHKPENIVIEMARENQTTQKGQKNSRERMKRIEEGIKELGSQILKEHPVENTQLQNEKLYLYYLQNGRDMYVDQELDINRLSDYDVDHIVPQSFLKDDSIDNKVLTRSDKARGKSDNVPSEEVVKKMKNYWRQLLNAKLITQRKFDNLTKAERGGLSELDKAGFIKRQLVETRQITKHVAQILDSRMNTKYDENDKLIREVKVITLKSKLVSDFRKDFQFYKVREINNYHHAHDAYLNAVVGTALIKKYPKLESEFVYGDYKVYDVRKMIAKSEQEIGKATAKYFFYSNIMNFFKTEITLANGEIRKRPLIETNGETGEIVWDKGRDFATVRKVLSMPQVNIVKKTEVQTGGFSKESILPKRNSDKLIARKKDWDPKKYGGFDSPTVAYSVLVVAKVEKGKSKKLKSVKELLGITIMERSSFEKNPIDFLEAKGYKEVKKDLIIKLPKYSLFELENGRKRMLASAGELQKGNELALPSKYVNFLYLASHYEKLKGSPEDNEQKQLFVEQHKHYLDEIIEQISEFSKRVILADANLDKVLSAYNKHRDKPIREQAENIIHLFTLTNLGAPAAFKYFDTTIDRKRYTSTKEVLDATLIHQSITGLYETRIDLSQLGGDGGPAPGSSGGVLNLEEEYRLHEKPVPSSIDPSWLQLFPTVWAERAGMGLANQVPPVVVELRSGASPVAVRQYPMSKEAREGIRPHIQRFLDLGVLVPCQSPWNTPLLPVKKPGTNDYRPVQDLREINKRVQDIHPTVPNPYNLLSSLPPSHTWYSVLDLKDAFFCLKLHPNSQPLFAFEWRDPEKGNTGQLTWTRLPQGFKNSPTLFNEALHRDLAPFRALNPQVVLLQYVDDLLVAAPTYRDCKEGTQKLLQELSKLGYRVSAKKAQLCQKEVTYLGYLLKEGKRWLTPARKATVMKIPPPTTPRQVREFLGTAGFCRLWIPGFASLAAPLYPLTKPSIPFIWTEEHQKAFDRIKEALLSAPALALPDLTKPFTLYVDERAGVARGVLTQTLGPWRRPVAYLSKKLDPVASGWPTCLKAVAAVALLLKDADKLTLGQNVTVIASHSLESIVRQPPDRWMTNARMTHYQSLLLNERVSFAPPAVLNPATLLPVESEATPVHRCSEILAEETGTRRDLKDQPLPGVPAWYTDGSSFIAEGKRRAGAAIVDGKRTVWASSLPEGTSAQKAELVALTQALRLAEGKDINIYTDSRYAFATAHIHGAIYKQRGWLTSAGKDIKNKEEILALLEAIHLPKRVAIIHCPGHQKGNDPVATGNRRADEAAKQAALSTRVLAETTKPAGKRTADGSEFEKRTADGSEFESPKKKAKVE

SEQ ID NO: 860 - protein, 2090 aa, synthetic construct
MPAAKRVKLDGGDKKYSIGLDIGTNSVGWAVITDEYKVPSKKFKVLGNTDRHSIKKNLIGALLFDSGETAEATRLKRTARRRYTRRKNRICYLQEIFSNEMAKVDDSFFHRLEESFLVEEDKKHERHPIFGNIVDEVAYHEKYPTIYHLRKKLVDSTDKADLRLIYLALAHMIKFRGHFLIEGDLNPDNSDVDKLFIQLVQTYNQLFEENPINASGVDAKAILSARLSKSRRLENLIAQLPGEKKNGLFGNLIALSLGLTPNFKSNFDLAEDAKLQLSKDTYDDDLDNLLAQIGDQYADLFLAAKNLSDAILLSDILRVNTEITKAPLSASMIKRYDEHHQDLTLLKALVRQQLPEKYKEIFFDQSKNGYAGYIDGGASQEEFYKFIKPILEKMDGTEELLVKLNREDLLRKQRTFDNGSIPHQIHLGELHAILRRQEDFYPFLKDNREKIEKILTFRIPYYVGPLARGNSRFAWMTRKSEETITPWNFEEVVDKGASAQSFIERMTNFDKNLPNEKVLPKHSLLYEYFTVYNELTKVKYVTEGMRKPAFLSGEQKKAIVDLLFKTNRKVTVKQLKEDYFKKIECFDSVEISGVEDRFNASLGTYHDLLKIIKDKDFLDNEENEDILEDIVLTLTLFEDREMIEERLKTYAHLFDDKVMKQLKRRRYTGWGRLSRKLINGIRDKQSGKTILDFLKSDGFANRNFMQLIHDDSLTFKEDIQKAQVSGQGDSLHEHIANLAGSPAIKKGILQTVKVVDELVKVMGRHKPENIVIEMARENQTTQKGQKNSRERMKRIEEGIKELGSQILKEHPVENTQLQNEKLYLYYLQNGRDMYVDQELDINRLSDYDVDHIVPQSFLKDDSIDNKVLTRSDKARGKSDNVPSEEVVKKMKNYWRQLLNAKLITQRKFDNLTKAERGGLSELDKAGFIKRQLVETRQITKHVAQILDSRMNTKYDENDKLIREVKVITLKSKLVSDFRKDFQFYKVREINNYHHAHDAYLNAVVGTALIKKYPKLESEFVYGDYKVYDVRKMIAKSEQEIGKATAKYFFYSNIMNFFKTEITLANGEIRKRPLIETNGETGEIVWDKGRDFATVRKVLSMPQVNIVKKTEVQTGGFSKESILPKRNSDKLIARKKDWDPKKYGGFDSPTVAYSVLVVAKVEKGKSKKLKSVKELLGITIMERSSFEKNPIDFLEAKGYKEVKKDLIIKLPKYSLFELENGRKRMLASAGELQKGNELALPSKYVNFLYLASHYEKLKGSPEDNEQKQLFVEQHKHYLDEIIEQISEFSKRVILADANLDKVLSAYNKHRDKPIREQAENIIHLFTLTNLGAPAAFKYFDTTIDRKRYTSTKEVLDATLIHQSITGLYETRIDLSQLGGDGGPAPAPAPGGVLNLEEEYRLHEKPVPSSIDPSWLQLFPTVWAERAGMGLANQVPPVVVELRSGASPVAVRQYPMSKEAREGIRPHIQRFLDLGVLVPCQSPWNTPLLPVKKPGTNDYRPVQDLREINKRVQDIHPTVPNPYNLLSSLPPSHTWYSVLDLKDAFFCLKLHPNSQPLFAFEWRDPEKGNTGQLTWTRLPQGFKNSPTLFNEALHRDLAPFRALNPQVVLLQYVDDLLVAAPTYRDCKEGTQKLLQELSKLGYRVSAKKAQLCQKEVTYLGYLLKEGKRWLTPARKATVMKIPPPTTPRQVREFLGTAGFCRLWIPGFASLAAPLYPLTKPSIPFIWTEEHQKAFDRIKEALLSAPALALPDLTKPFTLYVDERAGVARGVLTQTLGPWRRPVAYLSKKLDPVASGWPTCLKAVAAVALLLKDADKLTLGQNVTVIASHSLESIVRQPPDRWMTNARMTHYQSLLLNERVSFAPPAVLNPATLLPVESEATPVHRCSEILAEETGTRRDLKDQPLPGVPAWYTDGSSFIAEGKRRAGAAIVDGKRTVWASSLPEGTSAQKAELVALTQALRLAEGKDINIYTDSRYAFATAHIHGAIYKQRGWLTSAGKDIKNKEEILALLEAIHLPKRVAIIHCPGHQKGNDPVATGNRRADEAAKQAALSTRVLAETTKPAGKRTADGSEFEKRTADGSEFESPKKKAKVE

SEQ ID NO: 861 - protein, 2094 aa, synthetic construct
MPAAKRVKLDGGDKKYSIGLDIGTNSVGWAVITDEYKVPSKKFKVLGNTDRHSIKKNLIGALLFDSGETAEATRLKRTARRRYTRRKNRICYLQEIFSNEMAKVDDSFFHRLEESFLVEEDKKHERHPIFGNIVDEVAYHEKYPTIYHLRKKLVDSTDKADLRLIYLALAHMIKFRGHFLIEGDLNPDNSDVDKLFIQLVQTYNQLFEENPINASGVDAKAILSARLSKSRRLENLIAQLPGEKKNGLFGNLIALSLGLTPNFKSNFDLAEDAKLQLSKDTYDDDLDNLLAQIGDQYADLFLAAKNLSDAILLSDILRVNTEITKAPLSASMIKRYDEHHQDLTLLKALVRQQLPEKYKEIFFDQSKNGYAGYIDGGASQEEFYKFIKPILEKMDGTEELLVKLNREDLLRKQRTFDNGSIPHQIHLGELHAILRRQEDFYPFLKDNREKIEKILTFRIPYYVGPLARGNSRFAWMTRKSEETITPWNFEEVVDKGASAQSFIERMTNFDKNLPNEKVLPKHSLLYEYFTVYNELTKVKYVTEGMRKPAFLSGEQKKAIVDLLFKTNRKVTVKQLKEDYFKKIECFDSVEISGVEDRFNASLGTYHDLLKIIKDKDFLDNEENEDILEDIVLTLTLFEDREMIEERLKTYAHLFDDKVMKQLKRRRYTGWGRLSRKLINGIRDKQSGKTILDFLKSDGFANRNFMQLIHDDSLTFKEDIQKAQVSGQGDSLHEHIANLAGSPAIKKGILQTVKVVDELVKVMGRHKPENIVIEMARENQTTQKGQKNSRERMKRIEEGIKELGSQILKEHPVENTQLQNEKLYLYYLQNGRDMYVDQELDINRLSDYDVDHIVPQSFLKDDSIDNKVLTRSDKARGKSDNVPSEEVVKKMKNYWRQLLNAKLITQRKFDNLTKAERGGLSELDKAGFIKRQLVETRQITKHVAQILDSRMNTKYDENDKLIREVKVITLKSKLVSDFRKDFQFYKVREINNYHHAHDAYLNAVVGTALIKKYPKLESEFVYGDYKVYDVRKMIAKSEQEIGKATAKYFFYSNIMNFFKTEITLANGEIRKRPLIETNGETGEIVWDKGRDFATVRKVLSMPQVNIVKKTEVQTGGFSKESILPKRNSDKLIARKKDWDPKKYGGFDSPTVAYSVLVVAKVEKGKSKKLKSVKELLGITIMERSSFEKNPIDFLEAKGYKEVKKDLIIKLPKYSLFELENGRKRMLASAGELQKGNELALPSKYVNFLYLASHYEKLKGSPEDNEQKQLFVEQHKHYLDEIIEQISEFSKRVILADANLDKVLSAYNKHRDKPIREQAENIIHLFTLTNLGAPAAFKYFDTTIDRKRYTSTKEVLDATLIHQSITGLYETRIDLSQLGGDGGGGSGGGEAAAKGGVLNLEEEYRLHEKPVPSSIDPSWLQLFPTVWAERAGMGLANQVPPVVVELRSGASPVAVRQYPMSKEAREGIRPHIQRFLDLGVLVPCQSPWNTPLLPVKKPGTNDYRPVQDLREINKRVQDIHPTVPNPYNLLSSLPPSHTWYSVLDLKDAFFCLKLHPNSQPLFAFEWRDPEKGNTGQLTWTRLPQGFKNSPTLFNEALHRDLAPFRALNPQVVLLQYVDDLLVAAPTYRDCKEGTQKLLQELSKLGYRVSAKKAQLCQKEVTYLGYLLKEGKRWLTPARKATVMKIPPPTTPRQVREFLGTAGFCRLWIPGFASLAAPLYPLTKPSIPFIWTEEHQKAFDRIKEALLSAPALALPDLTKPFTLYVDERAGVARGVLTQTLGPWRRPVAYLSKKLDPVASGWPTCLKAVAAVALLLKDADKLTLGQNVTVIASHSLESIVRQPPDRWMTNARMTHYQSLLLNERVSFAPPAVLNPATLLPVESEATPVHRCSEILAEETGTRRDLKDQPLPGVPAWYTDGSSFIAEGKRRAGAAIVDGKRTVWASSLPEGTSAQKAELVALTQALRLAEGKDINIYTDSRYAFATAHIHGAIYKQRGWLTSAGKDIKNKEEILALLEAIHLPKRVAIIHCPGHQKGNDPVATGNRRADEAAKQAALSTRVLAETTKPAGKRTADGSEFEKRTADGSEFESPKKKAKVE

SEQ ID NO: 862 - protein, 2095 aa, synthetic construct
MPAAKRVKLDGGDKKYSIGLDIGTNSVGWAVITDEYKVPSKKFKVLGNTDRHSIKKNLIGALLFDSGETAEATRLKRTARRRYTRRKNRICYLQEIFSNEMAKVDDSFFHRLEESFLVEEDKKHERHPIFGNIVDEVAYHEKYPTIYHLRKKLVDSTDKADLRLIYLALAHMIKFRGHFLIEGDLNPDNSDVDKLFIQLVQTYNQLFEENPINASGVDAKAILSARLSKSRRLENLIAQLPGEKKNGLFGNLIALSLGLTPNFKSNFDLAEDAKLQLSKDTYDDDLDNLLAQIGDQYADLFLAAKNLSDAILLSDILRVNTEITKAPLSASMIKRYDEHHQDLTLLKALVRQQLPEKYKEIFFDQSKNGYAGYIDGGASQEEFYKFIKPILEKMDGTEELLVKLNREDLLRKQRTFDNGSIPHQIHLGELHAILRRQEDFYPFLKDNREKIEKILTFRIPYYVGPLARGNSRFAWMTRKSEETITPWNFEEVVDKGASAQSFIERMTNFDKNLPNEKVLPKHSLLYEYFTVYNELTKVKYVTEGMRKPAFLSGEQKKAIVDLLFKTNRKVTVKQLKEDYFKKIECFDSVEISGVEDRFNASLGTYHDLLKIIKDKDFLDNEENEDILEDIVLTLTLFEDREMIEERLKTYAHLFDDKVMKQLKRRRYTGWGRLSRKLINGIRDKQSGKTILDFLKSDGFANRNFMQLIHDDSLTFKEDIQKAQVSGQGDSLHEHIANLAGSPAIKKGILQTVKVVDELVKVMGRHKPENIVIEMARENQTTQKGQKNSRERMKRIEEGIKELGSQILKEHPVENTQLQNEKLYLYYLQNGRDMYVDQELDINRLSDYDVDHIVPQSFLKDDSIDNKVLTRSDKARGKSDNVPSEEVVKKMKNYWRQLLNAKLITQRKFDNLTKAERGGLSELDKAGFIKRQLVETRQITKHVAQILDSRMNTKYDENDKLIREVKVITLKSKLVSDFRKDFQFYKVREINNYHHAHDAYLNAVVGTALIKKYPKLESEFVYGDYKVYDVRKMIAKSEQEIGKATAKYFFYSNIMNFFKTEITLANGEIRKRPLIETNGETGEIVWDKGRDFATVRKVLSMPQVNIVKKTEVQTGGFSKESILPKRNSDKLIARKKDWDPKKYGGFDSPTVAYSVLVVAKVEKGKSKKLKSVKELLGITIMERSSFEKNPIDFLEAKGYKEVKKDLIIKLPKYSLFELENGRKRMLASAGELQKGNELALPSKYVNFLYLASHYEKLKGSPEDNEQKQLFVEQHKHYLDEIIEQISEFSKRVILADANLDKVLSAYNKHRDKPIREQAENIIHLFTLTNLGAPAAFKYFDTTIDRKRYTSTKEVLDATLIHQSITGLYETRIDLSQLGGDGGGSAGSAAGSGEFGGVLNLEEEYRLHEKPVPSSIDPSWLQLFPTVWAERAGMGLANQVPPVVVELRSGASPVAVRQYPMSKEAREGIRPHIQRFLDLGVLVPCQSPWNTPLLPVKKPGTNDYRPVQDLREINKRVQDIHPTVPNPYNLLSSLPPSHTWYSVLDLKDAFFCLKLHPNSQPLFAFEWRDPEKGNTGQLTWTRLPQGFKNSPTLFNEALHRDLAPFRALNPQVVLLQYVDDLLVAAPTYRDCKEGTQKLLQELSKLGYRVSAKKAQLCQKEVTYLGYLLKEGKRWLTPARKATVMKIPPPTTPRQVREFLGTAGFCRLWIPGFASLAAPLYPLTKPSIPFIWTEEHQKAFDRIKEALLSAPALALPDLTKPFTLYVDERAGVARGVLTQTLGPWRRPVAYLSKKLDPVASGWPTCLKAVAAVALLLKDADKLTLGQNVTVIASHSLESIVRQPPDRWMTNARMTHYQSLLLNERVSFAPPAVLNPATLLPVESEATPVHRCSEILAEETGTRRDLKDQPLPGVPAWYTDGSSFIAEGKRRAGAAIVDGKRTVWASSLPEGTSAQKAELVALTQALRLAEGKDINIYTDSRYAFATAHIHGAIYKQRGWLTSAGKDIKNKEEILALLEAIHLPKRVAIIHCPGHQKGNDPVATGNRRADEAAKQAALSTRVLAETTKPAGKRTADGSEFEKRTADGSEFESPKKKAKVE

SEQ ID NO: 863 - protein, 2094 aa, synthetic construct
MPAAKRVKLDGGDKKYSIGLDIGTNSVGWAVITDEYKVPSKKFKVLGNTDRHSIKKNLIGALLFDSGETAEATRLKRTARRRYTRRKNRICYLQEIFSNEMAKVDDSFFHRLEESFLVEEDKKHERHPIFGNIVDEVAYHEKYPTIYHLRKKLVDSTDKADLRLIYLALAHMIKFRGHFLIEGDLNPDNSDVDKLFIQLVQTYNQLFEENPINASGVDAKAILSARLSKSRRLENLIAQLPGEKKNGLFGNLIALSLGLTPNFKSNFDLAEDAKLQLSKDTYDDDLDNLLAQIGDQYADLFLAAKNLSDAILLSDILRVNTEITKAPLSASMIKRYDEHHQDLTLLKALVRQQLPEKYKEIFFDQSKNGYAGYIDGGASQEEFYKFIKPILEKMDGTEELLVKLNREDLLRKQRTFDNGSIPHQIHLGELHAILRRQEDFYPFLKDNREKIEKILTFRIPYYVGPLARGNSRFAWMTRKSEETITPWNFEEVVDKGASAQSFIERMTNFDKNLPNEKVLPKHSLLYEYFTVYNELTKVKYVTEGMRKPAFLSGEQKKAIVDLLFKTNRKVTVKQLKEDYFKKIECFDSVEISGVEDRFNASLGTYHDLLKIIKDKDFLDNEENEDILEDIVLTLTLFEDREMIEERLKTYAHLFDDKVMKQLKRRRYTGWGRLSRKLINGIRDKQSGKTILDFLKSDGFANRNFMQLIHDDSLTFKEDIQKAQVSGQGDSLHEHIANLAGSPAIKKGILQTVKVVDELVKVMGRHKPENIVIEMARENQTTQKGQKNSRERMKRIEEGIKELGSQILKEHPVENTQLQNEKLYLYYLQNGRDMYVDQELDINRLSDYDVDHIVPQSFLKDDSIDNKVLTRSDKARGKSDNVPSEEVVKKMKNYWRQLLNAKLITQRKFDNLTKAERGGLSELDKAGFIKRQLVETRQITKHVAQILDSRMNTKYDENDKLIREVKVITLKSKLVSDFRKDFQFYKVREINNYHHAHDAYLNAVVGTALIKKYPKLESEFVYGDYKVYDVRKMIAKSEQEIGKATAKYFFYSNIMNFFKTEITLANGEIRKRPLIETNGETGEIVWDKGRDFATVRKVLSMPQVNIVKKTEVQTGGFSKESILPKRNSDKLIARKKDWDPKKYGGFDSPTVAYSVLVVAKVEKGKSKKLKSVKELLGITIMERSSFEKNPIDFLEAKGYKEVKKDLIIKLPKYSLFELENGRKRMLASAGELQKGNELALPSKYVNFLYLASHYEKLKGSPEDNEQKQLFVEQHKHYLDEIIEQISEFSKRVILADANLDKVLSAYNKHRDKPIREQAENIIHLFTLTNLGAPAAFKYFDTTIDRKRYTSTKEVLDATLIHQSITGLYETRIDLSQLGGDGGPAPEAAAKGGSGGVLNLEEEYRLHEKPVPSSIDPSWLQLFPTVWAERAGMGLANQVPPVVVELRSGASPVAVRQYPMSKEAREGIRPHIQRFLDLGVLVPCQSPWNTPLLPVKKPGTNDYRPVQDLREINKRVQDIHPTVPNPYNLLSSLPPSHTWYSVLDLKDAFFCLKLHPNSQPLFAFEWRDPEKGNTGQLTWTRLPQGFKNSPTLFNEALHRDLAPFRALNPQVVLLQYVDDLLVAAPTYRDCKEGTQKLLQELSKLGYRVSAKKAQLCQKEVTYLGYLLKEGKRWLTPARKATVMKIPPPTTPRQVREFLGTAGFCRLWIPGFASLAAPLYPLTKPSIPFIWTEEHQKAFDRIKEALLSAPALALPDLTKPFTLYVDERAGVARGVLTQTLGPWRRPVAYLSKKLDPVASGWPTCLKAVAAVALLLKDADKLTLGQNVTVIASHSLESIVRQPPDRWMTNARMTHYQSLLLNERVSFAPPAVLNPATLLPVESEATPVHRCSEILAEETGTRRDLKDQPLPGVPAWYTDGSSFIAEGKRRAGAAIVDGKRTVWASSLPEGTSAQKAELVALTQALRLAEGKDINIYTDSRYAFATAHIHGAIYKQRGWLTSAGKDIKNKEEILALLEAIHLPKRVAIIHCPGHQKGNDPVATGNRRADEAAKQAALSTRVLAETTKPAGKRTADGSEFEKRTADGSEFESPKKKAKVE

SEQ ID NO: 864 - protein, 2092 aa, synthetic construct
MPAAKRVKLDGGDKKYSIGLDIGTNSVGWAVITDEYKVPSKKFKVLGNTDRHSIKKNLIGALLFDSGETAEATRLKRTARRRYTRRKNRICYLQEIFSNEMAKVDDSFFHRLEESFLVEEDKKHERHPIFGNIVDEVAYHEKYPTIYHLRKKLVDSTDKADLRLIYLALAHMIKFRGHFLIEGDLNPDNSDVDKLFIQLVQTYNQLFEENPINASGVDAKAILSARLSKSRRLENLIAQLPGEKKNGLFGNLIALSLGLTPNFKSNFDLAEDAKLQLSKDTYDDDLDNLLAQIGDQYADLFLAAKNLSDAILLSDILRVNTEITKAPLSASMIKRYDEHHQDLTLLKALVRQQLPEKYKEIFFDQSKNGYAGYIDGGASQEEFYKFIKPILEKMDGTEELLVKLNREDLLRKQRTFDNGSIPHQIHLGELHAILRRQEDFYPFLKDNREKIEKILTFRIPYYVGPLARGNSRFAWMTRKSEETITPWNFEEVVDKGASAQSFIERMTNFDKNLPNEKVLPKHSLLYEYFTVYNELTKVKYVTEGMRKPAFLSGEQKKAIVDLLFKTNRKVTVKQLKEDYFKKIECFDSVEISGVEDRFNASLGTYHDLLKIIKDKDFLDNEENEDILEDIVLTLTLFEDREMIEERLKTYAHLFDDKVMKQLKRRRYTGWGRLSRKLINGIRDKQSGKTILDFLKSDGFANRNFMQLIHDDSLTFKEDIQKAQVSGQGDSLHEHIANLAGSPAIKKGILQTVKVVDELVKVMGRHKPENIVIEMARENQTTQKGQKNSRERMKRIEEGIKELGSQILKEHPVENTQLQNEKLYLYYLQNGRDMYVDQELDINRLSDYDVDHIVPQSFLKDDSIDNKVLTRSDKARGKSDNVPSEEVVKKMKNYWRQLLNAKLITQRKFDNLTKAERGGLSELDKAGFIKRQLVETRQITKHVAQILDSRMNTKYDENDKLIREVKVITLKSKLVSDFRKDFQFYKVREINNYHHAHDAYLNAVVGTALIKKYPKLESEFVYGDYKVYDVRKMIAKSEQEIGKATAKYFFYSNIMNFFKTEITLANGEIRKRPLIETNGETGEIVWDKGRDFATVRKVLSMPQVNIVKKTEVQTGGFSKESILPKRNSDKLIARKKDWDPKKYGGFDSPTVAYSVLVVAKVEKGKSKKLKSVKELLGITIMERSSFEKNPIDFLEAKGYKEVKKDLIIKLPKYSLFELENGRKRMLASAGELQKGNELALPSKYVNFLYLASHYEKLKGSPEDNEQKQLFVEQHKHYLDEIIEQISEFSKRVILADANLDKVLSAYNKHRDKPIREQAENIIHLFTLTNLGAPAAFKYFDTTIDRKRYTSTKEVLDATLIHQSITGLYETRIDLSQLGGDGGPAPGSSGGGGGVLNLEEEYRLHEKPVPSSIDPSWLQLFPTVWAERAGMGLANQVPPVVVELRSGASPVAVRQYPMSKEAREGIRPHIQRFLDLGVLVPCQSPWNTPLLPVKKPGTNDYRPVQDLREINKRVQDIHPTVPNPYNLLSSLPPSHTWYSVLDLKDAFFCLKLHPNSQPLFAFEWRDPEKGNTGQLTWTRLPQGFKNSPTLFNEALHRDLAPFRALNPQVVLLQYVDDLLVAAPTYRDCKEGTQKLLQELSKLGYRVSAKKAQLCQKEVTYLGYLLKEGKRWLTPARKATVMKIPPPTTPRQVREFLGTAGFCRLWIPGFASLAAPLYPLTKPSIPFIWTEEHQKAFDRIKEALLSAPALALPDLTKPFTLYVDERAGVARGVLTQTLGPWRRPVAYLSKKLDPVASGWPTCLKAVAAVALLLKDADKLTLGQNVTVIASHSLESIVRQPPDRWMTNARMTHYQSLLLNERVSFAPPAVLNPATLLPVESEATPVHRCSEILAEETGTRRDLKDQPLPGVPAWYTDGSSFIAEGKRRAGAAIVDGKRTVWASSLPEGTSAQKAELVALTQALRLAEGKDINIYTDSRYAFATAHIHGAIYKQRGWLTSAGKDIKNKEEILALLEAIHLPKRVAIIHCPGHQKGNDPVATGNRRADEAAKQAALSTRVLAETTKPAGKRTADGSEFEKRTADGSEFESPKKKAKVE

SEQ ID NO: 865 - protein, 2092 aa, synthetic construct
MPAAKRVKLDGGDKKYSIGLDIGTNSVGWAVITDEYKVPSKKFKVLGNTDRHSIKKNLIGALLFDSGETAEATRLKRTARRRYTRRKNRICYLQEIFSNEMAKVDDSFFHRLEESFLVEEDKKHERHPIFGNIVDEVAYHEKYPTIYHLRKKLVDSTDKADLRLIYLALAHMIKFRGHFLIEGDLNPDNSDVDKLFIQLVQTYNQLFEENPINASGVDAKAILSARLSKSRRLENLIAQLPGEKKNGLFGNLIALSLGLTPNFKSNFDLAEDAKLQLSKDTYDDDLDNLLAQIGDQYADLFLAAKNLSDAILLSDILRVNTEITKAPLSASMIKRYDEHHQDLTLLKALVRQQLPEKYKEIFFDQSKNGYAGYIDGGASQEEFYKFIKPILEKMDGTEELLVKLNREDLLRKQRTFDNGSIPHQIHLGELHAILRRQEDFYPFLKDNREKIEKILTFRIPYYVGPLARGNSRFAWMTRKSEETITPWNFEEVVDKGASAQSFIERMTNFDKNLPNEKVLPKHSLLYEYFTVYNELTKVKYVTEGMRKPAFLSGEQKKAIVDLLFKTNRKVTVKQLKEDYFKKIECFDSVEISGVEDRFNASLGTYHDLLKIIKDKDFLDNEENEDILEDIVLTLTLFEDREMIEERLKTYAHLFDDKVMKQLKRRRYTGWGRLSRKLINGIRDKQSGKTILDFLKSDGFANRNFMQLIHDDSLTFKEDIQKAQVSGQGDSLHEHIANLAGSPAIKKGILQTVKVVDELVKVMGRHKPENIVIEMARENQTTQKGQKNSRERMKRIEEGIKELGSQILKEHPVENTQLQNEKLYLYYLQNGRDMYVDQELDINRLSDYDVDHIVPQSFLKDDSIDNKVLTRSDKARGKSDNVPSEEVVKKMKNYWRQLLNAKLITQRKFDNLTKAERGGLSELDKAGFIKRQLVETRQITKHVAQILDSRMNTKYDENDKLIREVKVITLKSKLVSDFRKDFQFYKVREINNYHHAHDAYLNAVVGTALIKKYPKLESEFVYGDYKVYDVRKMIAKSEQEIGKATAKYFFYSNIMNFFKTEITLANGEIRKRPLIETNGETGEIVWDKGRDFATVRKVLSMPQVNIVKKTEVQTGGFSKESILPKRNSDKLIARKKDWDPKKYGGFDSPTVAYSVLVVAKVEKGKSKKLKSVKELLGITIMERSSFEKNPIDFLEAKGYKEVKKDLIIKLPKYSLFELENGRKRMLASAGELQKGNELALPSKYVNFLYLASHYEKLKGSPEDNEQKQLFVEQHKHYLDEIIEQISEFSKRVILADANLDKVLSAYNKHRDKPIREQAENIIHLFTLTNLGAPAAFKYFDTTIDRKRYTSTKEVLDATLIHQSITGLYETRIDLSQLGGDGGGGSGSSGGGGGVLNLEEEYRLHEKPVPSSIDPSWLQLFPTVWAERAGMGLANQVPPVVVELRSGASPVAVRQYPMSKEAREGIRPHIQRFLDLGVLVPCQSPWNTPLLPVKKPGTNDYRPVQDLREINKRVQDIHPTVPNPYNLLSSLPPSHTWYSVLDLKDAFFCLKLHPNSQPLFAFEWRDPEKGNTGQLTWTRLPQGFKNSPTLFNEALHRDLAPFRALNPQVVLLQYVDDLLVAAPTYRDCKEGTQKLLQELSKLGYRVSAKKAQLCQKEVTYLGYLLKEGKRWLTPARKATVMKIPPPTTPRQVREFLGTAGFCRLWIPGFASLAAPLYPLTKPSIPFIWTEEHQKAFDRIKEALLSAPALALPDLTKPFTLYVDERAGVARGVLTQTLGPWRRPVAYLSKKLDPVASGWPTCLKAVAAVALLLKDADKLTLGQNVTVIASHSLESIVRQPPDRWMTNARMTHYQSLLLNERVSFAPPAVLNPATLLPVESEATPVHRCSEILAEETGTRRDLKDQPLPGVPAWYTDGSSFIAEGKRRAGAAIVDGKRTVWASSLPEGTSAQKAELVALTQALRLAEGKDINIYTDSRYAFATAHIHGAIYKQRGWLTSAGKDIKNKEEILALLEAIHLPKRVAIIHCPGHQKGNDPVATGNRRADEAAKQAALSTRVLAETTKPAGKRTADGSEFEKRTADGSEFESPKKKAKVE

SEQ ID NO: 866 - protein, 2094 aa, synthetic construct
MPAAKRVKLDGGDKKYSIGLDIGTNSVGWAVITDEYKVPSKKFKVLGNTDRHSIKKNLIGALLFDSGETAEATRLKRTARRRYTRRKNRICYLQEIFSNEMAKVDDSFFHRLEESFLVEEDKKHERHPIFGNIVDEVAYHEKYPTIYHLRKKLVDSTDKADLRLIYLALAHMIKFRGHFLIEGDLNPDNSDVDKLFIQLVQTYNQLFEENPINASGVDAKAILSARLSKSRRLENLIAQLPGEKKNGLFGNLIALSLGLTPNFKSNFDLAEDAKLQLSKDTYDDDLDNLLAQIGDQYADLFLAAKNLSDAILLSDILRVNTEITKAPLSASMIKRYDEHHQDLTLLKALVRQQLPEKYKEIFFDQSKNGYAGYIDGGASQEEFYKFIKPILEKMDGTEELLVKLNREDLLRKQRTFDNGSIPHQIHLGELHAILRRQEDFYPFLKDNREKIEKILTFRIPYYVGPLARGNSRFAWMTRKSEETITPWNFEEVVDKGASAQSFIERMTNFDKNLPNEKVLPKHSLLYEYFTVYNELTKVKYVTEGMRKPAFLSGEQKKAIVDLLFKTNRKVTVKQLKEDYFKKIECFDSVEISGVEDRFNASLGTYHDLLKIIKDKDFLDNEENEDILEDIVLTLTLFEDREMIEERLKTYAHLFDDKVMKQLKRRRYTGWGRLSRKLINGIRDKQSGKTILDFLKSDGFANRNFMQLIHDDSLTFKEDIQKAQVSGQGDSLHEHIANLAGSPAIKKGILQTVKVVDELVKVMGRHKPENIVIEMARENQTTQKGQKNSRERMKRIEEGIKELGSQILKEHPVENTQLQNEKLYLYYLQNGRDMYVDQELDINRLSDYDVDHIVPQSFLKDDSIDNKVLTRSDKARGKSDNVPSEEVVKKMKNYWRQLLNAKLITQRKFDNLTKAERGGLSELDKAGFIKRQLVETRQITKHVAQILDSRMNTKYDENDKLIREVKVITLKSKLVSDFRKDFQFYKVREINNYHHAHDAYLNAVVGTALIKKYPKLESEFVYGDYKVYDVRKMIAKSEQEIGKATAKYFFYSNIMNFFKTEITLANGEIRKRPLIETNGETGEIVWDKGRDFATVRKVLSMPQVNIVKKTEVQTGGFSKESILPKRNSDKLIARKKDWDPKKYGGFDSPTVAYSVLVVAKVEKGKSKKLKSVKELLGITIMERSSFEKNPIDFLEAKGYKEVKKDLIIKLPKYSLFELENGRKRMLASAGELQKGNELALPSKYVNFLYLASHYEKLKGSPEDNEQKQLFVEQHKHYLDEIIEQISEFSKRVILADANLDKVLSAYNKHRDKPIREQAENIIHLFTLTNLGAPAAFKYFDTTIDRKRYTSTKEVLDATLIHQSITGLYETRIDLSQLGGDGGPAPEAAAKGGGGGVLNLEEEYRLHEKPVPSSIDPSWLQLFPTVWAERAGMGLANQVPPVVVELRSGASPVAVRQYPMSKEAREGIRPHIQRFLDLGVLVPCQSPWNTPLLPVKKPGTNDYRPVQDLREINKRVQDIHPTVPNPYNLLSSLPPSHTWYSVLDLKDAFFCLKLHPNSQPLFAFEWRDPEKGNTGQLTWTRLPQGFKNSPTLFNEALHRDLAPFRALNPQVVLLQYVDDLLVAAPTYRDCKEGTQKLLQELSKLGYRVSAKKAQLCQKEVTYLGYLLKEGKRWLTPARKATVMKIPPPTTPRQVREFLGTAGFCRLWIPGFASLAAPLYPLTKPSIPFIWTEEHQKAFDRIKEALLSAPALALPDLTKPFTLYVDERAGVARGVLTQTLGPWRRPVAYLSKKLDPVASGWPTCLKAVAAVALLLKDADKLTLGQNVTVIASHSLESIVRQPPDRWMTNARMTHYQSLLLNERVSFAPPAVLNPATLLPVESEATPVHRCSEILAEETGTRRDLKDQPLPGVPAWYTDGSSFIAEGKRRAGAAIVDGKRTVWASSLPEGTSAQKAELVALTQALRLAEGKDINIYTDSRYAFATAHIHGAIYKQRGWLTSAGKDIKNKEEILALLEAIHLPKRVAIIHCPGHQKGNDPVATGNRRADEAAKQAALSTRVLAETTKPAGKRTADGSEFEKRTADGSEFESPKKKAKVE

SEQ ID NO: 867 - protein, 2089 aa, synthetic construct
MPAAKRVKLDGGDKKYSIGLDIGTNSVGWAVITDEYKVPSKKFKVLGNTDRHSIKKNLIGALLFDSGETAEATRLKRTARRRYTRRKNRICYLQEIFSNEMAKVDDSFFHRLEESFLVEEDKKHERHPIFGNIVDEVAYHEKYPTIYHLRKKLVDSTDKADLRLIYLALAHMIKFRGHFLIEGDLNPDNSDVDKLFIQLVQTYNQLFEENPINASGVDAKAILSARLSKSRRLENLIAQLPGEKKNGLFGNLIALSLGLTPNFKSNFDLAEDAKLQLSKDTYDDDLDNLLAQIGDQYADLFLAAKNLSDAILLSDILRVNTEITKAPLSASMIKRYDEHHQDLTLLKALVRQQLPEKYKEIFFDQSKNGYAGYIDGGASQEEFYKFIKPILEKMDGTEELLVKLNREDLLRKQRTFDNGSIPHQIHLGELHAILRRQEDFYPFLKDNREKIEKILTFRIPYYVGPLARGNSRFAWMTRKSEETITPWNFEEVVDKGASAQSFIERMTNFDKNLPNEKVLPKHSLLYEYFTVYNELTKVKYVTEGMRKPAFLSGEQKKAIVDLLFKTNRKVTVKQLKEDYFKKIECFDSVEISGVEDRFNASLGTYHDLLKIIKDKDFLDNEENEDILEDIVLTLTLFEDREMIEERLKTYAHLFDDKVMKQLKRRRYTGWGRLSRKLINGIRDKQSGKTILDFLKSDGFANRNFMQLIHDDSLTFKEDIQKAQVSGQGDSLHEHIANLAGSPAIKKGILQTVKVVDELVKVMGRHKPENIVIEMARENQTTQKGQKNSRERMKRIEEGIKELGSQILKEHPVENTQLQNEKLYLYYLQNGRDMYVDQELDINRLSDYDVDHIVPQSFLKDDSIDNKVLTRSDKARGKSDNVPSEEVVKKMKNYWRQLLNAKLITQRKFDNLTKAERGGLSELDKAGFIKRQLVETRQITKHVAQILDSRMNTKYDENDKLIREVKVITLKSKLVSDFRKDFQFYKVREINNYHHAHDAYLNAVVGTALIKKYPKLESEFVYGDYKVYDVRKMIAKSEQEIGKATAKYFFYSNIMNFFKTEITLANGEIRKRPLIETNGETGEIVWDKGRDFATVRKVLSMPQVNIVKKTEVQTGGFSKESILPKRNSDKLIARKKDWDPKKYGGFDSPTVAYSVLVVAKVEKGKSKKLKSVKELLGITIMERSSFEKNPIDFLEAKGYKEVKKDLIIKLPKYSLFELENGRKRMLASAGELQKGNELALPSKYVNFLYLASHYEKLKGSPEDNEQKQLFVEQHKHYLDEIIEQISEFSKRVILADANLDKVLSAYNKHRDKPIREQAENIIHLFTLTNLGAPAAFKYFDTTIDRKRYTSTKEVLDATLIHQSITGLYETRIDLSQLGGDGGGSSPAPGGVLNLEEEYRLHEKPVPSSIDPSWLQLFPTVWAERAGMGLANQVPPVVVELRSGASPVAVRQYPMSKEAREGIRPHIQRFLDLGVLVPCQSPWNTPLLPVKKPGTNDYRPVQDLREINKRVQDIHPTVPNPYNLLSSLPPSHTWYSVLDLKDAFFCLKLHPNSQPLFAFEWRDPEKGNTGQLTWTRLPQGFKNSPTLFNEALHRDLAPFRALNPQVVLLQYVDDLLVAAPTYRDCKEGTQKLLQELSKLGYRVSAKKAQLCQKEVTYLGYLLKEGKRWLTPARKATVMKIPPPTTPRQVREFLGTAGFCRLWIPGFASLAAPLYPLTKPSIPFIWTEEHQKAFDRIKEALLSAPALALPDLTKPFTLYVDERAGVARGVLTQTLGPWRRPVAYLSKKLDPVASGWPTCLKAVAAVALLLKDADKLTLGQNVTVIASHSLESIVRQPPDRWMTNARMTHYQSLLLNERVSFAPPAVLNPATLLPVESEATPVHRCSEILAEETGTRRDLKDQPLPGVPAWYTDGSSFIAEGKRRAGAAIVDGKRTVWASSLPEGTSAQKAELVALTQALRLAEGKDINIYTDSRYAFATAHIHGAIYKQRGWLTSAGKDIKNKEEILALLEAIHLPKRVAIIHCPGHQKGNDPVATGNRRADEAAKQAALSTRVLAETTKPAGKRTADGSEFEKRTADGSEFESPKKKAKVE

SEQ ID NO: 868 - protein, 2092 aa, synthetic construct
MPAAKRVKLDGGDKKYSIGLDIGTNSVGWAVITDEYKVPSKKFKVLGNTDRHSIKKNLIGALLFDSGETAEATRLKRTARRRYTRRKNRICYLQEIFSNEMAKVDDSFFHRLEESFLVEEDKKHERHPIFGNIVDEVAYHEKYPTIYHLRKKLVDSTDKADLRLIYLALAHMIKFRGHFLIEGDLNPDNSDVDKLFIQLVQTYNQLFEENPINASGVDAKAILSARLSKSRRLENLIAQLPGEKKNGLFGNLIALSLGLTPNFKSNFDLAEDAKLQLSKDTYDDDLDNLLAQIGDQYADLFLAAKNLSDAILLSDILRVNTEITKAPLSASMIKRYDEHHQDLTLLKALVRQQLPEKYKEIFFDQSKNGYAGYIDGGASQEEFYKFIKPILEKMDGTEELLVKLNREDLLRKQRTFDNGSIPHQIHLGELHAILRRQEDFYPFLKDNREKIEKILTFRIPYYVGPLARGNSRFAWMTRKSEETITPWNFEEVVDKGASAQSFIERMTNFDKNLPNEKVLPKHSLLYEYFTVYNELTKVKYVTEGMRKPAFLSGEQKKAIVDLLFKTNRKVTVKQLKEDYFKKIECFDSVEISGVEDRFNASLGTYHDLLKIIKDKDFLDNEENEDILEDIVLTLTLFEDREMIEERLKTYAHLFDDKVMKQLKRRRYTGWGRLSRKLINGIRDKQSGKTILDFLKSDGFANRNFMQLIHDDSLTFKEDIQKAQVSGQGDSLHEHIANLAGSPAIKKGILQTVKVVDELVKVMGRHKPENIVIEMARENQTTQKGQKNSRERMKRIEEGIKELGSQILKEHPVENTQLQNEKLYLYYLQNGRDMYVDQELDINRLSDYDVDHIVPQSFLKDDSIDNKVLTRSDKARGKSDNVPSEEVVKKMKNYWRQLLNAKLITQRKFDNLTKAERGGLSELDKAGFIKRQLVETRQITKHVAQILDSRMNTKYDENDKLIREVKVITLKSKLVSDFRKDFQFYKVREINNYHHAHDAYLNAVVGTALIKKYPKLESEFVYGDYKVYDVRKMIAKSEQEIGKATAKYFFYSNIMNFFKTEITLANGEIRKRPLIETNGETGEIVWDKGRDFATVRKVLSMPQVNIVKKTEVQTGGFSKESILPKRNSDKLIARKKDWDPKKYGGFDSPTVAYSVLVVAKVEKGKSKKLKSVKELLGITIMERSSFEKNPIDFLEAKGYKEVKKDLIIKLPKYSLFELENGRKRMLASAGELQKGNELALPSKYVNFLYLASHYEKLKGSPEDNEQKQLFVEQHKHYLDEIIEQISEFSKRVILADANLDKVLSAYNKHRDKPIREQAENIIHLFTLTNLGAPAAFKYFDTTIDRKRYTSTKEVLDATLIHQSITGLYETRIDLSQLGGDGGGSSGGGPAPGGVLNLEEEYRLHEKPVPSSIDPSWLQLFPTVWAERAGMGLANQVPPVVVELRSGASPVAVRQYPMSKEAREGIRPHIQRFLDLGVLVPCQSPWNTPLLPVKKPGTNDYRPVQDLREINKRVQDIHPTVPNPYNLLSSLPPSHTWYSVLDLKDAFFCLKLHPNSQPLFAFEWRDPEKGNTGQLTWTRLPQGFKNSPTLFNEALHRDLAPFRALNPQVVLLQYVDDLLVAAPTYRDCKEGTQKLLQELSKLGYRVSAKKAQLCQKEVTYLGYLLKEGKRWLTPARKATVMKIPPPTTPRQVREFLGTAGFCRLWIPGFASLAAPLYPLTKPSIPFIWTEEHQKAFDRIKEALLSAPALALPDLTKPFTLYVDERAGVARGVLTQTLGPWRRPVAYLSKKLDPVASGWPTCLKAVAAVALLLKDADKLTLGQNVTVIASHSLESIVRQPPDRWMTNARMTHYQSLLLNERVSFAPPAVLNPATLLPVESEATPVHRCSEILAEETGTRRDLKDQPLPGVPAWYTDGSSFIAEGKRRAGAAIVDGKRTVWASSLPEGTSAQKAELVALTQALRLAEGKDINIYTDSRYAFATAHIHGAIYKQRGWLTSAGKDIKNKEEILALLEAIHLPKRVAIIHCPGHQKGNDPVATGNRRADEAAKQAALSTRVLAETTKPAGKRTADGSEFEKRTADGSEFESPKKKAKVE

SEQ ID NO: 869 - protein, 2089 aa, synthetic construct
MPAAKRVKLDGGDKKYSIGLDIGTNSVGWAVITDEYKVPSKKFKVLGNTDRHSIKKNLIGALLFDSGETAEATRLKRTARRRYTRRKNRICYLQEIFSNEMAKVDDSFFHRLEESFLVEEDKKHERHPIFGNIVDEVAYHEKYPTIYHLRKKLVDSTDKADLRLIYLALAHMIKFRGHFLIEGDLNPDNSDVDKLFIQLVQTYNQLFEENPINASGVDAKAILSARLSKSRRLENLIAQLPGEKKNGLFGNLIALSLGLTPNFKSNFDLAEDAKLQLSKDTYDDDLDNLLAQIGDQYADLFLAAKNLSDAILLSDILRVNTEITKAPLSASMIKRYDEHHQDLTLLKALVRQQLPEKYKEIFFDQSKNGYAGYIDGGASQEEFYKFIKPILEKMDGTEELLVKLNREDLLRKQRTFDNGSIPHQIHLGELHAILRRQEDFYPFLKDNREKIEKILTFRIPYYVGPLARGNSRFAWMTRKSEETITPWNFEEVVDKGASAQSFIERMTNFDKNLPNEKVLPKHSLLYEYFTVYNELTKVKYVTEGMRKPAFLSGEQKKAIVDLLFKTNRKVTVKQLKEDYFKKIECFDSVEISGVEDRFNASLGTYHDLLKIIKDKDFLDNEENEDILEDIVLTLTLFEDREMIEERLKTYAHLFDDKVMKQLKRRRYTGWGRLSRKLINGIRDKQSGKTILDFLKSDGFANRNFMQLIHDDSLTFKEDIQKAQVSGQGDSLHEHIANLAGSPAIKKGILQTVKVVDELVKVMGRHKPENIVIEMARENQTTQKGQKNSRERMKRIEEGIKELGSQILKEHPVENTQLQNEKLYLYYLQNGRDMYVDQELDINRLSDYDVDHIVPQSFLKDDSIDNKVLTRSDKARGKSDNVPSEEVVKKMKNYWRQLLNAKLITQRKFDNLTKAERGGLSELDKAGFIKRQLVETRQITKHVAQILDSRMNTKYDENDKLIREVKVITLKSKLVSDFRKDFQFYKVREINNYHHAHDAYLNAVVGTALIKKYPKLESEFVYGDYKVYDVRKMIAKSEQEIGKATAKYFFYSNIMNFFKTEITLANGEIRKRPLIETNGETGEIVWDKGRDFATVRKVLSMPQVNIVKKTEVQTGGFSKESILPKRNSDKLIARKKDWDPKKYGGFDSPTVAYSVLVVAKVEKGKSKKLKSVKELLGITIMERSSFEKNPIDFLEAKGYKEVKKDLIIKLPKYSLFELENGRKRMLASAGELQKGNELALPSKYVNFLYLASHYEKLKGSPEDNEQKQLFVEQHKHYLDEIIEQISEFSKRVILADANLDKVLSAYNKHRDKPIREQAENIIHLFTLTNLGAPAAFKYFDTTIDRKRYTSTKEVLDATLIHQSITGLYETRIDLSQLGGDGGGGSGGSGGVLNLEEEYRLHEKPVPSSIDPSWLQLFPTVWAERAGMGLANQVPPVVVELRSGASPVAVRQYPMSKEAREGIRPHIQRFLDLGVLVPCQSPWNTPLLPVKKPGTNDYRPVQDLREINKRVQDIHPTVPNPYNLLSSLPPSHTWYSVLDLKDAFFCLKLHPNSQPLFAFEWRDPEKGNTGQLTWTRLPQGFKNSPTLFNEALHRDLAPFRALNPQVVLLQYVDDLLVAAPTYRDCKEGTQKLLQELSKLGYRVSAKKAQLCQKEVTYLGYLLKEGKRWLTPARKATVMKIPPPTTPRQVREFLGTAGFCRLWIPGFASLAAPLYPLTKPSIPFIWTEEHQKAFDRIKEALLSAPALALPDLTKPFTLYVDERAGVARGVLTQTLGPWRRPVAYLSKKLDPVASGWPTCLKAVAAVALLLKDADKLTLGQNVTVIASHSLESIVRQPPDRWMTNARMTHYQSLLLNERVSFAPPAVLNPATLLPVESEATPVHRCSEILAEETGTRRDLKDQPLPGVPAWYTDGSSFIAEGKRRAGAAIVDGKRTVWASSLPEGTSAQKAELVALTQALRLAEGKDINIYTDSRYAFATAHIHGAIYKQRGWLTSAGKDIKNKEEILALLEAIHLPKRVAIIHCPGHQKGNDPVATGNRRADEAAKQAALSTRVLAETTKPAGKRTADGSEFEKRTADGSEFESPKKKAKVE

SEQ ID NO: 870 - protein, 2094 aa, synthetic construct
MPAAKRVKLDGGDKKYSIGLDIGTNSVGWAVITDEYKVPSKKFKVLGNTDRHSIKKNLIGALLFDSGETAEATRLKRTARRRYTRRKNRICYLQEIFSNEMAKVDDSFFHRLEESFLVEEDKKHERHPIFGNIVDEVAYHEKYPTIYHLRKKLVDSTDKADLRLIYLALAHMIKFRGHFLIEGDLNPDNSDVDKLFIQLVQTYNQLFEENPINASGVDAKAILSARLSKSRRLENLIAQLPGEKKNGLFGNLIALSLGLTPNFKSNFDLAEDAKLQLSKDTYDDDLDNLLAQIGDQYADLFLAAKNLSDAILLSDILRVNTEITKAPLSASMIKRYDEHHQDLTLLKALVRQQLPEKYKEIFFDQSKNGYAGYIDGGASQEEFYKFIKPILEKMDGTEELLVKLNREDLLRKQRTFDNGSIPHQIHLGELHAILRRQEDFYPFLKDNREKIEKILTFRIPYYVGPLARGNSRFAWMTRKSEETITPWNFEEVVDKGASAQSFIERMTNFDKNLPNEKVLPKHSLLYEYFTVYNELTKVKYVTEGMRKPAFLSGEQKKAIVDLLFKTNRKVTVKQLKEDYFKKIECFDSVEISGVEDRFNASLGTYHDLLKIIKDKDFLDNEENEDILEDIVLTLTLFEDREMIEERLKTYAHLFDDKVMKQLKRRRYTGWGRLSRKLINGIRDKQSGKTILDFLKSDGFANRNFMQLIHDDSLTFKEDIQKAQVSGQGDSLHEHIANLAGSPAIKKGILQTVKVVDELVKVMGRHKPENIVIEMARENQTTQKGQKNSRERMKRIEEGIKELGSQILKEHPVENTQLQNEKLYLYYLQNGRDMYVDQELDINRLSDYDVDHIVPQSFLKDDSIDNKVLTRSDKARGKSDNVPSEEVVKKMKNYWRQLLNAKLITQRKFDNLTKAERGGLSELDKAGFIKRQLVETRQITKHVAQILDSRMNTKYDENDKLIREVKVITLKSKLVSDFRKDFQFYKVREINNYHHAHDAYLNAVVGTALIKKYPKLESEFVYGDYKVYDVRKMIAKSEQEIGKATAKYFFYSNIMNFFKTEITLANGEIRKRPLIETNGETGEIVWDKGRDFATVRKVLSMPQVNIVKKTEVQTGGFSKESILPKRNSDKLIARKKDWDPKKYGGFDSPTVAYSVLVVAKVEKGKSKKLKSVKELLGITIMERSSFEKNPIDFLEAKGYKEVKKDLIIKLPKYSLFELENGRKRMLASAGELQKGNELALPSKYVNFLYLASHYEKLKGSPEDNEQKQLFVEQHKHYLDEIIEQISEFSKRVILADANLDKVLSAYNKHRDKPIREQAENIIHLFTLTNLGAPAAFKYFDTTIDRKRYTSTKEVLDATLIHQSITGLYETRIDLSQLGGDGGGGGPAPEAAAKGGVLNLEEEYRLHEKPVPSSIDPSWLQLFPTVWAERAGMGLANQVPPVVVELRSGASPVAVRQYPMSKEAREGIRPHIQRFLDLGVLVPCQSPWNTPLLPVKKPGTNDYRPVQDLREINKRVQDIHPTVPNPYNLLSSLPPSHTWYSVLDLKDAFFCLKLHPNSQPLFAFEWRDPEKGNTGQLTWTRLPQGFKNSPTLFNEALHRDLAPFRALNPQVVLLQYVDDLLVAAPTYRDCKEGTQKLLQELSKLGYRVSAKKAQLCQKEVTYLGYLLKEGKRWLTPARKATVMKIPPPTTPRQVREFLGTAGFCRLWIPGFASLAAPLYPLTKPSIPFIWTEEHQKAFDRIKEALLSAPALALPDLTKPFTLYVDERAGVARGVLTQTLGPWRRPVAYLSKKLDPVASGWPTCLKAVAAVALLLKDADKLTLGQNVTVIASHSLESIVRQPPDRWMTNARMTHYQSLLLNERVSFAPPAVLNPATLLPVESEATPVHRCSEILAEETGTRRDLKDQPLPGVPAWYTDGSSFIAEGKRRAGAAIVDGKRTVWASSLPEGTSAQKAELVALTQALRLAEGKDINIYTDSRYAFATAHIHGAIYKQRGWLTSAGKDIKNKEEILALLEAIHLPKRVAIIHCPGHQKGNDPVATGNRRADEAAKQAALSTRVLAETTKPAGKRTADGSEFEKRTADGSEFESPKKKAKVE

SEQ ID NO: 871 - protein, 2129 aa, synthetic construct
MPAAKRVKLDGGDKKYSIGLDIGTNSVGWAVITDEYKVPSKKFKVLGNTDRHSIKKNLIGALLFDSGETAEATRLKRTARRRYTRRKNRICYLQEIFSNEMAKVDDSFFHRLEESFLVEEDKKHERHPIFGNIVDEVAYHEKYPTIYHLRKKLVDSTDKADLRLIYLALAHMIKFRGHFLIEGDLNPDNSDVDKLFIQLVQTYNQLFEENPINASGVDAKAILSARLSKSRRLENLIAQLPGEKKNGLFGNLIALSLGLTPNFKSNFDLAEDAKLQLSKDTYDDDLDNLLAQIGDQYADLFLAAKNLSDAILLSDILRVNTEITKAPLSASMIKRYDEHHQDLTLLKALVRQQLPEKYKEIFFDQSKNGYAGYIDGGASQEEFYKFIKPILEKMDGTEELLVKLNREDLLRKQRTFDNGSIPHQIHLGELHAILRRQEDFYPFLKDNREKIEKILTFRIPYYVGPLARGNSRFAWMTRKSEETITPWNFEEVVDKGASAQSFIERMTNFDKNLPNEKVLPKHSLLYEYFTVYNELTKVKYVTEGMRKPAFLSGEQKKAIVDLLFKTNRKVTVKQLKEDYFKKIECFDSVEISGVEDRFNASLGTYHDLLKIIKDKDFLDNEENEDILEDIVLTLTLFEDREMIEERLKTYAHLFDDKVMKQLKRRRYTGWGRLSRKLINGIRDKQSGKTILDFLKSDGFANRNFMQLIHDDSLTFKEDIQKAQVSGQGDSLHEHIANLAGSPAIKKGILQTVKVVDELVKVMGRHKPENIVIEMARENQTTQKGQKNSRERMKRIEEGIKELGSQILKEHPVENTQLQNEKLYLYYLQNGRDMYVDQELDINRLSDYDVDHIVPQSFLKDDSIDNKVLTRSDKARGKSDNVPSEEVVKKMKNYWRQLLNAKLITQRKFDNLTKAERGGLSELDKAGFIKRQLVETRQITKHVAQILDSRMNTKYDENDKLIREVKVITLKSKLVSDFRKDFQFYKVREINNYHHAHDAYLNAVVGTALIKKYPKLESEFVYGDYKVYDVRKMIAKSEQEIGKATAKYFFYSNIMNFFKTEITLANGEIRKRPLIETNGETGEIVWDKGRDFATVRKVLSMPQVNIVKKTEVQTGGFSKESILPKRNSDKLIARKKDWDPKKYGGFDSPTVAYSVLVVAKVEKGKSKKLKSVKELLGITIMERSSFEKNPIDFLEAKGYKEVKKDLIIKLPKYSLFELENGRKRMLASAGELQKGNELALPSKYVNFLYLASHYEKLKGSPEDNEQKQLFVEQHKHYLDEIIEQISEFSKRVILADANLDKVLSAYNKHRDKPIREQAENIIHLFTLTNLGAPAAFKYFDTTIDRKRYTSTKEVLDATLIHQSITGLYETRIDLSQLGGDGGAEAAAKEAAAKEAAAKEAAAKALEAEAAAKEAAAKEAAAKEAAAKAGGVLNLEEEYRLHEKPVPSSIDPSWLQLFPTVWAERAGMGLANQVPPVVVELRSGASPVAVRQYPMSKEAREGIRPHIQRFLDLGVLVPCQSPWNTPLLPVKKPGTNDYRPVQDLREINKRVQDIHPTVPNPYNLLSSLPPSHTWYSVLDLKDAFFCLKLHPNSQPLFAFEWRDPEKGNTGQLTWTRLPQGFKNSPTLFNEALHRDLAPFRALNPQVVLLQYVDDLLVAAPTYRDCKEGTQKLLQELSKLGYRVSAKKAQLCQKEVTYLGYLLKEGKRWLTPARKATVMKIPPPTTPRQVREFLGKAGFCRLFIPGFASLAAPLYPLTKPSIPFIWTEEHQKAFDRIKEALLSAPALALPDLTKPFTLYVDERAGVARGVLTQTLGPWRRPVAYLSKKLDPVASGWPTCLKAVAAVALLLKDADKLTLGQNVTVIASHSLESIVRQPPDRWMTNARMTHYQSLLLNERVSFAPPAVLNPATLLPVESEATPVHRCSEILAEETGTRRDLKDQPLPGVPAWYTDGSSFIAEGKRRAGAAIVDGKRTVWASSLPEGTSAQKAELVALTQALRLAEGKDINIYTDSRYAFATAHIHGAIYKQRGWLTSAGKDIKNKEEILALLEAIHLPKRVAIIHCPGHQKGNDPVATGNRRADEAAKQAALSTRVLAETTKPAGKRTADGSEFEKRTADGSEFESPKKKAKVE

SEQ ID NO: 872 - protein, 2092 aa, synthetic construct
MPAAKRVKLDGGDKKYSIGLDIGTNSVGWAVITDEYKVPSKKFKVLGNTDRHSIKKNLIGALLFDSGETAEATRLKRTARRRYTRRKNRICYLQEIFSNEMAKVDDSFFHRLEESFLVEEDKKHERHPIFGNIVDEVAYHEKYPTIYHLRKKLVDSTDKADLRLIYLALAHMIKFRGHFLIEGDLNPDNSDVDKLFIQLVQTYNQLFEENPINASGVDAKAILSARLSKSRRLENLIAQLPGEKKNGLFGNLIALSLGLTPNFKSNFDLAEDAKLQLSKDTYDDDLDNLLAQIGDQYADLFLAAKNLSDAILLSDILRVNTEITKAPLSASMIKRYDEHHQDLTLLKALVRQQLPEKYKEIFFDQSKNGYAGYIDGGASQEEFYKFIKPILEKMDGTEELLVKLNREDLLRKQRTFDNGSIPHQIHLGELHAILRRQEDFYPFLKDNREKIEKILTFRIPYYVGPLARGNSRFAWMTRKSEETITPWNFEEVVDKGASAQSFIERMTNFDKNLPNEKVLPKHSLLYEYFTVYNELTKVKYVTEGMRKPAFLSGEQKKAIVDLLFKTNRKVTVKQLKEDYFKKIECFDSVEISGVEDRFNASLGTYHDLLKIIKDKDFLDNEENEDILEDIVLTLTLFEDREMIEERLKTYAHLFDDKVMKQLKRRRYTGWGRLSRKLINGIRDKQSGKTILDFLKSDGFANRNFMQLIHDDSLTFKEDIQKAQVSGQGDSLHEHIANLAGSPAIKKGILQTVKVVDELVKVMGRHKPENIVIEMARENQTTQKGQKNSRERMKRIEEGIKELGSQILKEHPVENTQLQNEKLYLYYLQNGRDMYVDQELDINRLSDYDVDHIVPQSFLKDDSIDNKVLTRSDKARGKSDNVPSEEVVKKMKNYWRQLLNAKLITQRKFDNLTKAERGGLSELDKAGFIKRQLVETRQITKHVAQILDSRMNTKYDENDKLIREVKVITLKSKLVSDFRKDFQFYKVREINNYHHAHDAYLNAVVGTALIKKYPKLESEFVYGDYKVYDVRKMIAKSEQEIGKATAKYFFYSNIMNFFKTEITLANGEIRKRPLIETNGETGEIVWDKGRDFATVRKVLSMPQVNIVKKTEVQTGGFSKESILPKRNSDKLIARKKDWDPKKYGGFDSPTVAYSVLVVAKVEKGKSKKLKSVKELLGITIMERSSFEKNPIDFLEAKGYKEVKKDLIIKLPKYSLFELENGRKRMLASAGELQKGNELALPSKYVNFLYLASHYEKLKGSPEDNEQKQLFVEQHKHYLDEIIEQISEFSKRVILADANLDKVLSAYNKHRDKPIREQAENIIHLFTLTNLGAPAAFKYFDTTIDRKRYTSTKEVLDATLIHQSITGLYETRIDLSQLGGDGGPAPGGGGSSGGVLNLEEEYRLHEKPVPSSIDPSWLQLFPTVWAERAGMGLANQVPPVVVELRSGASPVAVRQYPMSKEAREGIRPHIQRFLDLGVLVPCQSPWNTPLLPVKKPGTNDYRPVQDLREINKRVQDIHPTVPNPYNLLSSLPPSHTWYSVLDLKDAFFCLKLHPNSQPLFAFEWRDPEKGNTGQLTWTRLPQGFKNSPTLFNEALHRDLAPFRALNPQVVLLQYVDDLLVAAPTYRDCKEGTQKLLQELSKLGYRVSAKKAQLCQKEVTYLGYLLKEGKRWLTPARKATVMKIPPPTTPRQVREFLGKAGFCRLFIPGFASLAAPLYPLTKPSIPFIWTEEHQKAFDRIKEALLSAPALALPDLTKPFTLYVDERAGVARGVLTQTLGPWRRPVAYLSKKLDPVASGWPTCLKAVAAVALLLKDADKLTLGQNVTVIASHSLESIVRQPPDRWMTNARMTHYQSLLLNERVSFAPPAVLNPATLLPVESEATPVHRCSEILAEETGTRRDLKDQPLPGVPAWYTDGSSFIAEGKRRAGAAIVDGKRTVWASSLPEGTSAQKAELVALTQALRLAEGKDINIYTDSRYAFATAHIHGAIYKQRGWLTSAGKDIKNKEEILALLEAIHLPKRVAIIHCPGHQKGNDPVATGNRRADEAAKQAALSTRVLAETTKPAGKRTADGSEFEKRTADGSEFESPKKKAKVE

SEQ ID NO: 873 - protein, 2108 aa, synthetic construct
MPAAKRVKLDGGDKKYSIGLDIGTNSVGWAVITDEYKVPSKKFKVLGNTDRHSIKKNLIGALLFDSGETAEATRLKRTARRRYTRRKNRICYLQEIFSNEMAKVDDSFFHRLEESFLVEEDKKHERHPIFGNIVDEVAYHEKYPTIYHLRKKLVDSTDKADLRLIYLALAHMIKFRGHFLIEGDLNPDNSDVDKLFIQLVQTYNQLFEENPINASGVDAKAILSARLSKSRRLENLIAQLPGEKKNGLFGNLIALSLGLTPNFKSNFDLAEDAKLQLSKDTYDDDLDNLLAQIGDQYADLFLAAKNLSDAILLSDILRVNTEITKAPLSASMIKRYDEHHQDLTLLKALVRQQLPEKYKEIFFDQSKNGYAGYIDGGASQEEFYKFIKPILEKMDGTEELLVKLNREDLLRKQRTFDNGSIPHQIHLGELHAILRRQEDFYPFLKDNREKIEKILTFRIPYYVGPLARGNSRFAWMTRKSEETITPWNFEEVVDKGASAQSFIERMTNFDKNLPNEKVLPKHSLLYEYFTVYNELTKVKYVTEGMRKPAFLSGEQKKAIVDLLFKTNRKVTVKQLKEDYFKKIECFDSVEISGVEDRFNASLGTYHDLLKIIKDKDFLDNEENEDILEDIVLTLTLFEDREMIEERLKTYAHLFDDKVMKQLKRRRYTGWGRLSRKLINGIRDKQSGKTILDFLKSDGFANRNFMQLIHDDSLTFKEDIQKAQVSGQGDSLHEHIANLAGSPAIKKGILQTVKVVDELVKVMGRHKPENIVIEMARENQTTQKGQKNSRERMKRIEEGIKELGSQILKEHPVENTQLQNEKLYLYYLQNGRDMYVDQELDINRLSDYDVDHIVPQSFLKDDSIDNKVLTRSDKARGKSDNVPSEEVVKKMKNYWRQLLNAKLITQRKFDNLTKAERGGLSELDKAGFIKRQLVETRQITKHVAQILDSRMNTKYDENDKLIREVKVITLKSKLVSDFRKDFQFYKVREINNYHHAHDAYLNAVVGTALIKKYPKLESEFVYGDYKVYDVRKMIAKSEQEIGKATAKYFFYSNIMNFFKTEITLANGEIRKRPLIETNGETGEIVWDKGRDFATVRKVLSMPQVNIVKKTEVQTGGFSKESILPKRNSDKLIARKKDWDPKKYGGFDSPTVAYSVLVVAKVEKGKSKKLKSVKELLGITIMERSSFEKNPIDFLEAKGYKEVKKDLIIKLPKYSLFELENGRKRMLASAGELQKGNELALPSKYVNFLYLASHYEKLKGSPEDNEQKQLFVEQHKHYLDEIIEQISEFSKRVILADANLDKVLSAYNKHRDKPIREQAENIIHLFTLTNLGAPAAFKYFDTTIDRKRYTSTKEVLDATLIHQSITGLYETRIDLSQLGGDGGGGGGSGGGGSGGGGSGGGGSGGGGSGGVLNLEEEYRLHEKPVPSSIDPSWLQLFPTVWAERAGMGLANQVPPVVVELRSGASPVAVRQYPMSKEAREGIRPHIQRFLDLGVLVPCQSPWNTPLLPVKKPGTNDYRPVQDLREINKRVQDIHPTVPNPYNLLSSLPPSHTWYSVLDLKDAFFCLKLHPNSQPLFAFEWRDPEKGNTGQLTWTRLPQGFKNSPTLFNEALHRDLAPFRALNPQVVLLQYVDDLLVAAPTYRDCKEGTQKLLQELSKLGYRVSAKKAQLCQKEVTYLGYLLKEGKRWLTPARKATVMKIPPPTTPRQVREFLGKAGFCRLFIPGFASLAAPLYPLTKPSIPFIWTEEHQKAFDRIKEALLSAPALALPDLTKPFTLYVDERAGVARGVLTQTLGPWRRPVAYLSKKLDPVASGWPTCLKAVAAVALLLKDADKLTLGQNVTVIASHSLESIVRQPPDRWMTNARMTHYQSLLLNERVSFAPPAVLNPATLLPVESEATPVHRCSEILAEETGTRRDLKDQPLPGVPAWYTDGSSFIAEGKRRAGAAIVDGKRTVWASSLPEGTSAQKAELVALTQALRLAEGKDINIYTDSRYAFATAHIHGAIYKQRGWLTSAGKDIKNKEEILALLEAIHLPKRVAIIHCPGHQKGNDPVATGNRRADEAAKQAALSTRVLAETTKPAGKRTADGSEFEKRTADGSEFESPKKKAKVE

SEQ ID NO: 874 - protein, 2094 aa, synthetic construct
MPAAKRVKLDGGDKKYSIGLDIGTNSVGWAVITDEYKVPSKKFKVLGNTDRHSIKKNLIGALLFDSGETAEATRLKRTARRRYTRRKNRICYLQEIFSNEMAKVDDSFFHRLEESFLVEEDKKHERHPIFGNIVDEVAYHEKYPTIYHLRKKLVDSTDKADLRLIYLALAHMIKFRGHFLIEGDLNPDNSDVDKLFIQLVQTYNQLFEENPINASGVDAKAILSARLSKSRRLENLIAQLPGEKKNGLFGNLIALSLGLTPNFKSNFDLAEDAKLQLSKDTYDDDLDNLLAQIGDQYADLFLAAKNLSDAILLSDILRVNTEITKAPLSASMIKRYDEHHQDLTLLKALVRQQLPEKYKEIFFDQSKNGYAGYIDGGASQEEFYKFIKPILEKMDGTEELLVKLNREDLLRKQRTFDNGSIPHQIHLGELHAILRRQEDFYPFLKDNREKIEKILTFRIPYYVGPLARGNSRFAWMTRKSEETITPWNFEEVVDKGASAQSFIERMTNFDKNLPNEKVLPKHSLLYEYFTVYNELTKVKYVTEGMRKPAFLSGEQKKAIVDLLFKTNRKVTVKQLKEDYFKKIECFDSVEISGVEDRFNASLGTYHDLLKIIKDKDFLDNEENEDILEDIVLTLTLFEDREMIEERLKTYAHLFDDKVMKQLKRRRYTGWGRLSRKLINGIRDKQSGKTILDFLKSDGFANRNFMQLIHDDSLTFKEDIQKAQVSGQGDSLHEHIANLAGSPAIKKGILQTVKVVDELVKVMGRHKPENIVIEMARENQTTQKGQKNSRERMKRIEEGIKELGSQILKEHPVENTQLQNEKLYLYYLQNGRDMYVDQELDINRLSDYDVDHIVPQSFLKDDSIDNKVLTRSDKARGKSDNVPSEEVVKKMKNYWRQLLNAKLITQRKFDNLTKAERGGLSELDKAGFIKRQLVETRQITKHVAQILDSRMNTKYDENDKLIREVKVITLKSKLVSDFRKDFQFYKVREINNYHHAHDAYLNAVVGTALIKKYPKLESEFVYGDYKVYDVRKMIAKSEQEIGKATAKYFFYSNIMNFFKTEITLANGEIRKRPLIETNGETGEIVWDKGRDFATVRKVLSMPQVNIVKKTEVQTGGFSKESILPKRNSDKLIARKKDWDPKKYGGFDSPTVAYSVLVVAKVEKGKSKKLKSVKELLGITIMERSSFEKNPIDFLEAKGYKEVKKDLIIKLPKYSLFELENGRKRMLASAGELQKGNELALPSKYVNFLYLASHYEKLKGSPEDNEQKQLFVEQHKHYLDEIIEQISEFSKRVILADANLDKVLSAYNKHRDKPIREQAENIIHLFTLTNLGAPAAFKYFDTTIDRKRYTSTKEVLDATLIHQSITGLYETRIDLSQLGGDGGEAAAKPAPGSSGGVLNLEEEYRLHEKPVPSSIDPSWLQLFPTVWAERAGMGLANQVPPVVVELRSGASPVAVRQYPMSKEAREGIRPHIQRFLDLGVLVPCQSPWNTPLLPVKKPGTNDYRPVQDLREINKRVQDIHPTVPNPYNLLSSLPPSHTWYSVLDLKDAFFCLKLHPNSQPLFAFEWRDPEKGNTGQLTWTRLPQGFKNSPTLFNEALHRDLAPFRALNPQVVLLQYVDDLLVAAPTYRDCKEGTQKLLQELSKLGYRVSAKKAQLCQKEVTYLGYLLKEGKRWLTPARKATVMKIPPPTTPRQVREFLGKAGFCRLFIPGFASLAAPLYPLTKPSIPFIWTEEHQKAFDRIKEALLSAPALALPDLTKPFTLYVDERAGVARGVLTQTLGPWRRPVAYLSKKLDPVASGWPTCLKAVAAVALLLKDADKLTLGQNVTVIASHSLESIVRQPPDRWMTNARMTHYQSLLLNERVSFAPPAVLNPATLLPVESEATPVHRCSEILAEETGTRRDLKDQPLPGVPAWYTDGSSFIAEGKRRAGAAIVDGKRTVWASSLPEGTSAQKAELVALTQALRLAEGKDINIYTDSRYAFATAHIHGAIYKQRGWLTSAGKDIKNKEEILALLEAIHLPKRVAIIHCPGHQKGNDPVATGNRRADEAAKQAALSTRVLAETTKPAGKRTADGSEFEKRTADGSEFESPKKKAKVE

SEQ ID NO: 875 - protein, 2092 aa, synthetic construct
MPAAKRVKLDGGDKKYSIGLDIGTNSVGWAVITDEYKVPSKKFKVLGNTDRHSIKKNLIGALLFDSGETAEATRLKRTARRRYTRRKNRICYLQEIFSNEMAKVDDSFFHRLEESFLVEEDKKHERHPIFGNIVDEVAYHEKYPTIYHLRKKLVDSTDKADLRLIYLALAHMIKFRGHFLIEGDLNPDNSDVDKLFIQLVQTYNQLFEENPINASGVDAKAILSARLSKSRRLENLIAQLPGEKKNGLFGNLIALSLGLTPNFKSNFDLAEDAKLQLSKDTYDDDLDNLLAQIGDQYADLFLAAKNLSDAILLSDILRVNTEITKAPLSASMIKRYDEHHQDLTLLKALVRQQLPEKYKEIFFDQSKNGYAGYIDGGASQEEFYKFIKPILEKMDGTEELLVKLNREDLLRKQRTFDNGSIPHQIHLGELHAILRRQEDFYPFLKDNREKIEKILTFRIPYYVGPLARGNSRFAWMTRKSEETITPWNFEEVVDKGASAQSFIERMTNFDKNLPNEKVLPKHSLLYEYFTVYNELTKVKYVTEGMRKPAFLSGEQKKAIVDLLFKTNRKVTVKQLKEDYFKKIECFDSVEISGVEDRFNASLGTYHDLLKIIKDKDFLDNEENEDILEDIVLTLTLFEDREMIEERLKTYAHLFDDKVMKQLKRRRYTGWGRLSRKLINGIRDKQSGKTILDFLKSDGFANRNFMQLIHDDSLTFKEDIQKAQVSGQGDSLHEHIANLAGSPAIKKGILQTVKVVDELVKVMGRHKPENIVIEMARENQTTQKGQKNSRERMKRIEEGIKELGSQILKEHPVENTQLQNEKLYLYYLQNGRDMYVDQELDINRLSDYDVDHIVPQSFLKDDSIDNKVLTRSDKARGKSDNVPSEEVVKKMKNYWRQLLNAKLITQRKFDNLTKAERGGLSELDKAGFIKRQLVETRQITKHVAQILDSRMNTKYDENDKLIREVKVITLKSKLVSDFRKDFQFYKVREINNYHHAHDAYLNAVVGTALIKKYPKLESEFVYGDYKVYDVRKMIAKSEQEIGKATAKYFFYSNIMNFFKTEITLANGEIRKRPLIETNGETGEIVWDKGRDFATVRKVLSMPQVNIVKKTEVQTGGFSKESILPKRNSDKLIARKKDWDPKKYGGFDSPTVAYSVLVVAKVEKGKSKKLKSVKELLGITIMERSSFEKNPIDFLEAKGYKEVKKDLIIKLPKYSLFELENGRKRMLASAGELQKGNELALPSKYVNFLYLASHYEKLKGSPEDNEQKQLFVEQHKHYLDEIIEQISEFSKRVILADANLDKVLSAYNKHRDKPIREQAENIIHLFTLTNLGAPAAFKYFDTTIDRKRYTSTKEVLDATLIHQSITGLYETRIDLSQLGGDGGGGSPAPGSSGGVLNLEEEYRLHEKPVPSSIDPSWLQLFPTVWAERAGMGLANQVPPVVVELRSGASPVAVRQYPMSKEAREGIRPHIQRFLDLGVLVPCQSPWNTPLLPVKKPGTNDYRPVQDLREINKRVQDIHPTVPNPYNLLSSLPPSHTWYSVLDLKDAFFCLKLHPNSQPLFAFEWRDPEKGNTGQLTWTRLPQGFKNSPTLFNEALHRDLAPFRALNPQVVLLQYVDDLLVAAPTYRDCKEGTQKLLQELSKLGYRVSAKKAQLCQKEVTYLGYLLKEGKRWLTPARKATVMKIPPPTTPRQVREFLGKAGFCRLFIPGFASLAAPLYPLTKPSIPFIWTEEHQKAFDRIKEALLSAPALALPDLTKPFTLYVDERAGVARGVLTQTLGPWRRPVAYLSKKLDPVASGWPTCLKAVAAVALLLKDADKLTLGQNVTVIASHSLESIVRQPPDRWMTNARMTHYQSLLLNERVSFAPPAVLNPATLLPVESEATPVHRCSEILAEETGTRRDLKDQPLPGVPAWYTDGSSFIAEGKRRAGAAIVDGKRTVWASSLPEGTSAQKAELVALTQALRLAEGKDINIYTDSRYAFATAHIHGAIYKQRGWLTSAGKDIKNKEEILALLEAIHLPKRVAIIHCPGHQKGNDPVATGNRRADEAAKQAALSTRVLAETTKPAGKRTADGSEFEKRTADGSEFESPKKKAKVE

SEQ ID NO: 876 - protein, 2086 aa, synthetic construct
MPAAKRVKLDGGDKKYSIGLDIGTNSVGWAVITDEYKVPSKKFKVLGNTDRHSIKKNLIGALLFDSGETAEATRLKRTARRRYTRRKNRICYLQEIFSNEMAKVDDSFFHRLEESFLVEEDKKHERHPIFGNIVDEVAYHEKYPTIYHLRKKLVDSTDKADLRLIYLALAHMIKFRGHFLIEGDLNPDNSDVDKLFIQLVQTYNQLFEENPINASGVDAKAILSARLSKSRRLENLIAQLPGEKKNGLFGNLIALSLGLTPNFKSNFDLAEDAKLQLSKDTYDDDLDNLLAQIGDQYADLFLAAKNLSDAILLSDILRVNTEITKAPLSASMIKRYDEHHQDLTLLKALVRQQLPEKYKEIFFDQSKNGYAGYIDGGASQEEFYKFIKPILEKMDGTEELLVKLNREDLLRKQRTFDNGSIPHQIHLGELHAILRRQEDFYPFLKDNREKIEKILTFRIPYYVGPLARGNSRFAWMTRKSEETITPWNFEEVVDKGASAQSFIERMTNFDKNLPNEKVLPKHSLLYEYFTVYNELTKVKYVTEGMRKPAFLSGEQKKAIVDLLFKTNRKVTVKQLKEDYFKKIECFDSVEISGVEDRFNASLGTYHDLLKIIKDKDFLDNEENEDILEDIVLTLTLFEDREMIEERLKTYAHLFDDKVMKQLKRRRYTGWGRLSRKLINGIRDKQSGKTILDFLKSDGFANRNFMQLIHDDSLTFKEDIQKAQVSGQGDSLHEHIANLAGSPAIKKGILQTVKVVDELVKVMGRHKPENIVIEMARENQTTQKGQKNSRERMKRIEEGIKELGSQILKEHPVENTQLQNEKLYLYYLQNGRDMYVDQELDINRLSDYDVDHIVPQSFLKDDSIDNKVLTRSDKARGKSDNVPSEEVVKKMKNYWRQLLNAKLITQRKFDNLTKAERGGLSELDKAGFIKRQLVETRQITKHVAQILDSRMNTKYDENDKLIREVKVITLKSKLVSDFRKDFQFYKVREINNYHHAHDAYLNAVVGTALIKKYPKLESEFVYGDYKVYDVRKMIAKSEQEIGKATAKYFFYSNIMNFFKTEITLANGEIRKRPLIETNGETGEIVWDKGRDFATVRKVLSMPQVNIVKKTEVQTGGFSKESILPKRNSDKLIARKKDWDPKKYGGFDSPTVAYSVLVVAKVEKGKSKKLKSVKELLGITIMERSSFEKNPIDFLEAKGYKEVKKDLIIKLPKYSLFELENGRKRMLASAGELQKGNELALPSKYVNFLYLASHYEKLKGSPEDNEQKQLFVEQHKHYLDEIIEQISEFSKRVILADANLDKVLSAYNKHRDKPIREQAENIIHLFTLTNLGAPAAFKYFDTTIDRKRYTSTKEVLDATLIHQSITGLYETRIDLSQLGGDGGGSSGGVLNLEEEYRLHEKPVPSSIDPSWLQLFPTVWAERAGMGLANQVPPVVVELRSGASPVAVRQYPMSKEAREGIRPHIQRFLDLGVLVPCQSPWNTPLLPVKKPGTNDYRPVQDLREINKRVQDIHPTVPNPYNLLSSLPPSHTWYSVLDLKDAFFCLKLHPNSQPLFAFEWRDPEKGNTGQLTWTRLPQGFKNSPTLFNEALHRDLAPFRALNPQVVLLQYVDDLLVAAPTYRDCKEGTQKLLQELSKLGYRVSAKKAQLCQKEVTYLGYLLKEGKRWLTPARKATVMKIPPPTTPRQVREFLGKAGFCRLFIPGFASLAAPLYPLTKPSIPFIWTEEHQKAFDRIKEALLSAPALALPDLTKPFTLYVDERAGVARGVLTQTLGPWRRPVAYLSKKLDPVASGWPTCLKAVAAVALLLKDADKLTLGQNVTVIASHSLESIVRQPPDRWMTNARMTHYQSLLLNERVSFAPPAVLNPATLLPVESEATPVHRCSEILAEETGTRRDLKDQPLPGVPAWYTDGSSFIAEGKRRAGAAIVDGKRTVWASSLPEGTSAQKAELVALTQALRLAEGKDINIYTDSRYAFATAHIHGAIYKQRGWLTSAGKDIKNKEEILALLEAIHLPKRVAIIHCPGHQKGNDPVATGNRRADEAAKQAALSTRVLAETTKPAGKRTADGSEFEKRTADGSEFESPKKKAKVE

SEQ ID NO: 877 - protein, 2099 aa, synthetic construct
MPAAKRVKLDGGDKKYSIGLDIGTNSVGWAVITDEYKVPSKKFKVLGNTDRHSIKKNLIGALLFDSGETAEATRLKRTARRRYTRRKNRICYLQEIFSNEMAKVDDSFFHRLEESFLVEEDKKHERHPIFGNIVDEVAYHEKYPTIYHLRKKLVDSTDKADLRLIYLALAHMIKFRGHFLIEGDLNPDNSDVDKLFIQLVQTYNQLFEENPINASGVDAKAILSARLSKSRRLENLIAQLPGEKKNGLFGNLIALSLGLTPNFKSNFDLAEDAKLQLSKDTYDDDLDNLLAQIGDQYADLFLAAKNLSDAILLSDILRVNTEITKAPLSASMIKRYDEHHQDLTLLKALVRQQLPEKYKEIFFDQSKNGYAGYIDGGASQEEFYKFIKPILEKMDGTEELLVKLNREDLLRKQRTFDNGSIPHQIHLGELHAILRRQEDFYPFLKDNREKIEKILTFRIPYYVGPLARGNSRFAWMTRKSEETITPWNFEEVVDKGASAQSFIERMTNFDKNLPNEKVLPKHSLLYEYFTVYNELTKVKYVTEGMRKPAFLSGEQKKAIVDLLFKTNRKVTVKQLKEDYFKKIECFDSVEISGVEDRFNASLGTYHDLLKIIKDKDFLDNEENEDILEDIVLTLTLFEDREMIEERLKTYAHLFDDKVMKQLKRRRYTGWGRLSRKLINGIRDKQSGKTILDFLKSDGFANRNFMQLIHDDSLTFKEDIQKAQVSGQGDSLHEHIANLAGSPAIKKGILQTVKVVDELVKVMGRHKPENIVIEMARENQTTQKGQKNSRERMKRIEEGIKELGSQILKEHPVENTQLQNEKLYLYYLQNGRDMYVDQELDINRLSDYDVDHIVPQSFLKDDSIDNKVLTRSDKARGKSDNVPSEEVVKKMKNYWRQLLNAKLITQRKFDNLTKAERGGLSELDKAGFIKRQLVETRQITKHVAQILDSRMNTKYDENDKLIREVKVITLKSKLVSDFRKDFQFYKVREINNYHHAHDAYLNAVVGTALIKKYPKLESEFVYGDYKVYDVRKMIAKSEQEIGKATAKYFFYSNIMNFFKTEITLANGEIRKRPLIETNGETGEIVWDKGRDFATVRKVLSMPQVNIVKKTEVQTGGFSKESILPKRNSDKLIARKKDWDPKKYGGFDSPTVAYSVLVVAKVEKGKSKKLKSVKELLGITIMERSSFEKNPIDFLEAKGYKEVKKDLIIKLPKYSLFELENGRKRMLASAGELQKGNELALPSKYVNFLYLASHYEKLKGSPEDNEQKQLFVEQHKHYLDEIIEQISEFSKRVILADANLDKVLSAYNKHRDKPIREQAENIIHLFTLTNLGAPAAFKYFDTTIDRKRYTSTKEVLDATLIHQSITGLYETRIDLSQLGGDGGSGSETPGTSESATPESGGVLNLEEEYRLHEKPVPSSIDPSWLQLFPTVWAERAGMGLANQVPPVVVELRSGASPVAVRQYPMSKEAREGIRPHIQRFLDLGVLVPCQSPWNTPLLPVKKPGTNDYRPVQDLREINKRVQDIHPTVPNPYNLLSSLPPSHTWYSVLDLKDAFFCLKLHPNSQPLFAFEWRDPEKGNTGQLTWTRLPQGFKNSPTLFNEALHRDLAPFRALNPQVVLLQYVDDLLVAAPTYRDCKEGTQKLLQELSKLGYRVSAKKAQLCQKEVTYLGYLLKEGKRWLTPARKATVMKIPPPTTPRQVREFLGKAGFCRLFIPGFASLAAPLYPLTKPSIPFIWTEEHQKAFDRIKEALLSAPALALPDLTKPFTLYVDERAGVARGVLTQTLGPWRRPVAYLSKKLDPVASGWPTCLKAVAAVALLLKDADKLTLGQNVTVIASHSLESIVRQPPDRWMTNARMTHYQSLLLNERVSFAPPAVLNPATLLPVESEATPVHRCSEILAEETGTRRDLKDQPLPGVPAWYTDGSSFIAEGKRRAGAAIVDGKRTVWASSLPEGTSAQKAELVALTQALRLAEGKDINIYTDSRYAFATAHIHGAIYKQRGWLTSAGKDIKNKEEILALLEAIHLPKRVAIIHCPGHQKGNDPVATGNRRADEAAKQAALSTRVLAETTKPAGKRTADGSEFEKRTADGSEFESPKKKAKVE

SEQ ID NO: 878 - protein, 2092 aa, synthetic construct
MPAAKRVKLDGGDKKYSIGLDIGTNSVGWAVITDEYKVPSKKFKVLGNTDRHSIKKNLIGALLFDSGETAEATRLKRTARRRYTRRKNRICYLQEIFSNEMAKVDDSFFHRLEESFLVEEDKKHERHPIFGNIVDEVAYHEKYPTIYHLRKKLVDSTDKADLRLIYLALAHMIKFRGHFLIEGDLNPDNSDVDKLFIQLVQTYNQLFEENPINASGVDAKAILSARLSKSRRLENLIAQLPGEKKNGLFGNLIALSLGLTPNFKSNFDLAEDAKLQLSKDTYDDDLDNLLAQIGDQYADLFLAAKNLSDAILLSDILRVNTEITKAPLSASMIKRYDEHHQDLTLLKALVRQQLPEKYKEIFFDQSKNGYAGYIDGGASQEEFYKFIKPILEKMDGTEELLVKLNREDLLRKQRTFDNGSIPHQIHLGELHAILRRQEDFYPFLKDNREKIEKILTFRIPYYVGPLARGNSRFAWMTRKSEETITPWNFEEVVDKGASAQSFIERMTNFDKNLPNEKVLPKHSLLYEYFTVYNELTKVKYVTEGMRKPAFLSGEQKKAIVDLLFKTNRKVTVKQLKEDYFKKIECFDSVEISGVEDRFNASLGTYHDLLKIIKDKDFLDNEENEDILEDIVLTLTLFEDREMIEERLKTYAHLFDDKVMKQLKRRRYTGWGRLSRKLINGIRDKQSGKTILDFLKSDGFANRNFMQLIHDDSLTFKEDIQKAQVSGQGDSLHEHIANLAGSPAIKKGILQTVKVVDELVKVMGRHKPENIVIEMARENQTTQKGQKNSRERMKRIEEGIKELGSQILKEHPVENTQLQNEKLYLYYLQNGRDMYVDQELDINRLSDYDVDHIVPQSFLKDDSIDNKVLTRSDKARGKSDNVPSEEVVKKMKNYWRQLLNAKLITQRKFDNLTKAERGGLSELDKAGFIKRQLVETRQITKHVAQILDSRMNTKYDENDKLIREVKVITLKSKLVSDFRKDFQFYKVREINNYHHAHDAYLNAVVGTALIKKYPKLESEFVYGDYKVYDVRKMIAKSEQEIGKATAKYFFYSNIMNFFKTEITLANGEIRKRPLIETNGETGEIVWDKGRDFATVRKVLSMPQVNIVKKTEVQTGGFSKESILPKRNSDKLIARKKDWDPKKYGGFDSPTVAYSVLVVAKVEKGKSKKLKSVKELLGITIMERSSFEKNPIDFLEAKGYKEVKKDLIIKLPKYSLFELENGRKRMLASAGELQKGNELALPSKYVNFLYLASHYEKLKGSPEDNEQKQLFVEQHKHYLDEIIEQISEFSKRVILADANLDKVLSAYNKHRDKPIREQAENIIHLFTLTNLGAPAAFKYFDTTIDRKRYTSTKEVLDATLIHQSITGLYETRIDLSQLGGDGGGGGPAPGGSGGVLNLEEEYRLHEKPVPSSIDPSWLQLFPTVWAERAGMGLANQVPPVVVELRSGASPVAVRQYPMSKEAREGIRPHIQRFLDLGVLVPCQSPWNTPLLPVKKPGTNDYRPVQDLREINKRVQDIHPTVPNPYNLLSSLPPSHTWYSVLDLKDAFFCLKLHPNSQPLFAFEWRDPEKGNTGQLTWTRLPQGFKNSPTLFNEALHRDLAPFRALNPQVVLLQYVDDLLVAAPTYRDCKEGTQKLLQELSKLGYRVSAKKAQLCQKEVTYLGYLLKEGKRWLTPARKATVMKIPPPTTPRQVREFLGKAGFCRLFIPGFASLAAPLYPLTKPSIPFIWTEEHQKAFDRIKEALLSAPALALPDLTKPFTLYVDERAGVARGVLTQTLGPWRRPVAYLSKKLDPVASGWPTCLKAVAAVALLLKDADKLTLGQNVTVIASHSLESIVRQPPDRWMTNARMTHYQSLLLNERVSFAPPAVLNPATLLPVESEATPVHRCSEILAEETGTRRDLKDQPLPGVPAWYTDGSSFIAEGKRRAGAAIVDGKRTVWASSLPEGTSAQKAELVALTQALRLAEGKDINIYTDSRYAFATAHIHGAIYKQRGWLTSAGKDIKNKEEILALLEAIHLPKRVAIIHCPGHQKGNDPVATGNRRADEAAKQAALSTRVLAETTKPAGKRTADGSEFEKRTADGSEFESPKKKAKVE

SEQ ID NO: 879 - protein, 2108 aa, synthetic construct
MPAAKRVKLDGGDKKYSIGLDIGTNSVGWAVITDEYKVPSKKFKVLGNTDRHSIKKNLIGALLFDSGETAEATRLKRTARRRYTRRKNRICYLQEIFSNEMAKVDDSFFHRLEESFLVEEDKKHERHPIFGNIVDEVAYHEKYPTIYHLRKKLVDSTDKADLRLIYLALAHMIKFRGHFLIEGDLNPDNSDVDKLFIQLVQTYNQLFEENPINASGVDAKAILSARLSKSRRLENLIAQLPGEKKNGLFGNLIALSLGLTPNFKSNFDLAEDAKLQLSKDTYDDDLDNLLAQIGDQYADLFLAAKNLSDAILLSDILRVNTEITKAPLSASMIKRYDEHHQDLTLLKALVRQQLPEKYKEIFFDQSKNGYAGYIDGGASQEEFYKFIKPILEKMDGTEELLVKLNREDLLRKQRTFDNGSIPHQIHLGELHAILRRQEDFYPFLKDNREKIEKILTFRIPYYVGPLARGNSRFAWMTRKSEETITPWNFEEVVDKGASAQSFIERMTNFDKNLPNEKVLPKHSLLYEYFTVYNELTKVKYVTEGMRKPAFLSGEQKKAIVDLLFKTNRKVTVKQLKEDYFKKIECFDSVEISGVEDRFNASLGTYHDLLKIIKDKDFLDNEENEDILEDIVLTLTLFEDREMIEERLKTYAHLFDDKVMKQLKRRRYTGWGRLSRKLINGIRDKQSGKTILDFLKSDGFANRNFMQLIHDDSLTFKEDIQKAQVSGQGDSLHEHIANLAGSPAIKKGILQTVKVVDELVKVMGRHKPENIVIEMARENQTTQKGQKNSRERMKRIEEGIKELGSQILKEHPVENTQLQNEKLYLYYLQNGRDMYVDQELDINRLSDYDVDHIVPQSFLKDDSIDNKVLTRSDKARGKSDNVPSEEVVKKMKNYWRQLLNAKLITQRKFDNLTKAERGGLSELDKAGFIKRQLVETRQITKHVAQILDSRMNTKYDENDKLIREVKVITLKSKLVSDFRKDFQFYKVREINNYHHAHDAYLNAVVGTALIKKYPKLESEFVYGDYKVYDVRKMIAKSEQEIGKATAKYFFYSNIMNFFKTEITLANGEIRKRPLIETNGETGEIVWDKGRDFATVRKVLSMPQVNIVKKTEVQTGGFSKESILPKRNSDKLIARKKDWDPKKYGGFDSPTVAYSVLVVAKVEKGKSKKLKSVKELLGITIMERSSFEKNPIDFLEAKGYKEVKKDLIIKLPKYSLFELENGRKRMLASAGELQKGNELALPSKYVNFLYLASHYEKLKGSPEDNEQKQLFVEQHKHYLDEIIEQISEFSKRVILADANLDKVLSAYNKHRDKPIREQAENIIHLFTLTNLGAPAAFKYFDTTIDRKRYTSTKEVLDATLIHQSITGLYETRIDLSQLGGDGGEAAAKEAAAKEAAAKEAAAKEAAAKGGVLNLEEEYRLHEKPVPSSIDPSWLQLFPTVWAERAGMGLANQVPPVVVELRSGASPVAVRQYPMSKEAREGIRPHIQRFLDLGVLVPCQSPWNTPLLPVKKPGTNDYRPVQDLREINKRVQDIHPTVPNPYNLLSSLPPSHTWYSVLDLKDAFFCLKLHPNSQPLFAFEWRDPEKGNTGQLTWTRLPQGFKNSPTLFNEALHRDLAPFRALNPQVVLLQYVDDLLVAAPTYRDCKEGTQKLLQELSKLGYRVSAKKAQLCQKEVTYLGYLLKEGKRWLTPARKATVMKIPPPTTPRQVREFLGKAGFCRLFIPGFASLAAPLYPLTKPSIPFIWTEEHQKAFDRIKEALLSAPALALPDLTKPFTLYVDERAGVARGVLTQTLGPWRRPVAYLSKKLDPVASGWPTCLKAVAAVALLLKDADKLTLGQNVTVIASHSLESIVRQPPDRWMTNARMTHYQSLLLNERVSFAPPAVLNPATLLPVESEATPVHRCSEILAEETGTRRDLKDQPLPGVPAWYTDGSSFIAEGKRRAGAAIVDGKRTVWASSLPEGTSAQKAELVALTQALRLAEGKDINIYTDSRYAFATAHIHGAIYKQRGWLTSAGKDIKNKEEILALLEAIHLPKRVAIIHCPGHQKGNDPVATGNRRADEAAKQAALSTRVLAETTKPAGKRTADGSEFEKRTADGSEFESPKKKAKVE

SEQ ID NO: 880 - protein, 2092 aa, synthetic construct
MPAAKRVKLDGGDKKYSIGLDIGTNSVGWAVITDEYKVPSKKFKVLGNTDRHSIKKNLIGALLFDSGETAEATRLKRTARRRYTRRKNRICYLQEIFSNEMAKVDDSFFHRLEESFLVEEDKKHERHPIFGNIVDEVAYHEKYPTIYHLRKKLVDSTDKADLRLIYLALAHMIKFRGHFLIEGDLNPDNSDVDKLFIQLVQTYNQLFEENPINASGVDAKAILSARLSKSRRLENLIAQLPGEKKNGLFGNLIALSLGLTPNFKSNFDLAEDAKLQLSKDTYDDDLDNLLAQIGDQYADLFLAAKNLSDAILLSDILRVNTEITKAPLSASMIKRYDEHHQDLTLLKALVRQQLPEKYKEIFFDQSKNGYAGYIDGGASQEEFYKFIKPILEKMDGTEELLVKLNREDLLRKQRTFDNGSIPHQIHLGELHAILRRQEDFYPFLKDNREKIEKILTFRIPYYVGPLARGNSRFAWMTRKSEETITPWNFEEVVDKGASAQSFIERMTNFDKNLPNEKVLPKHSLLYEYFTVYNELTKVKYVTEGMRKPAFLSGEQKKAIVDLLFKTNRKVTVKQLKEDYFKKIECFDSVEISGVEDRFNASLGTYHDLLKIIKDKDFLDNEENEDILEDIVLTLTLFEDREMIEERLKTYAHLFDDKVMKQLKRRRYTGWGRLSRKLINGIRDKQSGKTILDFLKSDGFANRNFMQLIHDDSLTFKEDIQKAQVSGQGDSLHEHIANLAGSPAIKKGILQTVKVVDELVKVMGRHKPENIVIEMARENQTTQKGQKNSRERMKRIEEGIKELGSQILKEHPVENTQLQNEKLYLYYLQNGRDMYVDQELDINRLSDYDVDHIVPQSFLKDDSIDNKVLTRSDKARGKSDNVPSEEVVKKMKNYWRQLLNAKLITQRKFDNLTKAERGGLSELDKAGFIKRQLVETRQITKHVAQILDSRMNTKYDENDKLIREVKVITLKSKLVSDFRKDFQFYKVREINNYHHAHDAYLNAVVGTALIKKYPKLESEFVYGDYKVYDVRKMIAKSEQEIGKATAKYFFYSNIMNFFKTEITLANGEIRKRPLIETNGETGEIVWDKGRDFATVRKVLSMPQVNIVKKTEVQTGGFSKESILPKRNSDKLIARKKDWDPKKYGGFDSPTVAYSVLVVAKVEKGKSKKLKSVKELLGITIMERSSFEKNPIDFLEAKGYKEVKKDLIIKLPKYSLFELENGRKRMLASAGELQKGNELALPSKYVNFLYLASHYEKLKGSPEDNEQKQLFVEQHKHYLDEIIEQISEFSKRVILADANLDKVLSAYNKHRDKPIREQAENIIHLFTLTNLGAPAAFKYFDTTIDRKRYTSTKEVLDATLIHQSITGLYETRIDLSQLGGDGGPAPGGSGSSGGVLNLEEEYRLHEKPVPSSIDPSWLQLFPTVWAERAGMGLANQVPPVVVELRSGASPVAVRQYPMSKEAREGIRPHIQRFLDLGVLVPCQSPWNTPLLPVKKPGTNDYRPVQDLREINKRVQDIHPTVPNPYNLLSSLPPSHTWYSVLDLKDAFFCLKLHPNSQPLFAFEWRDPEKGNTGQLTWTRLPQGFKNSPTLFNEALHRDLAPFRALNPQVVLLQYVDDLLVAAPTYRDCKEGTQKLLQELSKLGYRVSAKKAQLCQKEVTYLGYLLKEGKRWLTPARKATVMKIPPPTTPRQVREFLGKAGFCRLFIPGFASLAAPLYPLTKPSIPFIWTEEHQKAFDRIKEALLSAPALALPDLTKPFTLYVDERAGVARGVLTQTLGPWRRPVAYLSKKLDPVASGWPTCLKAVAAVALLLKDADKLTLGQNVTVIASHSLESIVRQPPDRWMTNARMTHYQSLLLNERVSFAPPAVLNPATLLPVESEATPVHRCSEILAEETGTRRDLKDQPLPGVPAWYTDGSSFIAEGKRRAGAAIVDGKRTVWASSLPEGTSAQKAELVALTQALRLAEGKDINIYTDSRYAFATAHIHGAIYKQRGWLTSAGKDIKNKEEILALLEAIHLPKRVAIIHCPGHQKGNDPVATGNRRADEAAKQAALSTRVLAETTKPAGKRTADGSEFEKRTADGSEFESPKKKAKVE

SEQ ID NO: 881 - protein, 2089 aa, synthetic construct
MPAAKRVKLDGGDKKYSIGLDIGTNSVGWAVITDEYKVPSKKFKVLGNTDRHSIKKNLIGALLFDSGETAEATRLKRTARRRYTRRKNRICYLQEIFSNEMAKVDDSFFHRLEESFLVEEDKKHERHPIFGNIVDEVAYHEKYPTIYHLRKKLVDSTDKADLRLIYLALAHMIKFRGHFLIEGDLNPDNSDVDKLFIQLVQTYNQLFEENPINASGVDAKAILSARLSKSRRLENLIAQLPGEKKNGLFGNLIALSLGLTPNFKSNFDLAEDAKLQLSKDTYDDDLDNLLAQIGDQYADLFLAAKNLSDAILLSDILRVNTEITKAPLSASMIKRYDEHHQDLTLLKALVRQQLPEKYKEIFFDQSKNGYAGYIDGGASQEEFYKFIKPILEKMDGTEELLVKLNREDLLRKQRTFDNGSIPHQIHLGELHAILRRQEDFYPFLKDNREKIEKILTFRIPYYVGPLARGNSRFAWMTRKSEETITPWNFEEVVDKGASAQSFIERMTNFDKNLPNEKVLPKHSLLYEYFTVYNELTKVKYVTEGMRKPAFLSGEQKKAIVDLLFKTNRKVTVKQLKEDYFKKIECFDSVEISGVEDRFNASLGTYHDLLKIIKDKDFLDNEENEDILEDIVLTLTLFEDREMIEERLKTYAHLFDDKVMKQLKRRRYTGWGRLSRKLINGIRDKQSGKTILDFLKSDGFANRNFMQLIHDDSLTFKEDIQKAQVSGQGDSLHEHIANLAGSPAIKKGILQTVKVVDELVKVMGRHKPENIVIEMARENQTTQKGQKNSRERMKRIEEGIKELGSQILKEHPVENTQLQNEKLYLYYLQNGRDMYVDQELDINRLSDYDVDHIVPQSFLKDDSIDNKVLTRSDKARGKSDNVPSEEVVKKMKNYWRQLLNAKLITQRKFDNLTKAERGGLSELDKAGFIKRQLVETRQITKHVAQILDSRMNTKYDENDKLIREVKVITLKSKLVSDFRKDFQFYKVREINNYHHAHDAYLNAVVGTALIKKYPKLESEFVYGDYKVYDVRKMIAKSEQEIGKATAKYFFYSNIMNFFKTEITLANGEIRKRPLIETNGETGEIVWDKGRDFATVRKVLSMPQVNIVKKTEVQTGGFSKESILPKRNSDKLIARKKDWDPKKYGGFDSPTVAYSVLVVAKVEKGKSKKLKSVKELLGITIMERSSFEKNPIDFLEAKGYKEVKKDLIIKLPKYSLFELENGRKRMLASAGELQKGNELALPSKYVNFLYLASHYEKLKGSPEDNEQKQLFVEQHKHYLDEIIEQISEFSKRVILADANLDKVLSAYNKHRDKPIREQAENIIHLFTLTNLGAPAAFKYFDTTIDRKRYTSTKEVLDATLIHQSITGLYETRIDLSQLGGDGGGGSGSSGGVLNLEEEYRLHEKPVPSSIDPSWLQLFPTVWAERAGMGLANQVPPVVVELRSGASPVAVRQYPMSKEAREGIRPHIQRFLDLGVLVPCQSPWNTPLLPVKKPGTNDYRPVQDLREINKRVQDIHPTVPNPYNLLSSLPPSHTWYSVLDLKDAFFCLKLHPNSQPLFAFEWRDPEKGNTGQLTWTRLPQGFKNSPTLFNEALHRDLAPFRALNPQVVLLQYVDDLLVAAPTYRDCKEGTQKLLQELSKLGYRVSAKKAQLCQKEVTYLGYLLKEGKRWLTPARKATVMKIPPPTTPRQVREFLGKAGFCRLFIPGFASLAAPLYPLTKPSIPFIWTEEHQKAFDRIKEALLSAPALALPDLTKPFTLYVDERAGVARGVLTQTLGPWRRPVAYLSKKLDPVASGWPTCLKAVAAVALLLKDADKLTLGQNVTVIASHSLESIVRQPPDRWMTNARMTHYQSLLLNERVSFAPPAVLNPATLLPVESEATPVHRCSEILAEETGTRRDLKDQPLPGVPAWYTDGSSFIAEGKRRAGAAIVDGKRTVWASSLPEGTSAQKAELVALTQALRLAEGKDINIYTDSRYAFATAHIHGAIYKQRGWLTSAGKDIKNKEEILALLEAIHLPKRVAIIHCPGHQKGNDPVATGNRRADEAAKQAALSTRVLAETTKPAGKRTADGSEFEKRTADGSEFESPKKKAKVE

SEQ ID NO: 882 - protein, 2089 aa, synthetic construct
MPAAKRVKLDGGDKKYSIGLDIGTNSVGWAVITDEYKVPSKKFKVLGNTDRHSIKKNLIGALLFDSGETAEATRLKRTARRRYTRRKNRICYLQEIFSNEMAKVDDSFFHRLEESFLVEEDKKHERHPIFGNIVDEVAYHEKYPTIYHLRKKLVDSTDKADLRLIYLALAHMIKFRGHFLIEGDLNPDNSDVDKLFIQLVQTYNQLFEENPINASGVDAKAILSARLSKSRRLENLIAQLPGEKKNGLFGNLIALSLGLTPNFKSNFDLAEDAKLQLSKDTYDDDLDNLLAQIGDQYADLFLAAKNLSDAILLSDILRVNTEITKAPLSASMIKRYDEHHQDLTLLKALVRQQLPEKYKEIFFDQSKNGYAGYIDGGASQEEFYKFIKPILEKMDGTEELLVKLNREDLLRKQRTFDNGSIPHQIHLGELHAILRRQEDFYPFLKDNREKIEKILTFRIPYYVGPLARGNSRFAWMTRKSEETITPWNFEEVVDKGASAQSFIERMTNFDKNLPNEKVLPKHSLLYEYFTVYNELTKVKYVTEGMRKPAFLSGEQKKAIVDLLFKTNRKVTVKQLKEDYFKKIECFDSVEISGVEDRFNASLGTYHDLLKIIKDKDFLDNEENEDILEDIVLTLTLFEDREMIEERLKTYAHLFDDKVMKQLKRRRYTGWGRLSRKLINGIRDKQSGKTILDFLKSDGFANRNFMQLIHDDSLTFKEDIQKAQVSGQGDSLHEHIANLAGSPAIKKGILQTVKVVDELVKVMGRHKPENIVIEMARENQTTQKGQKNSRERMKRIEEGIKELGSQILKEHPVENTQLQNEKLYLYYLQNGRDMYVDQELDINRLSDYDVDHIVPQSFLKDDSIDNKVLTRSDKARGKSDNVPSEEVVKKMKNYWRQLLNAKLITQRKFDNLTKAERGGLSELDKAGFIKRQLVETRQITKHVAQILDSRMNTKYDENDKLIREVKVITLKSKLVSDFRKDFQFYKVREINNYHHAHDAYLNAVVGTALIKKYPKLESEFVYGDYKVYDVRKMIAKSEQEIGKATAKYFFYSNIMNFFKTEITLANGEIRKRPLIETNGETGEIVWDKGRDFATVRKVLSMPQVNIVKKTEVQTGGFSKESILPKRNSDKLIARKKDWDPKKYGGFDSPTVAYSVLVVAKVEKGKSKKLKSVKELLGITIMERSSFEKNPIDFLEAKGYKEVKKDLIIKLPKYSLFELENGRKRMLASAGELQKGNELALPSKYVNFLYLASHYEKLKGSPEDNEQKQLFVEQHKHYLDEIIEQISEFSKRVILADANLDKVLSAYNKHRDKPIREQAENIIHLFTLTNLGAPAAFKYFDTTIDRKRYTSTKEVLDATLIHQSITGLYETRIDLSQLGGDGGGGGGGGGGVLNLEEEYRLHEKPVPSSIDPSWLQLFPTVWAERAGMGLANQVPPVVVELRSGASPVAVRQYPMSKEAREGIRPHIQRFLDLGVLVPCQSPWNTPLLPVKKPGTNDYRPVQDLREINKRVQDIHPTVPNPYNLLSSLPPSHTWYSVLDLKDAFFCLKLHPNSQPLFAFEWRDPEKGNTGQLTWTRLPQGFKNSPTLFNEALHRDLAPFRALNPQVVLLQYVDDLLVAAPTYRDCKEGTQKLLQELSKLGYRVSAKKAQLCQKEVTYLGYLLKEGKRWLTPARKATVMKIPPPTTPRQVREFLGKAGFCRLFIPGFASLAAPLYPLTKPSIPFIWTEEHQKAFDRIKEALLSAPALALPDLTKPFTLYVDERAGVARGVLTQTLGPWRRPVAYLSKKLDPVASGWPTCLKAVAAVALLLKDADKLTLGQNVTVIASHSLESIVRQPPDRWMTNARMTHYQSLLLNERVSFAPPAVLNPATLLPVESEATPVHRCSEILAEETGTRRDLKDQPLPGVPAWYTDGSSFIAEGKRRAGAAIVDGKRTVWASSLPEGTSAQKAELVALTQALRLAEGKDINIYTDSRYAFATAHIHGAIYKQRGWLTSAGKDIKNKEEILALLEAIHLPKRVAIIHCPGHQKGNDPVATGNRRADEAAKQAALSTRVLAETTKPAGKRTADGSEFEKRTADGSEFESPKKKAKVE

SEQ ID NO: 883 - protein, 2091 aa, synthetic construct
MPAAKRVKLDGGDKKYSIGLDIGTNSVGWAVITDEYKVPSKKFKVLGNTDRHSIKKNLIGALLFDSGETAEATRLKRTARRRYTRRKNRICYLQEIFSNEMAKVDDSFFHRLEESFLVEEDKKHERHPIFGNIVDEVAYHEKYPTIYHLRKKLVDSTDKADLRLIYLALAHMIKFRGHFLIEGDLNPDNSDVDKLFIQLVQTYNQLFEENPINASGVDAKAILSARLSKSRRLENLIAQLPGEKKNGLFGNLIALSLGLTPNFKSNFDLAEDAKLQLSKDTYDDDLDNLLAQIGDQYADLFLAAKNLSDAILLSDILRVNTEITKAPLSASMIKRYDEHHQDLTLLKALVRQQLPEKYKEIFFDQSKNGYAGYIDGGASQEEFYKFIKPILEKMDGTEELLVKLNREDLLRKQRTFDNGSIPHQIHLGELHAILRRQEDFYPFLKDNREKIEKILTFRIPYYVGPLARGNSRFAWMTRKSEETITPWNFEEVVDKGASAQSFIERMTNFDKNLPNEKVLPKHSLLYEYFTVYNELTKVKYVTEGMRKPAFLSGEQKKAIVDLLFKTNRKVTVKQLKEDYFKKIECFDSVEISGVEDRFNASLGTYHDLLKIIKDKDFLDNEENEDILEDIVLTLTLFEDREMIEERLKTYAHLFDDKVMKQLKRRRYTGWGRLSRKLINGIRDKQSGKTILDFLKSDGFANRNFMQLIHDDSLTFKEDIQKAQVSGQGDSLHEHIANLAGSPAIKKGILQTVKVVDELVKVMGRHKPENIVIEMARENQTTQKGQKNSRERMKRIEEGIKELGSQILKEHPVENTQLQNEKLYLYYLQNGRDMYVDQELDINRLSDYDVDHIVPQSFLKDDSIDNKVLTRSDKARGKSDNVPSEEVVKKMKNYWRQLLNAKLITQRKFDNLTKAERGGLSELDKAGFIKRQLVETRQITKHVAQILDSRMNTKYDENDKLIREVKVITLKSKLVSDFRKDFQFYKVREINNYHHAHDAYLNAVVGTALIKKYPKLESEFVYGDYKVYDVRKMIAKSEQEIGKATAKYFFYSNIMNFFKTEITLANGEIRKRPLIETNGETGEIVWDKGRDFATVRKVLSMPQVNIVKKTEVQTGGFSKESILPKRNSDKLIARKKDWDPKKYGGFDSPTVAYSVLVVAKVEKGKSKKLKSVKELLGITIMERSSFEKNPIDFLEAKGYKEVKKDLIIKLPKYSLFELENGRKRMLASAGELQKGNELALPSKYVNFLYLASHYEKLKGSPEDNEQKQLFVEQHKHYLDEIIEQISEFSKRVILADANLDKVLSAYNKHRDKPIREQAENIIHLFTLTNLGAPAAFKYFDTTIDRKRYTSTKEVLDATLIHQSITGLYETRIDLSQLGGDGGGSSEAAAKGGVLNLEEEYRLHEKPVPSSIDPSWLQLFPTVWAERAGMGLANQVPPVVVELRSGASPVAVRQYPMSKEAREGIRPHIQRFLDLGVLVPCQSPWNTPLLPVKKPGTNDYRPVQDLREINKRVQDIHPTVPNPYNLLSSLPPSHTWYSVLDLKDAFFCLKLHPNSQPLFAFEWRDPEKGNTGQLTWTRLPQGFKNSPTLFNEALHRDLAPFRALNPQVVLLQYVDDLLVAAPTYRDCKEGTQKLLQELSKLGYRVSAKKAQLCQKEVTYLGYLLKEGKRWLTPARKATVMKIPPPTTPRQVREFLGKAGFCRLFIPGFASLAAPLYPLTKPSIPFIWTEEHQKAFDRIKEALLSAPALALPDLTKPFTLYVDERAGVARGVLTQTLGPWRRPVAYLSKKLDPVASGWPTCLKAVAAVALLLKDADKLTLGQNVTVIASHSLESIVRQPPDRWMTNARMTHYQSLLLNERVSFAPPAVLNPATLLPVESEATPVHRCSEILAEETGTRRDLKDQPLPGVPAWYTDGSSFIAEGKRRAGAAIVDGKRTVWASSLPEGTSAQKAELVALTQALRLAEGKDINIYTDSRYAFATAHIHGAIYKQRGWLTSAGKDIKNKEEILALLEAIHLPKRVAIIHCPGHQKGNDPVATGNRRADEAAKQAALSTRVLAETTKPAGKRTADGSEFEKRTADGSEFESPKKKAKVE

SEQ ID NO: 884 - protein, 2089 aa, synthetic construct
MPAAKRVKLDGGDKKYSIGLDIGTNSVGWAVITDEYKVPSKKFKVLGNTDRHSIKKNLIGALLFDSGETAEATRLKRTARRRYTRRKNRICYLQEIFSNEMAKVDDSFFHRLEESFLVEEDKKHERHPIFGNIVDEVAYHEKYPTIYHLRKKLVDSTDKADLRLIYLALAHMIKFRGHFLIEGDLNPDNSDVDKLFIQLVQTYNQLFEENPINASGVDAKAILSARLSKSRRLENLIAQLPGEKKNGLFGNLIALSLGLTPNFKSNFDLAEDAKLQLSKDTYDDDLDNLLAQIGDQYADLFLAAKNLSDAILLSDILRVNTEITKAPLSASMIKRYDEHHQDLTLLKALVRQQLPEKYKEIFFDQSKNGYAGYIDGGASQEEFYKFIKPILEKMDGTEELLVKLNREDLLRKQRTFDNGSIPHQIHLGELHAILRRQEDFYPFLKDNREKIEKILTFRIPYYVGPLARGNSRFAWMTRKSEETITPWNFEEVVDKGASAQSFIERMTNFDKNLPNEKVLPKHSLLYEYFTVYNELTKVKYVTEGMRKPAFLSGEQKKAIVDLLFKTNRKVTVKQLKEDYFKKIECFDSVEISGVEDRFNASLGTYHDLLKIIKDKDFLDNEENEDILEDIVLTLTLFEDREMIEERLKTYAHLFDDKVMKQLKRRRYTGWGRLSRKLINGIRDKQSGKTILDFLKSDGFANRNFMQLIHDDSLTFKEDIQKAQVSGQGDSLHEHIANLAGSPAIKKGILQTVKVVDELVKVMGRHKPENIVIEMARENQTTQKGQKNSRERMKRIEEGIKELGSQILKEHPVENTQLQNEKLYLYYLQNGRDMYVDQELDINRLSDYDVDHIVPQSFLKDDSIDNKVLTRSDKARGKSDNVPSEEVVKKMKNYWRQLLNAKLITQRKFDNLTKAERGGLSELDKAGFIKRQLVETRQITKHVAQILDSRMNTKYDENDKLIREVKVITLKSKLVSDFRKDFQFYKVREINNYHHAHDAYLNAVVGTALIKKYPKLESEFVYGDYKVYDVRKMIAKSEQEIGKATAKYFFYSNIMNFFKTEITLANGEIRKRPLIETNGETGEIVWDKGRDFATVRKVLSMPQVNIVKKTEVQTGGFSKESILPKRNSDKLIARKKDWDPKKYGGFDSPTVAYSVLVVAKVEKGKSKKLKSVKELLGITIMERSSFEKNPIDFLEAKGYKEVKKDLIIKLPKYSLFELENGRKRMLASAGELQKGNELALPSKYVNFLYLASHYEKLKGSPEDNEQKQLFVEQHKHYLDEIIEQISEFSKRVILADANLDKVLSAYNKHRDKPIREQAENIIHLFTLTNLGAPAAFKYFDTTIDRKRYTSTKEVLDATLIHQSITGLYETRIDLSQLGGDGGGSSPAPGGVLNLEEEYRLHEKPVPSSIDPSWLQLFPTVWAERAGMGLANQVPPVVVELRSGASPVAVRQYPMSKEAREGIRPHIQRFLDLGVLVPCQSPWNTPLLPVKKPGTNDYRPVQDLREINKRVQDIHPTVPNPYNLLSSLPPSHTWYSVLDLKDAFFCLKLHPNSQPLFAFEWRDPEKGNTGQLTWTRLPQGFKNSPTLFNEALHRDLAPFRALNPQVVLLQYVDDLLVAAPTYRDCKEGTQKLLQELSKLGYRVSAKKAQLCQKEVTYLGYLLKEGKRWLTPARKATVMKIPPPTTPRQVREFLGKAGFCRLFIPGFASLAAPLYPLTKPSIPFIWTEEHQKAFDRIKEALLSAPALALPDLTKPFTLYVDERAGVARGVLTQTLGPWRRPVAYLSKKLDPVASGWPTCLKAVAAVALLLKDADKLTLGQNVTVIASHSLESIVRQPPDRWMTNARMTHYQSLLLNERVSFAPPAVLNPATLLPVESEATPVHRCSEILAEETGTRRDLKDQPLPGVPAWYTDGSSFIAEGKRRAGAAIVDGKRTVWASSLPEGTSAQKAELVALTQALRLAEGKDINIYTDSRYAFATAHIHGAIYKQRGWLTSAGKDIKNKEEILALLEAIHLPKRVAIIHCPGHQKGNDPVATGNRRADEAAKQAALSTRVLAETTKPAGKRTADGSEFEKRTADGSEFESPKKKAKVE

SEQ ID NO: 885 - protein, 2092 aa, synthetic construct
MPAAKRVKLDGGDKKYSIGLDIGTNSVGWAVITDEYKVPSKKFKVLGNTDRHSIKKNLIGALLFDSGETAEATRLKRTARRRYTRRKNRICYLQEIFSNEMAKVDDSFFHRLEESFLVEEDKKHERHPIFGNIVDEVAYHEKYPTIYHLRKKLVDSTDKADLRLIYLALAHMIKFRGHFLIEGDLNPDNSDVDKLFIQLVQTYNQLFEENPINASGVDAKAILSARLSKSRRLENLIAQLPGEKKNGLFGNLIALSLGLTPNFKSNFDLAEDAKLQLSKDTYDDDLDNLLAQIGDQYADLFLAAKNLSDAILLSDILRVNTEITKAPLSASMIKRYDEHHQDLTLLKALVRQQLPEKYKEIFFDQSKNGYAGYIDGGASQEEFYKFIKPILEKMDGTEELLVKLNREDLLRKQRTFDNGSIPHQIHLGELHAILRRQEDFYPFLKDNREKIEKILTFRIPYYVGPLARGNSRFAWMTRKSEETITPWNFEEVVDKGASAQSFIERMTNFDKNLPNEKVLPKHSLLYEYFTVYNELTKVKYVTEGMRKPAFLSGEQKKAIVDLLFKTNRKVTVKQLKEDYFKKIECFDSVEISGVEDRFNASLGTYHDLLKIIKDKDFLDNEENEDILEDIVLTLTLFEDREMIEERLKTYAHLFDDKVMKQLKRRRYTGWGRLSRKLINGIRDKQSGKTILDFLKSDGFANRNFMQLIHDDSLTFKEDIQKAQVSGQGDSLHEHIANLAGSPAIKKGILQTVKVVDELVKVMGRHKPENIVIEMARENQTTQKGQKNSRERMKRIEEGIKELGSQILKEHPVENTQLQNEKLYLYYLQNGRDMYVDQELDINRLSDYDVDHIVPQSFLKDDSIDNKVLTRSDKARGKSDNVPSEEVVKKMKNYWRQLLNAKLITQRKFDNLTKAERGGLSELDKAGFIKRQLVETRQITKHVAQILDSRMNTKYDENDKLIREVKVITLKSKLVSDFRKDFQFYKVREINNYHHAHDAYLNAVVGTALIKKYPKLESEFVYGDYKVYDVRKMIAKSEQEIGKATAKYFFYSNIMNFFKTEITLANGEIRKRPLIETNGETGEIVWDKGRDFATVRKVLSMPQVNIVKKTEVQTGGFSKESILPKRNSDKLIARKKDWDPKKYGGFDSPTVAYSVLVVAKVEKGKSKKLKSVKELLGITIMERSSFEKNPIDFLEAKGYKEVKKDLIIKLPKYSLFELENGRKRMLASAGELQKGNELALPSKYVNFLYLASHYEKLKGSPEDNEQKQLFVEQHKHYLDEIIEQISEFSKRVILADANLDKVLSAYNKHRDKPIREQAENIIHLFTLTNLGAPAAFKYFDTTIDRKRYTSTKEVLDATLIHQSITGLYETRIDLSQLGGDGGGGSGGSGGSGGVLNLEEEYRLHEKPVPSSIDPSWLQLFPTVWAERAGMGLANQVPPVVVELRSGASPVAVRQYPMSKEAREGIRPHIQRFLDLGVLVPCQSPWNTPLLPVKKPGTNDYRPVQDLREINKRVQDIHPTVPNPYNLLSSLPPSHTWYSVLDLKDAFFCLKLHPNSQPLFAFEWRDPEKGNTGQLTWTRLPQGFKNSPTLFNEALHRDLAPFRALNPQVVLLQYVDDLLVAAPTYRDCKEGTQKLLQELSKLGYRVSAKKAQLCQKEVTYLGYLLKEGKRWLTPARKATVMKIPPPTTPRQVREFLGKAGFCRLFIPGFASLAAPLYPLTKPSIPFIWTEEHQKAFDRIKEALLSAPALALPDLTKPFTLYVDERAGVARGVLTQTLGPWRRPVAYLSKKLDPVASGWPTCLKAVAAVALLLKDADKLTLGQNVTVIASHSLESIVRQPPDRWMTNARMTHYQSLLLNERVSFAPPAVLNPATLLPVESEATPVHRCSEILAEETGTRRDLKDQPLPGVPAWYTDGSSFIAEGKRRAGAAIVDGKRTVWASSLPEGTSAQKAELVALTQALRLAEGKDINIYTDSRYAFATAHIHGAIYKQRGWLTSAGKDIKNKEEILALLEAIHLPKRVAIIHCPGHQKGNDPVATGNRRADEAAKQAALSTRVLAETTKPAGKRTADGSEFEKRTADGSEFESPKKKAKVE

SEQ ID NO: 886 - protein, 2095 aa, synthetic construct
MPAAKRVKLDGGDKKYSIGLDIGTNSVGWAVITDEYKVPSKKFKVLGNTDRHSIKKNLIGALLFDSGETAEATRLKRTARRRYTRRKNRICYLQEIFSNEMAKVDDSFFHRLEESFLVEEDKKHERHPIFGNIVDEVAYHEKYPTIYHLRKKLVDSTDKADLRLIYLALAHMIKFRGHFLIEGDLNPDNSDVDKLFIQLVQTYNQLFEENPINASGVDAKAILSARLSKSRRLENLIAQLPGEKKNGLFGNLIALSLGLTPNFKSNFDLAEDAKLQLSKDTYDDDLDNLLAQIGDQYADLFLAAKNLSDAILLSDILRVNTEITKAPLSASMIKRYDEHHQDLTLLKALVRQQLPEKYKEIFFDQSKNGYAGYIDGGASQEEFYKFIKPILEKMDGTEELLVKLNREDLLRKQRTFDNGSIPHQIHLGELHAILRRQEDFYPFLKDNREKIEKILTFRIPYYVGPLARGNSRFAWMTRKSEETITPWNFEEVVDKGASAQSFIERMTNFDKNLPNEKVLPKHSLLYEYFTVYNELTKVKYVTEGMRKPAFLSGEQKKAIVDLLFKTNRKVTVKQLKEDYFKKIECFDSVEISGVEDRFNASLGTYHDLLKIIKDKDFLDNEENEDILEDIVLTLTLFEDREMIEERLKTYAHLFDDKVMKQLKRRRYTGWGRLSRKLINGIRDKQSGKTILDFLKSDGFANRNFMQLIHDDSLTFKEDIQKAQVSGQGDSLHEHIANLAGSPAIKKGILQTVKVVDELVKVMGRHKPENIVIEMARENQTTQKGQKNSRERMKRIEEGIKELGSQILKEHPVENTQLQNEKLYLYYLQNGRDMYVDQELDINRLSDYDVDHIVPQSFLKDDSIDNKVLTRSDKARGKSDNVPSEEVVKKMKNYWRQLLNAKLITQRKFDNLTKAERGGLSELDKAGFIKRQLVETRQITKHVAQILDSRMNTKYDENDKLIREVKVITLKSKLVSDFRKDFQFYKVREINNYHHAHDAYLNAVVGTALIKKYPKLESEFVYGDYKVYDVRKMIAKSEQEIGKATAKYFFYSNIMNFFKTEITLANGEIRKRPLIETNGETGEIVWDKGRDFATVRKVLSMPQVNIVKKTEVQTGGFSKESILPKRNSDKLIARKKDWDPKKYGGFDSPTVAYSVLVVAKVEKGKSKKLKSVKELLGITIMERSSFEKNPIDFLEAKGYKEVKKDLIIKLPKYSLFELENGRKRMLASAGELQKGNELALPSKYVNFLYLASHYEKLKGSPEDNEQKQLFVEQHKHYLDEIIEQISEFSKRVILADANLDKVLSAYNKHRDKPIREQAENIIHLFTLTNLGAPAAFKYFDTTIDRKRYTSTKEVLDATLIHQSITGLYETRIDLSQLGGDGGGGSGGSGGSGGSGGVLNLEEEYRLHEKPVPSSIDPSWLQLFPTVWAERAGMGLANQVPPVVVELRSGASPVAVRQYPMSKEAREGIRPHIQRFLDLGVLVPCQSPWNTPLLPVKKPGTNDYRPVQDLREINKRVQDIHPTVPNPYNLLSSLPPSHTWYSVLDLKDAFFCLKLHPNSQPLFAFEWRDPEKGNTGQLTWTRLPQGFKNSPTLFNEALHRDLAPFRALNPQVVLLQYVDDLLVAAPTYRDCKEGTQKLLQELSKLGYRVSAKKAQLCQKEVTYLGYLLKEGKRWLTPARKATVMKIPPPTTPRQVREFLGKAGFCRLFIPGFASLAAPLYPLTKPSIPFIWTEEHQKAFDRIKEALLSAPALALPDLTKPFTLYVDERAGVARGVLTQTLGPWRRPVAYLSKKLDPVASGWPTCLKAVAAVALLLKDADKLTLGQNVTVIASHSLESIVRQPPDRWMTNARMTHYQSLLLNERVSFAPPAVLNPATLLPVESEATPVHRCSEILAEETGTRRDLKDQPLPGVPAWYTDGSSFIAEGKRRAGAAIVDGKRTVWASSLPEGTSAQKAELVALTQALRLAEGKDINIYTDSRYAFATAHIHGAIYKQRGWLTSAGKDIKNKEEILALLEAIHLPKRVAIIHCPGHQKGNDPVATGNRRADEAAKQAALSTRVLAETTKPAGKRTADGSEFEKRTADGSEFESPKKKAKVE

SEQ ID NO: 887 - protein, 2095 aa, synthetic construct
MPAAKRVKLDGGDKKYSIGLDIGTNSVGWAVITDEYKVPSKKFKVLGNTDRHSIKKNLIGALLFDSGETAEATRLKRTARRRYTRRKNRICYLQEIFSNEMAKVDDSFFHRLEESFLVEEDKKHERHPIFGNIVDEVAYHEKYPTIYHLRKKLVDSTDKADLRLIYLALAHMIKFRGHFLIEGDLNPDNSDVDKLFIQLVQTYNQLFEENPINASGVDAKAILSARLSKSRRLENLIAQLPGEKKNGLFGNLIALSLGLTPNFKSNFDLAEDAKLQLSKDTYDDDLDNLLAQIGDQYADLFLAAKNLSDAILLSDILRVNTEITKAPLSASMIKRYDEHHQDLTLLKALVRQQLPEKYKEIFFDQSKNGYAGYIDGGASQEEFYKFIKPILEKMDGTEELLVKLNREDLLRKQRTFDNGSIPHQIHLGELHAILRRQEDFYPFLKDNREKIEKILTFRIPYYVGPLARGNSRFAWMTRKSEETITPWNFEEVVDKGASAQSFIERMTNFDKNLPNEKVLPKHSLLYEYFTVYNELTKVKYVTEGMRKPAFLSGEQKKAIVDLLFKTNRKVTVKQLKEDYFKKIECFDSVEISGVEDRFNASLGTYHDLLKIIKDKDFLDNEENEDILEDIVLTLTLFEDREMIEERLKTYAHLFDDKVMKQLKRRRYTGWGRLSRKLINGIRDKQSGKTILDFLKSDGFANRNFMQLIHDDSLTFKEDIQKAQVSGQGDSLHEHIANLAGSPAIKKGILQTVKVVDELVKVMGRHKPENIVIEMARENQTTQKGQKNSRERMKRIEEGIKELGSQILKEHPVENTQLQNEKLYLYYLQNGRDMYVDQELDINRLSDYDVDHIVPQSFLKDDSIDNKVLTRSDKARGKSDNVPSEEVVKKMKNYWRQLLNAKLITQRKFDNLTKAERGGLSELDKAGFIKRQLVETRQITKHVAQILDSRMNTKYDENDKLIREVKVITLKSKLVSDFRKDFQFYKVREINNYHHAHDAYLNAVVGTALIKKYPKLESEFVYGDYKVYDVRKMIAKSEQEIGKATAKYFFYSNIMNFFKTEITLANGEIRKRPLIETNGETGEIVWDKGRDFATVRKVLSMPQVNIVKKTEVQTGGFSKESILPKRNSDKLIARKKDWDPKKYGGFDSPTVAYSVLVVAKVEKGKSKKLKSVKELLGITIMERSSFEKNPIDFLEAKGYKEVKKDLIIKLPKYSLFELENGRKRMLASAGELQKGNELALPSKYVNFLYLASHYEKLKGSPEDNEQKQLFVEQHKHYLDEIIEQISEFSKRVILADANLDKVLSAYNKHRDKPIREQAENIIHLFTLTNLGAPAAFKYFDTTIDRKRYTSTKEVLDATLIHQSITGLYETRIDLSQLGGDGGGSSGSSGSSGSSGGVLNLEEEYRLHEKPVPSSIDPSWLQLFPTVWAERAGMGLANQVPPVVVELRSGASPVAVRQYPMSKEAREGIRPHIQRFLDLGVLVPCQSPWNTPLLPVKKPGTNDYRPVQDLREINKRVQDIHPTVPNPYNLLSSLPPSHTWYSVLDLKDAFFCLKLHPNSQPLFAFEWRDPEKGNTGQLTWTRLPQGFKNSPTLFNEALHRDLAPFRALNPQVVLLQYVDDLLVAAPTYRDCKEGTQKLLQELSKLGYRVSAKKAQLCQKEVTYLGYLLKEGKRWLTPARKATVMKIPPPTTPRQVREFLGKAGFCRLFIPGFASLAAPLYPLTKPSIPFIWTEEHQKAFDRIKEALLSAPALALPDLTKPFTLYVDERAGVARGVLTQTLGPWRRPVAYLSKKLDPVASGWPTCLKAVAAVALLLKDADKLTLGQNVTVIASHSLESIVRQPPDRWMTNARMTHYQSLLLNERVSFAPPAVLNPATLLPVESEATPVHRCSEILAEETGTRRDLKDQPLPGVPAWYTDGSSFIAEGKRRAGAAIVDGKRTVWASSLPEGTSAQKAELVALTQALRLAEGKDINIYTDSRYAFATAHIHGAIYKQRGWLTSAGKDIKNKEEILALLEAIHLPKRVAIIHCPGHQKGNDPVATGNRRADEAAKQAALSTRVLAETTKPAGKRTADGSEFEKRTADGSEFESPKKKAKVE

SEQ ID NO: 888 - protein, 2092 aa, synthetic construct
MPAAKRVKLDGGDKKYSIGLDIGTNSVGWAVITDEYKVPSKKFKVLGNTDRHSIKKNLIGALLFDSGETAEATRLKRTARRRYTRRKNRICYLQEIFSNEMAKVDDSFFHRLEESFLVEEDKKHERHPIFGNIVDEVAYHEKYPTIYHLRKKLVDSTDKADLRLIYLALAHMIKFRGHFLIEGDLNPDNSDVDKLFIQLVQTYNQLFEENPINASGVDAKAILSARLSKSRRLENLIAQLPGEKKNGLFGNLIALSLGLTPNFKSNFDLAEDAKLQLSKDTYDDDLDNLLAQIGDQYADLFLAAKNLSDAILLSDILRVNTEITKAPLSASMIKRYDEHHQDLTLLKALVRQQLPEKYKEIFFDQSKNGYAGYIDGGASQEEFYKFIKPILEKMDGTEELLVKLNREDLLRKQRTFDNGSIPHQIHLGELHAILRRQEDFYPFLKDNREKIEKILTFRIPYYVGPLARGNSRFAWMTRKSEETITPWNFEEVVDKGASAQSFIERMTNFDKNLPNEKVLPKHSLLYEYFTVYNELTKVKYVTEGMRKPAFLSGEQKKAIVDLLFKTNRKVTVKQLKEDYFKKIECFDSVEISGVEDRFNASLGTYHDLLKIIKDKDFLDNEENEDILEDIVLTLTLFEDREMIEERLKTYAHLFDDKVMKQLKRRRYTGWGRLSRKLINGIRDKQSGKTILDFLKSDGFANRNFMQLIHDDSLTFKEDIQKAQVSGQGDSLHEHIANLAGSPAIKKGILQTVKVVDELVKVMGRHKPENIVIEMARENQTTQKGQKNSRERMKRIEEGIKELGSQILKEHPVENTQLQNEKLYLYYLQNGRDMYVDQELDINRLSDYDVDHIVPQSFLKDDSIDNKVLTRSDKARGKSDNVPSEEVVKKMKNYWRQLLNAKLITQRKFDNLTKAERGGLSELDKAGFIKRQLVETRQITKHVAQILDSRMNTKYDENDKLIREVKVITLKSKLVSDFRKDFQFYKVREINNYHHAHDAYLNAVVGTALIKKYPKLESEFVYGDYKVYDVRKMIAKSEQEIGKATAKYFFYSNIMNFFKTEITLANGEIRKRPLIETNGETGEIVWDKGRDFATVRKVLSMPQVNIVKKTEVQTGGFSKESILPKRNSDKLIARKKDWDPKKYGGFDSPTVAYSVLVVAKVEKGKSKKLKSVKELLGITIMERSSFEKNPIDFLEAKGYKEVKKDLIIKLPKYSLFELENGRKRMLASAGELQKGNELALPSKYVNFLYLASHYEKLKGSPEDNEQKQLFVEQHKHYLDEIIEQISEFSKRVILADANLDKVLSAYNKHRDKPIREQAENIIHLFTLTNLGAPAAFKYFDTTIDRKRYTSTKEVLDATLIHQSITGLYETRIDLSQLGGDGGGGGGSSPAPGGVLNLEEEYRLHEKPVPSSIDPSWLQLFPTVWAERAGMGLANQVPPVVVELRSGASPVAVRQYPMSKEAREGIRPHIQRFLDLGVLVPCQSPWNTPLLPVKKPGTNDYRPVQDLREINKRVQDIHPTVPNPYNLLSSLPPSHTWYSVLDLKDAFFCLKLHPNSQPLFAFEWRDPEKGNTGQLTWTRLPQGFKNSPTLFNEALHRDLAPFRALNPQVVLLQYVDDLLVAAPTYRDCKEGTQKLLQELSKLGYRVSAKKAQLCQKEVTYLGYLLKEGKRWLTPARKATVMKIPPPTTPRQVREFLGKAGFCRLFIPGFASLAAPLYPLTKPSIPFIWTEEHQKAFDRIKEALLSAPALALPDLTKPFTLYVDERAGVARGVLTQTLGPWRRPVAYLSKKLDPVASGWPTCLKAVAAVALLLKDADKLTLGQNVTVIASHSLESIVRQPPDRWMTNARMTHYQSLLLNERVSFAPPAVLNPATLLPVESEATPVHRCSEILAEETGTRRDLKDQPLPGVPAWYTDGSSFIAEGKRRAGAAIVDGKRTVWASSLPEGTSAQKAELVALTQALRLAEGKDINIYTDSRYAFATAHIHGAIYKQRGWLTSAGKDIKNKEEILALLEAIHLPKRVAIIHCPGHQKGNDPVATGNRRADEAAKQAALSTRVLAETTKPAGKRTADGSEFEKRTADGSEFESPKKKAKVE

SEQ ID NO: 889 - protein, 2092 aa, synthetic construct
MPAAKRVKLDGGDKKYSIGLDIGTNSVGWAVITDEYKVPSKKFKVLGNTDRHSIKKNLIGALLFDSGETAEATRLKRTARRRYTRRKNRICYLQEIFSNEMAKVDDSFFHRLEESFLVEEDKKHERHPIFGNIVDEVAYHEKYPTIYHLRKKLVDSTDKADLRLIYLALAHMIKFRGHFLIEGDLNPDNSDVDKLFIQLVQTYNQLFEENPINASGVDAKAILSARLSKSRRLENLIAQLPGEKKNGLFGNLIALSLGLTPNFKSNFDLAEDAKLQLSKDTYDDDLDNLLAQIGDQYADLFLAAKNLSDAILLSDILRVNTEITKAPLSASMIKRYDEHHQDLTLLKALVRQQLPEKYKEIFFDQSKNGYAGYIDGGASQEEFYKFIKPILEKMDGTEELLVKLNREDLLRKQRTFDNGSIPHQIHLGELHAILRRQEDFYPFLKDNREKIEKILTFRIPYYVGPLARGNSRFAWMTRKSEETITPWNFEEVVDKGASAQSFIERMTNFDKNLPNEKVLPKHSLLYEYFTVYNELTKVKYVTEGMRKPAFLSGEQKKAIVDLLFKTNRKVTVKQLKEDYFKKIECFDSVEISGVEDRFNASLGTYHDLLKIIKDKDFLDNEENEDILEDIVLTLTLFEDREMIEERLKTYAHLFDDKVMKQLKRRRYTGWGRLSRKLINGIRDKQSGKTILDFLKSDGFANRNFMQLIHDDSLTFKEDIQKAQVSGQGDSLHEHIANLAGSPAIKKGILQTVKVVDELVKVMGRHKPENIVIEMARENQTTQKGQKNSRERMKRIEEGIKELGSQILKEHPVENTQLQNEKLYLYYLQNGRDMYVDQELDINRLSDYDVDHIVPQSFLKDDSIDNKVLTRSDKARGKSDNVPSEEVVKKMKNYWRQLLNAKLITQRKFDNLTKAERGGLSELDKAGFIKRQLVETRQITKHVAQILDSRMNTKYDENDKLIREVKVITLKSKLVSDFRKDFQFYKVREINNYHHAHDAYLNAVVGTALIKKYPKLESEFVYGDYKVYDVRKMIAKSEQEIGKATAKYFFYSNIMNFFKTEITLANGEIRKRPLIETNGETGEIVWDKGRDFATVRKVLSMPQVNIVKKTEVQTGGFSKESILPKRNSDKLIARKKDWDPKKYGGFDSPTVAYSVLVVAKVEKGKSKKLKSVKELLGITIMERSSFEKNPIDFLEAKGYKEVKKDLIIKLPKYSLFELENGRKRMLASAGELQKGNELALPSKYVNFLYLASHYEKLKGSPEDNEQKQLFVEQHKHYLDEIIEQISEFSKRVILADANLDKVLSAYNKHRDKPIREQAENIIHLFTLTNLGAPAAFKYFDTTIDRKRYTSTKEVLDATLIHQSITGLYETRIDLSQLGGDGGPAPGGSGGGGGVLNLEEEYRLHEKPVPSSIDPSWLQLFPTVWAERAGMGLANQVPPVVVELRSGASPVAVRQYPMSKEAREGIRPHIQRFLDLGVLVPCQSPWNTPLLPVKKPGTNDYRPVQDLREINKRVQDIHPTVPNPYNLLSSLPPSHTWYSVLDLKDAFFCLKLHPNSQPLFAFEWRDPEKGNTGQLTWTRLPQGFKNSPTLFNEALHRDLAPFRALNPQVVLLQYVDDLLVAAPTYRDCKEGTQKLLQELSKLGYRVSAKKAQLCQKEVTYLGYLLKEGKRWLTPARKATVMKIPPPTTPRQVREFLGKAGFCRLFIPGFASLAAPLYPLTKPSIPFIWTEEHQKAFDRIKEALLSAPALALPDLTKPFTLYVDERAGVARGVLTQTLGPWRRPVAYLSKKLDPVASGWPTCLKAVAAVALLLKDADKLTLGQNVTVIASHSLESIVRQPPDRWMTNARMTHYQSLLLNERVSFAPPAVLNPATLLPVESEATPVHRCSEILAEETGTRRDLKDQPLPGVPAWYTDGSSFIAEGKRRAGAAIVDGKRTVWASSLPEGTSAQKAELVALTQALRLAEGKDINIYTDSRYAFATAHIHGAIYKQRGWLTSAGKDIKNKEEILALLEAIHLPKRVAIIHCPGHQKGNDPVATGNRRADEAAKQAALSTRVLAETTKPAGKRTADGSEFEKRTADGSEFESPKKKAKVE

SEQ ID NO: 890 - protein, 2096 aa, synthetic construct
MPAAKRVKLDGGDKKYSIGLDIGTNSVGWAVITDEYKVPSKKFKVLGNTDRHSIKKNLIGALLFDSGETAEATRLKRTARRRYTRRKNRICYLQEIFSNEMAKVDDSFFHRLEESFLVEEDKKHERHPIFGNIVDEVAYHEKYPTIYHLRKKLVDSTDKADLRLIYLALAHMIKFRGHFLIEGDLNPDNSDVDKLFIQLVQTYNQLFEENPINASGVDAKAILSARLSKSRRLENLIAQLPGEKKNGLFGNLIALSLGLTPNFKSNFDLAEDAKLQLSKDTYDDDLDNLLAQIGDQYADLFLAAKNLSDAILLSDILRVNTEITKAPLSASMIKRYDEHHQDLTLLKALVRQQLPEKYKEIFFDQSKNGYAGYIDGGASQEEFYKFIKPILEKMDGTEELLVKLNREDLLRKQRTFDNGSIPHQIHLGELHAILRRQEDFYPFLKDNREKIEKILTFRIPYYVGPLARGNSRFAWMTRKSEETITPWNFEEVVDKGASAQSFIERMTNFDKNLPNEKVLPKHSLLYEYFTVYNELTKVKYVTEGMRKPAFLSGEQKKAIVDLLFKTNRKVTVKQLKEDYFKKIECFDSVEISGVEDRFNASLGTYHDLLKIIKDKDFLDNEENEDILEDIVLTLTLFEDREMIEERLKTYAHLFDDKVMKQLKRRRYTGWGRLSRKLINGIRDKQSGKTILDFLKSDGFANRNFMQLIHDDSLTFKEDIQKAQVSGQGDSLHEHIANLAGSPAIKKGILQTVKVVDELVKVMGRHKPENIVIEMARENQTTQKGQKNSRERMKRIEEGIKELGSQILKEHPVENTQLQNEKLYLYYLQNGRDMYVDQELDINRLSDYDVDHIVPQSFLKDDSIDNKVLTRSDKARGKSDNVPSEEVVKKMKNYWRQLLNAKLITQRKFDNLTKAERGGLSELDKAGFIKRQLVETRQITKHVAQILDSRMNTKYDENDKLIREVKVITLKSKLVSDFRKDFQFYKVREINNYHHAHDAYLNAVVGTALIKKYPKLESEFVYGDYKVYDVRKMIAKSEQEIGKATAKYFFYSNIMNFFKTEITLANGEIRKRPLIETNGETGEIVWDKGRDFATVRKVLSMPQVNIVKKTEVQTGGFSKESILPKRNSDKLIARKKDWDPKKYGGFDSPTVAYSVLVVAKVEKGKSKKLKSVKELLGITIMERSSFEKNPIDFLEAKGYKEVKKDLIIKLPKYSLFELENGRKRMLASAGELQKGNELALPSKYVNFLYLASHYEKLKGSPEDNEQKQLFVEQHKHYLDEIIEQISEFSKRVILADANLDKVLSAYNKHRDKPIREQAENIIHLFTLTNLGAPAAFKYFDTTIDRKRYTSTKEVLDATLIHQSITGLYETRIDLSQLGGDGGPAPAPAPAPAPAPGGVLNLEEEYRLHEKPVPSSIDPSWLQLFPTVWAERAGMGLANQVPPVVVELRSGASPVAVRQYPMSKEAREGIRPHIQRFLDLGVLVPCQSPWNTPLLPVKKPGTNDYRPVQDLREINKRVQDIHPTVPNPYNLLSSLPPSHTWYSVLDLKDAFFCLKLHPNSQPLFAFEWRDPEKGNTGQLTWTRLPQGFKNSPTLFNEALHRDLAPFRALNPQVVLLQYVDDLLVAAPTYRDCKEGTQKLLQELSKLGYRVSAKKAQLCQKEVTYLGYLLKEGKRWLTPARKATVMKIPPPTTPRQVREFLGKAGFCRLFIPGFASLAAPLYPLTKPSIPFIWTEEHQKAFDRIKEALLSAPALALPDLTKPFTLYVDERAGVARGVLTQTLGPWRRPVAYLSKKLDPVASGWPTCLKAVAAVALLLKDADKLTLGQNVTVIASHSLESIVRQPPDRWMTNARMTHYQSLLLNERVSFAPPAVLNPATLLPVESEATPVHRCSEILAEETGTRRDLKDQPLPGVPAWYTDGSSFIAEGKRRAGAAIVDGKRTVWASSLPEGTSAQKAELVALTQALRLAEGKDINIYTDSRYAFATAHIHGAIYKQRGWLTSAGKDIKNKEEILALLEAIHLPKRVAIIHCPGHQKGNDPVATGNRRADEAAKQAALSTRVLAETTKPAGKRTADGSEFEKRTADGSEFESPKKKAKVE

SEQ ID NO: 891 - protein, 2094 aa, synthetic construct
MPAAKRVKLDGGDKKYSIGLDIGTNSVGWAVITDEYKVPSKKFKVLGNTDRHSIKKNLIGALLFDSGETAEATRLKRTARRRYTRRKNRICYLQEIFSNEMAKVDDSFFHRLEESFLVEEDKKHERHPIFGNIVDEVAYHEKYPTIYHLRKKLVDSTDKADLRLIYLALAHMIKFRGHFLIEGDLNPDNSDVDKLFIQLVQTYNQLFEENPINASGVDAKAILSARLSKSRRLENLIAQLPGEKKNGLFGNLIALSLGLTPNFKSNFDLAEDAKLQLSKDTYDDDLDNLLAQIGDQYADLFLAAKNLSDAILLSDILRVNTEITKAPLSASMIKRYDEHHQDLTLLKALVRQQLPEKYKEIFFDQSKNGYAGYIDGGASQEEFYKFIKPILEKMDGTEELLVKLNREDLLRKQRTFDNGSIPHQIHLGELHAILRRQEDFYPFLKDNREKIEKILTFRIPYYVGPLARGNSRFAWMTRKSEETITPWNFEEVVDKGASAQSFIERMTNFDKNLPNEKVLPKHSLLYEYFTVYNELTKVKYVTEGMRKPAFLSGEQKKAIVDLLFKTNRKVTVKQLKEDYFKKIECFDSVEISGVEDRFNASLGTYHDLLKIIKDKDFLDNEENEDILEDIVLTLTLFEDREMIEERLKTYAHLFDDKVMKQLKRRRYTGWGRLSRKLINGIRDKQSGKTILDFLKSDGFANRNFMQLIHDDSLTFKEDIQKAQVSGQGDSLHEHIANLAGSPAIKKGILQTVKVVDELVKVMGRHKPENIVIEMARENQTTQKGQKNSRERMKRIEEGIKELGSQILKEHPVENTQLQNEKLYLYYLQNGRDMYVDQELDINRLSDYDVDHIVPQSFLKDDSIDNKVLTRSDKARGKSDNVPSEEVVKKMKNYWRQLLNAKLITQRKFDNLTKAERGGLSELDKAGFIKRQLVETRQITKHVAQILDSRMNTKYDENDKLIREVKVITLKSKLVSDFRKDFQFYKVREINNYHHAHDAYLNAVVGTALIKKYPKLESEFVYGDYKVYDVRKMIAKSEQEIGKATAKYFFYSNIMNFFKTEITLANGEIRKRPLIETNGETGEIVWDKGRDFATVRKVLSMPQVNIVKKTEVQTGGFSKESILPKRNSDKLIARKKDWDPKKYGGFDSPTVAYSVLVVAKVEKGKSKKLKSVKELLGITIMERSSFEKNPIDFLEAKGYKEVKKDLIIKLPKYSLFELENGRKRMLASAGELQKGNELALPSKYVNFLYLASHYEKLKGSPEDNEQKQLFVEQHKHYLDEIIEQISEFSKRVILADANLDKVLSAYNKHRDKPIREQAENIIHLFTLTNLGAPAAFKYFDTTIDRKRYTSTKEVLDATLIHQSITGLYETRIDLSQLGGDGGEAAAKGSSGGGGGVLNLEEEYRLHEKPVPSSIDPSWLQLFPTVWAERAGMGLANQVPPVVVELRSGASPVAVRQYPMSKEAREGIRPHIQRFLDLGVLVPCQSPWNTPLLPVKKPGTNDYRPVQDLREINKRVQDIHPTVPNPYNLLSSLPPSHTWYSVLDLKDAFFCLKLHPNSQPLFAFEWRDPEKGNTGQLTWTRLPQGFKNSPTLFNEALHRDLAPFRALNPQVVLLQYVDDLLVAAPTYRDCKEGTQKLLQELSKLGYRVSAKKAQLCQKEVTYLGYLLKEGKRWLTPARKATVMKIPPPTTPRQVREFLGKAGFCRLFIPGFASLAAPLYPLTKPSIPFIWTEEHQKAFDRIKEALLSAPALALPDLTKPFTLYVDERAGVARGVLTQTLGPWRRPVAYLSKKLDPVASGWPTCLKAVAAVALLLKDADKLTLGQNVTVIASHSLESIVRQPPDRWMTNARMTHYQSLLLNERVSFAPPAVLNPATLLPVESEATPVHRCSEILAEETGTRRDLKDQPLPGVPAWYTDGSSFIAEGKRRAGAAIVDGKRTVWASSLPEGTSAQKAELVALTQALRLAEGKDINIYTDSRYAFATAHIHGAIYKQRGWLTSAGKDIKNKEEILALLEAIHLPKRVAIIHCPGHQKGNDPVATGNRRADEAAKQAALSTRVLAETTKPAGKRTADGSEFEKRTADGSEFESPKKKAKVE

SEQ ID NO: 892 - protein, 2094 aa, synthetic construct
MPAAKRVKLDGGDKKYSIGLDIGTNSVGWAVITDEYKVPSKKFKVLGNTDRHSIKKNLIGALLFDSGETAEATRLKRTARRRYTRRKNRICYLQEIFSNEMAKVDDSFFHRLEESFLVEEDKKHERHPIFGNIVDEVAYHEKYPTIYHLRKKLVDSTDKADLRLIYLALAHMIKFRGHFLIEGDLNPDNSDVDKLFIQLVQTYNQLFEENPINASGVDAKAILSARLSKSRRLENLIAQLPGEKKNGLFGNLIALSLGLTPNFKSNFDLAEDAKLQLSKDTYDDDLDNLLAQIGDQYADLFLAAKNLSDAILLSDILRVNTEITKAPLSASMIKRYDEHHQDLTLLKALVRQQLPEKYKEIFFDQSKNGYAGYIDGGASQEEFYKFIKPILEKMDGTEELLVKLNREDLLRKQRTFDNGSIPHQIHLGELHAILRRQEDFYPFLKDNREKIEKILTFRIPYYVGPLARGNSRFAWMTRKSEETITPWNFEEVVDKGASAQSFIERMTNFDKNLPNEKVLPKHSLLYEYFTVYNELTKVKYVTEGMRKPAFLSGEQKKAIVDLLFKTNRKVTVKQLKEDYFKKIECFDSVEISGVEDRFNASLGTYHDLLKIIKDKDFLDNEENEDILEDIVLTLTLFEDREMIEERLKTYAHLFDDKVMKQLKRRRYTGWGRLSRKLINGIRDKQSGKTILDFLKSDGFANRNFMQLIHDDSLTFKEDIQKAQVSGQGDSLHEHIANLAGSPAIKKGILQTVKVVDELVKVMGRHKPENIVIEMARENQTTQKGQKNSRERMKRIEEGIKELGSQILKEHPVENTQLQNEKLYLYYLQNGRDMYVDQELDINRLSDYDVDHIVPQSFLKDDSIDNKVLTRSDKARGKSDNVPSEEVVKKMKNYWRQLLNAKLITQRKFDNLTKAERGGLSELDKAGFIKRQLVETRQITKHVAQILDSRMNTKYDENDKLIREVKVITLKSKLVSDFRKDFQFYKVREINNYHHAHDAYLNAVVGTALIKKYPKLESEFVYGDYKVYDVRKMIAKSEQEIGKATAKYFFYSNIMNFFKTEITLANGEIRKRPLIETNGETGEIVWDKGRDFATVRKVLSMPQVNIVKKTEVQTGGFSKESILPKRNSDKLIARKKDWDPKKYGGFDSPTVAYSVLVVAKVEKGKSKKLKSVKELLGITIMERSSFEKNPIDFLEAKGYKEVKKDLIIKLPKYSLFELENGRKRMLASAGELQKGNELALPSKYVNFLYLASHYEKLKGSPEDNEQKQLFVEQHKHYLDEIIEQISEFSKRVILADANLDKVLSAYNKHRDKPIREQAENIIHLFTLTNLGAPAAFKYFDTTIDRKRYTSTKEVLDATLIHQSITGLYETRIDLSQLGGDGGPAPEAAAKGSSGGVLNLEEEYRLHEKPVPSSIDPSWLQLFPTVWAERAGMGLANQVPPVVVELRSGASPVAVRQYPMSKEAREGIRPHIQRFLDLGVLVPCQSPWNTPLLPVKKPGTNDYRPVQDLREINKRVQDIHPTVPNPYNLLSSLPPSHTWYSVLDLKDAFFCLKLHPNSQPLFAFEWRDPEKGNTGQLTWTRLPQGFKNSPTLFNEALHRDLAPFRALNPQVVLLQYVDDLLVAAPTYRDCKEGTQKLLQELSKLGYRVSAKKAQLCQKEVTYLGYLLKEGKRWLTPARKATVMKIPPPTTPRQVREFLGKAGFCRLFIPGFASLAAPLYPLTKPSIPFIWTEEHQKAFDRIKEALLSAPALALPDLTKPFTLYVDERAGVARGVLTQTLGPWRRPVAYLSKKLDPVASGWPTCLKAVAAVALLLKDADKLTLGQNVTVIASHSLESIVRQPPDRWMTNARMTHYQSLLLNERVSFAPPAVLNPATLLPVESEATPVHRCSEILAEETGTRRDLKDQPLPGVPAWYTDGSSFIAEGKRRAGAAIVDGKRTVWASSLPEGTSAQKAELVALTQALRLAEGKDINIYTDSRYAFATAHIHGAIYKQRGWLTSAGKDIKNKEEILALLEAIHLPKRVAIIHCPGHQKGNDPVATGNRRADEAAKQAALSTRVLAETTKPAGKRTADGSEFEKRTADGSEFESPKKKAKVE

SEQ ID NO: 893 - protein, 2113 aa, synthetic construct
MPAAKRVKLDGGDKKYSIGLDIGTNSVGWAVITDEYKVPSKKFKVLGNTDRHSIKKNLIGALLFDSGETAEATRLKRTARRRYTRRKNRICYLQEIFSNEMAKVDDSFFHRLEESFLVEEDKKHERHPIFGNIVDEVAYHEKYPTIYHLRKKLVDSTDKADLRLIYLALAHMIKFRGHFLIEGDLNPDNSDVDKLFIQLVQTYNQLFEENPINASGVDAKAILSARLSKSRRLENLIAQLPGEKKNGLFGNLIALSLGLTPNFKSNFDLAEDAKLQLSKDTYDDDLDNLLAQIGDQYADLFLAAKNLSDAILLSDILRVNTEITKAPLSASMIKRYDEHHQDLTLLKALVRQQLPEKYKEIFFDQSKNGYAGYIDGGASQEEFYKFIKPILEKMDGTEELLVKLNREDLLRKQRTFDNGSIPHQIHLGELHAILRRQEDFYPFLKDNREKIEKILTFRIPYYVGPLARGNSRFAWMTRKSEETITPWNFEEVVDKGASAQSFIERMTNFDKNLPNEKVLPKHSLLYEYFTVYNELTKVKYVTEGMRKPAFLSGEQKKAIVDLLFKTNRKVTVKQLKEDYFKKIECFDSVEISGVEDRFNASLGTYHDLLKIIKDKDFLDNEENEDILEDIVLTLTLFEDREMIEERLKTYAHLFDDKVMKQLKRRRYTGWGRLSRKLINGIRDKQSGKTILDFLKSDGFANRNFMQLIHDDSLTFKEDIQKAQVSGQGDSLHEHIANLAGSPAIKKGILQTVKVVDELVKVMGRHKPENIVIEMARENQTTQKGQKNSRERMKRIEEGIKELGSQILKEHPVENTQLQNEKLYLYYLQNGRDMYVDQELDINRLSDYDVDHIVPQSFLKDDSIDNKVLTRSDKARGKSDNVPSEEVVKKMKNYWRQLLNAKLITQRKFDNLTKAERGGLSELDKAGFIKRQLVETRQITKHVAQILDSRMNTKYDENDKLIREVKVITLKSKLVSDFRKDFQFYKVREINNYHHAHDAYLNAVVGTALIKKYPKLESEFVYGDYKVYDVRKMIAKSEQEIGKATAKYFFYSNIMNFFKTEITLANGEIRKRPLIETNGETGEIVWDKGRDFATVRKVLSMPQVNIVKKTEVQTGGFSKESILPKRNSDKLIARKKDWDPKKYGGFDSPTVAYSVLVVAKVEKGKSKKLKSVKELLGITIMERSSFEKNPIDFLEAKGYKEVKKDLIIKLPKYSLFELENGRKRMLASAGELQKGNELALPSKYVNFLYLASHYEKLKGSPEDNEQKQLFVEQHKHYLDEIIEQISEFSKRVILADANLDKVLSAYNKHRDKPIREQAENIIHLFTLTNLGAPAAFKYFDTTIDRKRYTSTKEVLDATLIHQSITGLYETRIDLSQLGGDGGEAAAKEAAAKEAAAKEAAAKEAAAKEAAAKGGVLNLEEEYRLHEKPVPSSIDPSWLQLFPTVWAERAGMGLANQVPPVVVELRSGASPVAVRQYPMSKEAREGIRPHIQRFLDLGVLVPCQSPWNTPLLPVKKPGTNDYRPVQDLREINKRVQDIHPTVPNPYNLLSSLPPSHTWYSVLDLKDAFFCLKLHPNSQPLFAFEWRDPEKGNTGQLTWTRLPQGFKNSPTLFNEALHRDLAPFRALNPQVVLLQYVDDLLVAAPTYRDCKEGTQKLLQELSKLGYRVSAKKAQLCQKEVTYLGYLLKEGKRWLTPARKATVMKIPPPTTPRQVREFLGKAGFCRLFIPGFASLAAPLYPLTKPSIPFIWTEEHQKAFDRIKEALLSAPALALPDLTKPFTLYVDERAGVARGVLTQTLGPWRRPVAYLSKKLDPVASGWPTCLKAVAAVALLLKDADKLTLGQNVTVIASHSLESIVRQPPDRWMTNARMTHYQSLLLNERVSFAPPAVLNPATLLPVESEATPVHRCSEILAEETGTRRDLKDQPLPGVPAWYTDGSSFIAEGKRRAGAAIVDGKRTVWASSLPEGTSAQKAELVALTQALRLAEGKDINIYTDSRYAFATAHIHGAIYKQRGWLTSAGKDIKNKEEILALLEAIHLPKRVAIIHCPGHQKGNDPVATGNRRADEAAKQAALSTRVLAETTKPAGKRTADGSEFEKRTADGSEFESPKKKAKVE

SEQ ID NO: 894 - protein, 2088 aa, synthetic construct
MPAAKRVKLDGGDKKYSIGLDIGTNSVGWAVITDEYKVPSKKFKVLGNTDRHSIKKNLIGALLFDSGETAEATRLKRTARRRYTRRKNRICYLQEIFSNEMAKVDDSFFHRLEESFLVEEDKKHERHPIFGNIVDEVAYHEKYPTIYHLRKKLVDSTDKADLRLIYLALAHMIKFRGHFLIEGDLNPDNSDVDKLFIQLVQTYNQLFEENPINASGVDAKAILSARLSKSRRLENLIAQLPGEKKNGLFGNLIALSLGLTPNFKSNFDLAEDAKLQLSKDTYDDDLDNLLAQIGDQYADLFLAAKNLSDAILLSDILRVNTEITKAPLSASMIKRYDEHHQDLTLLKALVRQQLPEKYKEIFFDQSKNGYAGYIDGGASQEEFYKFIKPILEKMDGTEELLVKLNREDLLRKQRTFDNGSIPHQIHLGELHAILRRQEDFYPFLKDNREKIEKILTFRIPYYVGPLARGNSRFAWMTRKSEETITPWNFEEVVDKGASAQSFIERMTNFDKNLPNEKVLPKHSLLYEYFTVYNELTKVKYVTEGMRKPAFLSGEQKKAIVDLLFKTNRKVTVKQLKEDYFKKIECFDSVEISGVEDRFNASLGTYHDLLKIIKDKDFLDNEENEDILEDIVLTLTLFEDREMIEERLKTYAHLFDDKVMKQLKRRRYTGWGRLSRKLINGIRDKQSGKTILDFLKSDGFANRNFMQLIHDDSLTFKEDIQKAQVSGQGDSLHEHIANLAGSPAIKKGILQTVKVVDELVKVMGRHKPENIVIEMARENQTTQKGQKNSRERMKRIEEGIKELGSQILKEHPVENTQLQNEKLYLYYLQNGRDMYVDQELDINRLSDYDVDHIVPQSFLKDDSIDNKVLTRSDKARGKSDNVPSEEVVKKMKNYWRQLLNAKLITQRKFDNLTKAERGGLSELDKAGFIKRQLVETRQITKHVAQILDSRMNTKYDENDKLIREVKVITLKSKLVSDFRKDFQFYKVREINNYHHAHDAYLNAVVGTALIKKYPKLESEFVYGDYKVYDVRKMIAKSEQEIGKATAKYFFYSNIMNFFKTEITLANGEIRKRPLIETNGETGEIVWDKGRDFATVRKVLSMPQVNIVKKTEVQTGGFSKESILPKRNSDKLIARKKDWDPKKYGGFDSPTVAYSVLVVAKVEKGKSKKLKSVKELLGITIMERSSFEKNPIDFLEAKGYKEVKKDLIIKLPKYSLFELENGRKRMLASAGELQKGNELALPSKYVNFLYLASHYEKLKGSPEDNEQKQLFVEQHKHYLDEIIEQISEFSKRVILADANLDKVLSAYNKHRDKPIREQAENIIHLFTLTNLGAPAAFKYFDTTIDRKRYTSTKEVLDATLIHQSITGLYETRIDLSQLGGDGGEAAAKGGVLNLEEEYRLHEKPVPSSIDPSWLQLFPTVWAERAGMGLANQVPPVVVELRSGASPVAVRQYPMSKEAREGIRPHIQRFLDLGVLVPCQSPWNTPLLPVKKPGTNDYRPVQDLREINKRVQDIHPTVPNPYNLLSSLPPSHTWYSVLDLKDAFFCLKLHPNSQPLFAFEWRDPEKGNTGQLTWTRLPQGFKNSPTLFNEALHRDLAPFRALNPQVVLLQYVDDLLVAAPTYRDCKEGTQKLLQELSKLGYRVSAKKAQLCQKEVTYLGYLLKEGKRWLTPARKATVMKIPPPTTPRQVREFLGKAGFCRLFIPGFASLAAPLYPLTKPSIPFIWTEEHQKAFDRIKEALLSAPALALPDLTKPFTLYVDERAGVARGVLTQTLGPWRRPVAYLSKKLDPVASGWPTCLKAVAAVALLLKDADKLTLGQNVTVIASHSLESIVRQPPDRWMTNARMTHYQSLLLNERVSFAPPAVLNPATLLPVESEATPVHRCSEILAEETGTRRDLKDQPLPGVPAWYTDGSSFIAEGKRRAGAAIVDGKRTVWASSLPEGTSAQKAELVALTQALRLAEGKDINIYTDSRYAFATAHIHGAIYKQRGWLTSAGKDIKNKEEILALLEAIHLPKRVAIIHCPGHQKGNDPVATGNRRADEAAKQAALSTRVLAETTKPAGKRTADGSEFEKRTADGSEFESPKKKAKVE

SEQ ID NO: 895 - protein, 2088 aa, synthetic construct
MPAAKRVKLDGGDKKYSIGLDIGTNSVGWAVITDEYKVPSKKFKVLGNTDRHSIKKNLIGALLFDSGETAEATRLKRTARRRYTRRKNRICYLQEIFSNEMAKVDDSFFHRLEESFLVEEDKKHERHPIFGNIVDEVAYHEKYPTIYHLRKKLVDSTDKADLRLIYLALAHMIKFRGHFLIEGDLNPDNSDVDKLFIQLVQTYNQLFEENPINASGVDAKAILSARLSKSRRLENLIAQLPGEKKNGLFGNLIALSLGLTPNFKSNFDLAEDAKLQLSKDTYDDDLDNLLAQIGDQYADLFLAAKNLSDAILLSDILRVNTEITKAPLSASMIKRYDEHHQDLTLLKALVRQQLPEKYKEIFFDQSKNGYAGYIDGGASQEEFYKFIKPILEKMDGTEELLVKLNREDLLRKQRTFDNGSIPHQIHLGELHAILRRQEDFYPFLKDNREKIEKILTFRIPYYVGPLARGNSRFAWMTRKSEETITPWNFEEVVDKGASAQSFIERMTNFDKNLPNEKVLPKHSLLYEYFTVYNELTKVKYVTEGMRKPAFLSGEQKKAIVDLLFKTNRKVTVKQLKEDYFKKIECFDSVEISGVEDRFNASLGTYHDLLKIIKDKDFLDNEENEDILEDIVLTLTLFEDREMIEERLKTYAHLFDDKVMKQLKRRRYTGWGRLSRKLINGIRDKQSGKTILDFLKSDGFANRNFMQLIHDDSLTFKEDIQKAQVSGQGDSLHEHIANLAGSPAIKKGILQTVKVVDELVKVMGRHKPENIVIEMARENQTTQKGQKNSRERMKRIEEGIKELGSQILKEHPVENTQLQNEKLYLYYLQNGRDMYVDQELDINRLSDYDVDHIVPQSFLKDDSIDNKVLTRSDKARGKSDNVPSEEVVKKMKNYWRQLLNAKLITQRKFDNLTKAERGGLSELDKAGFIKRQLVETRQITKHVAQILDSRMNTKYDENDKLIREVKVITLKSKLVSDFRKDFQFYKVREINNYHHAHDAYLNAVVGTALIKKYPKLESEFVYGDYKVYDVRKMIAKSEQEIGKATAKYFFYSNIMNFFKTEITLANGEIRKRPLIETNGETGEIVWDKGRDFATVRKVLSMPQVNIVKKTEVQTGGFSKESILPKRNSDKLIARKKDWDPKKYGGFDSPTVAYSVLVVAKVEKGKSKKLKSVKELLGITIMERSSFEKNPIDFLEAKGYKEVKKDLIIKLPKYSLFELENGRKRMLASAGELQKGNELALPSKYVNFLYLASHYEKLKGSPEDNEQKQLFVEQHKHYLDEIIEQISEFSKRVILADANLDKVLSAYNKHRDKPIREQAENIIHLFTLTNLGAPAAFKYFDTTIDRKRYTSTKEVLDATLIHQSITGLYETRIDLSQLGGDGGGGGGGGGVLNLEEEYRLHEKPVPSSIDPSWLQLFPTVWAERAGMGLANQVPPVVVELRSGASPVAVRQYPMSKEAREGIRPHIQRFLDLGVLVPCQSPWNTPLLPVKKPGTNDYRPVQDLREINKRVQDIHPTVPNPYNLLSSLPPSHTWYSVLDLKDAFFCLKLHPNSQPLFAFEWRDPEKGNTGQLTWTRLPQGFKNSPTLFNEALHRDLAPFRALNPQVVLLQYVDDLLVAAPTYRDCKEGTQKLLQELSKLGYRVSAKKAQLCQKEVTYLGYLLKEGKRWLTPARKATVMKIPPPTTPRQVREFLGKAGFCRLFIPGFASLAAPLYPLTKPSIPFIWTEEHQKAFDRIKEALLSAPALALPDLTKPFTLYVDERAGVARGVLTQTLGPWRRPVAYLSKKLDPVASGWPTCLKAVAAVALLLKDADKLTLGQNVTVIASHSLESIVRQPPDRWMTNARMTHYQSLLLNERVSFAPPAVLNPATLLPVESEATPVHRCSEILAEETGTRRDLKDQPLPGVPAWYTDGSSFIAEGKRRAGAAIVDGKRTVWASSLPEGTSAQKAELVALTQALRLAEGKDINIYTDSRYAFATAHIHGAIYKQRGWLTSAGKDIKNKEEILALLEAIHLPKRVAIIHCPGHQKGNDPVATGNRRADEAAKQAALSTRVLAETTKPAGKRTADGSEFEKRTADGSEFESPKKKAKVE

SEQ ID NO: 896 - protein, 2094 aa, synthetic construct
MPAAKRVKLDGGDKKYSIGLDIGTNSVGWAVITDEYKVPSKKFKVLGNTDRHSIKKNLIGALLFDSGETAEATRLKRTARRRYTRRKNRICYLQEIFSNEMAKVDDSFFHRLEESFLVEEDKKHERHPIFGNIVDEVAYHEKYPTIYHLRKKLVDSTDKADLRLIYLALAHMIKFRGHFLIEGDLNPDNSDVDKLFIQLVQTYNQLFEENPINASGVDAKAILSARLSKSRRLENLIAQLPGEKKNGLFGNLIALSLGLTPNFKSNFDLAEDAKLQLSKDTYDDDLDNLLAQIGDQYADLFLAAKNLSDAILLSDILRVNTEITKAPLSASMIKRYDEHHQDLTLLKALVRQQLPEKYKEIFFDQSKNGYAGYIDGGASQEEFYKFIKPILEKMDGTEELLVKLNREDLLRKQRTFDNGSIPHQIHLGELHAILRRQEDFYPFLKDNREKIEKILTFRIPYYVGPLARGNSRFAWMTRKSEETITPWNFEEVVDKGASAQSFIERMTNFDKNLPNEKVLPKHSLLYEYFTVYNELTKVKYVTEGMRKPAFLSGEQKKAIVDLLFKTNRKVTVKQLKEDYFKKIECFDSVEISGVEDRFNASLGTYHDLLKIIKDKDFLDNEENEDILEDIVLTLTLFEDREMIEERLKTYAHLFDDKVMKQLKRRRYTGWGRLSRKLINGIRDKQSGKTILDFLKSDGFANRNFMQLIHDDSLTFKEDIQKAQVSGQGDSLHEHIANLAGSPAIKKGILQTVKVVDELVKVMGRHKPENIVIEMARENQTTQKGQKNSRERMKRIEEGIKELGSQILKEHPVENTQLQNEKLYLYYLQNGRDMYVDQELDINRLSDYDVDHIVPQSFLKDDSIDNKVLTRSDKARGKSDNVPSEEVVKKMKNYWRQLLNAKLITQRKFDNLTKAERGGLSELDKAGFIKRQLVETRQITKHVAQILDSRMNTKYDENDKLIREVKVITLKSKLVSDFRKDFQFYKVREINNYHHAHDAYLNAVVGTALIKKYPKLESEFVYGDYKVYDVRKMIAKSEQEIGKATAKYFFYSNIMNFFKTEITLANGEIRKRPLIETNGETGEIVWDKGRDFATVRKVLSMPQVNIVKKTEVQTGGFSKESILPKRNSDKLIARKKDWDPKKYGGFDSPTVAYSVLVVAKVEKGKSKKLKSVKELLGITIMERSSFEKNPIDFLEAKGYKEVKKDLIIKLPKYSLFELENGRKRMLASAGELQKGNELALPSKYVNFLYLASHYEKLKGSPEDNEQKQLFVEQHKHYLDEIIEQISEFSKRVILADANLDKVLSAYNKHRDKPIREQAENIIHLFTLTNLGAPAAFKYFDTTIDRKRYTSTKEVLDATLIHQSITGLYETRIDLSQLGGDGGPAPEAAAKGGGGGVLNLEEEYRLHEKPVPSSIDPSWLQLFPTVWAERAGMGLANQVPPVVVELRSGASPVAVRQYPMSKEAREGIRPHIQRFLDLGVLVPCQSPWNTPLLPVKKPGTNDYRPVQDLREINKRVQDIHPTVPNPYNLLSSLPPSHTWYSVLDLKDAFFCLKLHPNSQPLFAFEWRDPEKGNTGQLTWTRLPQGFKNSPTLFNEALHRDLAPFRALNPQVVLLQYVDDLLVAAPTYRDCKEGTQKLLQELSKLGYRVSAKKAQLCQKEVTYLGYLLKEGKRWLTPARKATVMKIPPPTTPRQVREFLGKAGFCRLFIPGFASLAAPLYPLTKPSIPFIWTEEHQKAFDRIKEALLSAPALALPDLTKPFTLYVDERAGVARGVLTQTLGPWRRPVAYLSKKLDPVASGWPTCLKAVAAVALLLKDADKLTLGQNVTVIASHSLESIVRQPPDRWMTNARMTHYQSLLLNERVSFAPPAVLNPATLLPVESEATPVHRCSEILAEETGTRRDLKDQPLPGVPAWYTDGSSFIAEGKRRAGAAIVDGKRTVWASSLPEGTSAQKAELVALTQALRLAEGKDINIYTDSRYAFATAHIHGAIYKQRGWLTSAGKDIKNKEEILALLEAIHLPKRVAIIHCPGHQKGNDPVATGNRRADEAAKQAALSTRVLAETTKPAGKRTADGSEFEKRTADGSEFESPKKKAKVE

SEQ ID NO: 897 - protein, 2091 aa, synthetic construct
MPAAKRVKLDGGDKKYSIGLDIGTNSVGWAVITDEYKVPSKKFKVLGNTDRHSIKKNLIGALLFDSGETAEATRLKRTARRRYTRRKNRICYLQEIFSNEMAKVDDSFFHRLEESFLVEEDKKHERHPIFGNIVDEVAYHEKYPTIYHLRKKLVDSTDKADLRLIYLALAHMIKFRGHFLIEGDLNPDNSDVDKLFIQLVQTYNQLFEENPINASGVDAKAILSARLSKSRRLENLIAQLPGEKKNGLFGNLIALSLGLTPNFKSNFDLAEDAKLQLSKDTYDDDLDNLLAQIGDQYADLFLAAKNLSDAILLSDILRVNTEITKAPLSASMIKRYDEHHQDLTLLKALVRQQLPEKYKEIFFDQSKNGYAGYIDGGASQEEFYKFIKPILEKMDGTEELLVKLNREDLLRKQRTFDNGSIPHQIHLGELHAILRRQEDFYPFLKDNREKIEKILTFRIPYYVGPLARGNSRFAWMTRKSEETITPWNFEEVVDKGASAQSFIERMTNFDKNLPNEKVLPKHSLLYEYFTVYNELTKVKYVTEGMRKPAFLSGEQKKAIVDLLFKTNRKVTVKQLKEDYFKKIECFDSVEISGVEDRFNASLGTYHDLLKIIKDKDFLDNEENEDILEDIVLTLTLFEDREMIEERLKTYAHLFDDKVMKQLKRRRYTGWGRLSRKLINGIRDKQSGKTILDFLKSDGFANRNFMQLIHDDSLTFKEDIQKAQVSGQGDSLHEHIANLAGSPAIKKGILQTVKVVDELVKVMGRHKPENIVIEMARENQTTQKGQKNSRERMKRIEEGIKELGSQILKEHPVENTQLQNEKLYLYYLQNGRDMYVDQELDINRLSDYDVDHIVPQSFLKDDSIDNKVLTRSDKARGKSDNVPSEEVVKKMKNYWRQLLNAKLITQRKFDNLTKAERGGLSELDKAGFIKRQLVETRQITKHVAQILDSRMNTKYDENDKLIREVKVITLKSKLVSDFRKDFQFYKVREINNYHHAHDAYLNAVVGTALIKKYPKLESEFVYGDYKVYDVRKMIAKSEQEIGKATAKYFFYSNIMNFFKTEITLANGEIRKRPLIETNGETGEIVWDKGRDFATVRKVLSMPQVNIVKKTEVQTGGFSKESILPKRNSDKLIARKKDWDPKKYGGFDSPTVAYSVLVVAKVEKGKSKKLKSVKELLGITIMERSSFEKNPIDFLEAKGYKEVKKDLIIKLPKYSLFELENGRKRMLASAGELQKGNELALPSKYVNFLYLASHYEKLKGSPEDNEQKQLFVEQHKHYLDEIIEQISEFSKRVILADANLDKVLSAYNKHRDKPIREQAENIIHLFTLTNLGAPAAFKYFDTTIDRKRYTSTKEVLDATLIHQSITGLYETRIDLSQLGGDGGEAAAKGGSGGVLNLEEEYRLHEKPVPSSIDPSWLQLFPTVWAERAGMGLANQVPPVVVELRSGASPVAVRQYPMSKEAREGIRPHIQRFLDLGVLVPCQSPWNTPLLPVKKPGTNDYRPVQDLREINKRVQDIHPTVPNPYNLLSSLPPSHTWYSVLDLKDAFFCLKLHPNSQPLFAFEWRDPEKGNTGQLTWTRLPQGFKNSPTLFNEALHRDLAPFRALNPQVVLLQYVDDLLVAAPTYRDCKEGTQKLLQELSKLGYRVSAKKAQLCQKEVTYLGYLLKEGKRWLTPARKATVMKIPPPTTPRQVREFLGKAGFCRLFIPGFASLAAPLYPLTKPSIPFIWTEEHQKAFDRIKEALLSAPALALPDLTKPFTLYVDERAGVARGVLTQTLGPWRRPVAYLSKKLDPVASGWPTCLKAVAAVALLLKDADKLTLGQNVTVIASHSLESIVRQPPDRWMTNARMTHYQSLLLNERVSFAPPAVLNPATLLPVESEATPVHRCSEILAEETGTRRDLKDQPLPGVPAWYTDGSSFIAEGKRRAGAAIVDGKRTVWASSLPEGTSAQKAELVALTQALRLAEGKDINIYTDSRYAFATAHIHGAIYKQRGWLTSAGKDIKNKEEILALLEAIHLPKRVAIIHCPGHQKGNDPVATGNRRADEAAKQAALSTRVLAETTKPAGKRTADGSEFEKRTADGSEFESPKKKAKVE

SEQ ID NO: 898 - protein, 2094 aa, synthetic construct
MPAAKRVKLDGGDKKYSIGLDIGTNSVGWAVITDEYKVPSKKFKVLGNTDRHSIKKNLIGALLFDSGETAEATRLKRTARRRYTRRKNRICYLQEIFSNEMAKVDDSFFHRLEESFLVEEDKKHERHPIFGNIVDEVAYHEKYPTIYHLRKKLVDSTDKADLRLIYLALAHMIKFRGHFLIEGDLNPDNSDVDKLFIQLVQTYNQLFEENPINASGVDAKAILSARLSKSRRLENLIAQLPGEKKNGLFGNLIALSLGLTPNFKSNFDLAEDAKLQLSKDTYDDDLDNLLAQIGDQYADLFLAAKNLSDAILLSDILRVNTEITKAPLSASMIKRYDEHHQDLTLLKALVRQQLPEKYKEIFFDQSKNGYAGYIDGGASQEEFYKFIKPILEKMDGTEELLVKLNREDLLRKQRTFDNGSIPHQIHLGELHAILRRQEDFYPFLKDNREKIEKILTFRIPYYVGPLARGNSRFAWMTRKSEETITPWNFEEVVDKGASAQSFIERMTNFDKNLPNEKVLPKHSLLYEYFTVYNELTKVKYVTEGMRKPAFLSGEQKKAIVDLLFKTNRKVTVKQLKEDYFKKIECFDSVEISGVEDRFNASLGTYHDLLKIIKDKDFLDNEENEDILEDIVLTLTLFEDREMIEERLKTYAHLFDDKVMKQLKRRRYTGWGRLSRKLINGIRDKQSGKTILDFLKSDGFANRNFMQLIHDDSLTFKEDIQKAQVSGQGDSLHEHIANLAGSPAIKKGILQTVKVVDELVKVMGRHKPENIVIEMARENQTTQKGQKNSRERMKRIEEGIKELGSQILKEHPVENTQLQNEKLYLYYLQNGRDMYVDQELDINRLSDYDVDHIVPQSFLKDDSIDNKVLTRSDKARGKSDNVPSEEVVKKMKNYWRQLLNAKLITQRKFDNLTKAERGGLSELDKAGFIKRQLVETRQITKHVAQILDSRMNTKYDENDKLIREVKVITLKSKLVSDFRKDFQFYKVREINNYHHAHDAYLNAVVGTALIKKYPKLESEFVYGDYKVYDVRKMIAKSEQEIGKATAKYFFYSNIMNFFKTEITLANGEIRKRPLIETNGETGEIVWDKGRDFATVRKVLSMPQVNIVKKTEVQTGGFSKESILPKRNSDKLIARKKDWDPKKYGGFDSPTVAYSVLVVAKVEKGKSKKLKSVKELLGITIMERSSFEKNPIDFLEAKGYKEVKKDLIIKLPKYSLFELENGRKRMLASAGELQKGNELALPSKYVNFLYLASHYEKLKGSPEDNEQKQLFVEQHKHYLDEIIEQISEFSKRVILADANLDKVLSAYNKHRDKPIREQAENIIHLFTLTNLGAPAAFKYFDTTIDRKRYTSTKEVLDATLIHQSITGLYETRIDLSQLGGDGGGGSPAPEAAAKGGVLNLEEEYRLHEKPVPSSIDPSWLQLFPTVWAERAGMGLANQVPPVVVELRSGASPVAVRQYPMSKEAREGIRPHIQRFLDLGVLVPCQSPWNTPLLPVKKPGTNDYRPVQDLREINKRVQDIHPTVPNPYNLLSSLPPSHTWYSVLDLKDAFFCLKLHPNSQPLFAFEWRDPEKGNTGQLTWTRLPQGFKNSPTLFNEALHRDLAPFRALNPQVVLLQYVDDLLVAAPTYRDCKEGTQKLLQELSKLGYRVSAKKAQLCQKEVTYLGYLLKEGKRWLTPARKATVMKIPPPTTPRQVREFLGKAGFCRLFIPGFASLAAPLYPLTKPSIPFIWTEEHQKAFDRIKEALLSAPALALPDLTKPFTLYVDERAGVARGVLTQTLGPWRRPVAYLSKKLDPVASGWPTCLKAVAAVALLLKDADKLTLGQNVTVIASHSLESIVRQPPDRWMTNARMTHYQSLLLNERVSFAPPAVLNPATLLPVESEATPVHRCSEILAEETGTRRDLKDQPLPGVPAWYTDGSSFIAEGKRRAGAAIVDGKRTVWASSLPEGTSAQKAELVALTQALRLAEGKDINIYTDSRYAFATAHIHGAIYKQRGWLTSAGKDIKNKEEILALLEAIHLPKRVAIIHCPGHQKGNDPVATGNRRADEAAKQAALSTRVLAETTKPAGKRTADGSEFEKRTADGSEFESPKKKAKVE

SEQ ID NO: 899 - protein, 2101 aa, synthetic construct
MPAAKRVKLDGGDKKYSIGLDIGTNSVGWAVITDEYKVPSKKFKVLGNTDRHSIKKNLIGALLFDSGETAEATRLKRTARRRYTRRKNRICYLQEIFSNEMAKVDDSFFHRLEESFLVEEDKKHERHPIFGNIVDEVAYHEKYPTIYHLRKKLVDSTDKADLRLIYLALAHMIKFRGHFLIEGDLNPDNSDVDKLFIQLVQTYNQLFEENPINASGVDAKAILSARLSKSRRLENLIAQLPGEKKNGLFGNLIALSLGLTPNFKSNFDLAEDAKLQLSKDTYDDDLDNLLAQIGDQYADLFLAAKNLSDAILLSDILRVNTEITKAPLSASMIKRYDEHHQDLTLLKALVRQQLPEKYKEIFFDQSKNGYAGYIDGGASQEEFYKFIKPILEKMDGTEELLVKLNREDLLRKQRTFDNGSIPHQIHLGELHAILRRQEDFYPFLKDNREKIEKILTFRIPYYVGPLARGNSRFAWMTRKSEETITPWNFEEVVDKGASAQSFIERMTNFDKNLPNEKVLPKHSLLYEYFTVYNELTKVKYVTEGMRKPAFLSGEQKKAIVDLLFKTNRKVTVKQLKEDYFKKIECFDSVEISGVEDRFNASLGTYHDLLKIIKDKDFLDNEENEDILEDIVLTLTLFEDREMIEERLKTYAHLFDDKVMKQLKRRRYTGWGRLSRKLINGIRDKQSGKTILDFLKSDGFANRNFMQLIHDDSLTFKEDIQKAQVSGQGDSLHEHIANLAGSPAIKKGILQTVKVVDELVKVMGRHKPENIVIEMARENQTTQKGQKNSRERMKRIEEGIKELGSQILKEHPVENTQLQNEKLYLYYLQNGRDMYVDQELDINRLSDYDVDHIVPQSFLKDDSIDNKVLTRSDKARGKSDNVPSEEVVKKMKNYWRQLLNAKLITQRKFDNLTKAERGGLSELDKAGFIKRQLVETRQITKHVAQILDSRMNTKYDENDKLIREVKVITLKSKLVSDFRKDFQFYKVREINNYHHAHDAYLNAVVGTALIKKYPKLESEFVYGDYKVYDVRKMIAKSEQEIGKATAKYFFYSNIMNFFKTEITLANGEIRKRPLIETNGETGEIVWDKGRDFATVRKVLSMPQVNIVKKTEVQTGGFSKESILPKRNSDKLIARKKDWDPKKYGGFDSPTVAYSVLVVAKVEKGKSKKLKSVKELLGITIMERSSFEKNPIDFLEAKGYKEVKKDLIIKLPKYSLFELENGRKRMLASAGELQKGNELALPSKYVNFLYLASHYEKLKGSPEDNEQKQLFVEQHKHYLDEIIEQISEFSKRVILADANLDKVLSAYNKHRDKPIREQAENIIHLFTLTNLGAPAAFKYFDTTIDRKRYTSTKEVLDATLIHQSITGLYETRIDLSQLGGDGGGGSGGSGGSGGSGGSGGSGGVLNLEEEYRLHEKPVPSSIDPSWLQLFPTVWAERAGMGLANQVPPVVVELRSGASPVAVRQYPMSKEAREGIRPHIQRFLDLGVLVPCQSPWNTPLLPVKKPGTNDYRPVQDLREINKRVQDIHPTVPNPYNLLSSLPPSHTWYSVLDLKDAFFCLKLHPNSQPLFAFEWRDPEKGNTGQLTWTRLPQGFKNSPTLFNEALHRDLAPFRALNPQVVLLQYVDDLLVAAPTYRDCKEGTQKLLQELSKLGYRVSAKKAQLCQKEVTYLGYLLKEGKRWLTPARKATVMKIPPPTTPRQVREFLGKAGFCRLFIPGFASLAAPLYPLTKPSIPFIWTEEHQKAFDRIKEALLSAPALALPDLTKPFTLYVDERAGVARGVLTQTLGPWRRPVAYLSKKLDPVASGWPTCLKAVAAVALLLKDADKLTLGQNVTVIASHSLESIVRQPPDRWMTNARMTHYQSLLLNERVSFAPPAVLNPATLLPVESEATPVHRCSEILAEETGTRRDLKDQPLPGVPAWYTDGSSFIAEGKRRAGAAIVDGKRTVWASSLPEGTSAQKAELVALTQALRLAEGKDINIYTDSRYAFATAHIHGAIYKQRGWLTSAGKDIKNKEEILALLEAIHLPKRVAIIHCPGHQKGNDPVATGNRRADEAAKQAALSTRVLAETTKPAGKRTADGSEFEKRTADGSEFESPKKKAKVE

SEQ ID NO: 900 - protein, 2098 aa, synthetic construct
MPAAKRVKLDGGDKKYSIGLDIGTNSVGWAVITDEYKVPSKKFKVLGNTDRHSIKKNLIGALLFDSGETAEATRLKRTARRRYTRRKNRICYLQEIFSNEMAKVDDSFFHRLEESFLVEEDKKHERHPIFGNIVDEVAYHEKYPTIYHLRKKLVDSTDKADLRLIYLALAHMIKFRGHFLIEGDLNPDNSDVDKLFIQLVQTYNQLFEENPINASGVDAKAILSARLSKSRRLENLIAQLPGEKKNGLFGNLIALSLGLTPNFKSNFDLAEDAKLQLSKDTYDDDLDNLLAQIGDQYADLFLAAKNLSDAILLSDILRVNTEITKAPLSASMIKRYDEHHQDLTLLKALVRQQLPEKYKEIFFDQSKNGYAGYIDGGASQEEFYKFIKPILEKMDGTEELLVKLNREDLLRKQRTFDNGSIPHQIHLGELHAILRRQEDFYPFLKDNREKIEKILTFRIPYYVGPLARGNSRFAWMTRKSEETITPWNFEEVVDKGASAQSFIERMTNFDKNLPNEKVLPKHSLLYEYFTVYNELTKVKYVTEGMRKPAFLSGEQKKAIVDLLFKTNRKVTVKQLKEDYFKKIECFDSVEISGVEDRFNASLGTYHDLLKIIKDKDFLDNEENEDILEDIVLTLTLFEDREMIEERLKTYAHLFDDKVMKQLKRRRYTGWGRLSRKLINGIRDKQSGKTILDFLKSDGFANRNFMQLIHDDSLTFKEDIQKAQVSGQGDSLHEHIANLAGSPAIKKGILQTVKVVDELVKVMGRHKPENIVIEMARENQTTQKGQKNSRERMKRIEEGIKELGSQILKEHPVENTQLQNEKLYLYYLQNGRDMYVDQELDINRLSDYDVDHIVPQSFLKDDSIDNKVLTRSDKARGKSDNVPSEEVVKKMKNYWRQLLNAKLITQRKFDNLTKAERGGLSELDKAGFIKRQLVETRQITKHVAQILDSRMNTKYDENDKLIREVKVITLKSKLVSDFRKDFQFYKVREINNYHHAHDAYLNAVVGTALIKKYPKLESEFVYGDYKVYDVRKMIAKSEQEIGKATAKYFFYSNIMNFFKTEITLANGEIRKRPLIETNGETGEIVWDKGRDFATVRKVLSMPQVNIVKKTEVQTGGFSKESILPKRNSDKLIARKKDWDPKKYGGFDSPTVAYSVLVVAKVEKGKSKKLKSVKELLGITIMERSSFEKNPIDFLEAKGYKEVKKDLIIKLPKYSLFELENGRKRMLASAGELQKGNELALPSKYVNFLYLASHYEKLKGSPEDNEQKQLFVEQHKHYLDEIIEQISEFSKRVILADANLDKVLSAYNKHRDKPIREQAENIIHLFTLTNLGAPAAFKYFDTTIDRKRYTSTKEVLDATLIHQSITGLYETRIDLSQLGGDGGEAAAKGGGGSEAAAKGGVLNLEEEYRLHEKPVPSSIDPSWLQLFPTVWAERAGMGLANQVPPVVVELRSGASPVAVRQYPMSKEAREGIRPHIQRFLDLGVLVPCQSPWNTPLLPVKKPGTNDYRPVQDLREINKRVQDIHPTVPNPYNLLSSLPPSHTWYSVLDLKDAFFCLKLHPNSQPLFAFEWRDPEKGNTGQLTWTRLPQGFKNSPTLFNEALHRDLAPFRALNPQVVLLQYVDDLLVAAPTYRDCKEGTQKLLQELSKLGYRVSAKKAQLCQKEVTYLGYLLKEGKRWLTPARKATVMKIPPPTTPRQVREFLGKAGFCRLFIPGFASLAAPLYPLTKPSIPFIWTEEHQKAFDRIKEALLSAPALALPDLTKPFTLYVDERAGVARGVLTQTLGPWRRPVAYLSKKLDPVASGWPTCLKAVAAVALLLKDADKLTLGQNVTVIASHSLESIVRQPPDRWMTNARMTHYQSLLLNERVSFAPPAVLNPATLLPVESEATPVHRCSEILAEETGTRRDLKDQPLPGVPAWYTDGSSFIAEGKRRAGAAIVDGKRTVWASSLPEGTSAQKAELVALTQALRLAEGKDINIYTDSRYAFATAHIHGAIYKQRGWLTSAGKDIKNKEEILALLEAIHLPKRVAIIHCPGHQKGNDPVATGNRRADEAAKQAALSTRVLAETTKPAGKRTADGSEFEKRTADGSEFESPKKKAKVE

SEQ ID NO: 901 - protein, 2094 aa, synthetic construct
MPAAKRVKLDGGDKKYSIGLDIGTNSVGWAVITDEYKVPSKKFKVLGNTDRHSIKKNLIGALLFDSGETAEATRLKRTARRRYTRRKNRICYLQEIFSNEMAKVDDSFFHRLEESFLVEEDKKHERHPIFGNIVDEVAYHEKYPTIYHLRKKLVDSTDKADLRLIYLALAHMIKFRGHFLIEGDLNPDNSDVDKLFIQLVQTYNQLFEENPINASGVDAKAILSARLSKSRRLENLIAQLPGEKKNGLFGNLIALSLGLTPNFKSNFDLAEDAKLQLSKDTYDDDLDNLLAQIGDQYADLFLAAKNLSDAILLSDILRVNTEITKAPLSASMIKRYDEHHQDLTLLKALVRQQLPEKYKEIFFDQSKNGYAGYIDGGASQEEFYKFIKPILEKMDGTEELLVKLNREDLLRKQRTFDNGSIPHQIHLGELHAILRRQEDFYPFLKDNREKIEKILTFRIPYYVGPLARGNSRFAWMTRKSEETITPWNFEEVVDKGASAQSFIERMTNFDKNLPNEKVLPKHSLLYEYFTVYNELTKVKYVTEGMRKPAFLSGEQKKAIVDLLFKTNRKVTVKQLKEDYFKKIECFDSVEISGVEDRFNASLGTYHDLLKIIKDKDFLDNEENEDILEDIVLTLTLFEDREMIEERLKTYAHLFDDKVMKQLKRRRYTGWGRLSRKLINGIRDKQSGKTILDFLKSDGFANRNFMQLIHDDSLTFKEDIQKAQVSGQGDSLHEHIANLAGSPAIKKGILQTVKVVDELVKVMGRHKPENIVIEMARENQTTQKGQKNSRERMKRIEEGIKELGSQILKEHPVENTQLQNEKLYLYYLQNGRDMYVDQELDINRLSDYDVDHIVPQSFLKDDSIDNKVLTRSDKARGKSDNVPSEEVVKKMKNYWRQLLNAKLITQRKFDNLTKAERGGLSELDKAGFIKRQLVETRQITKHVAQILDSRMNTKYDENDKLIREVKVITLKSKLVSDFRKDFQFYKVREINNYHHAHDAYLNAVVGTALIKKYPKLESEFVYGDYKVYDVRKMIAKSEQEIGKATAKYFFYSNIMNFFKTEITLANGEIRKRPLIETNGETGEIVWDKGRDFATVRKVLSMPQVNIVKKTEVQTGGFSKESILPKRNSDKLIARKKDWDPKKYGGFDSPTVAYSVLVVAKVEKGKSKKLKSVKELLGITIMERSSFEKNPIDFLEAKGYKEVKKDLIIKLPKYSLFELENGRKRMLASAGELQKGNELALPSKYVNFLYLASHYEKLKGSPEDNEQKQLFVEQHKHYLDEIIEQISEFSKRVILADANLDKVLSAYNKHRDKPIREQAENIIHLFTLTNLGAPAAFKYFDTTIDRKRYTSTKEVLDATLIHQSITGLYETRIDLSQLGGDGGGGGEAAAKGGSGGVLNLEEEYRLHEKPVPSSIDPSWLQLFPTVWAERAGMGLANQVPPVVVELRSGASPVAVRQYPMSKEAREGIRPHIQRFLDLGVLVPCQSPWNTPLLPVKKPGTNDYRPVQDLREINKRVQDIHPTVPNPYNLLSSLPPSHTWYSVLDLKDAFFCLKLHPNSQPLFAFEWRDPEKGNTGQLTWTRLPQGFKNSPTLFNEALHRDLAPFRALNPQVVLLQYVDDLLVAAPTYRDCKEGTQKLLQELSKLGYRVSAKKAQLCQKEVTYLGYLLKEGKRWLTPARKATVMKIPPPTTPRQVREFLGKAGFCRLFIPGFASLAAPLYPLTKPSIPFIWTEEHQKAFDRIKEALLSAPALALPDLTKPFTLYVDERAGVARGVLTQTLGPWRRPVAYLSKKLDPVASGWPTCLKAVAAVALLLKDADKLTLGQNVTVIASHSLESIVRQPPDRWMTNARMTHYQSLLLNERVSFAPPAVLNPATLLPVESEATPVHRCSEILAEETGTRRDLKDQPLPGVPAWYTDGSSFIAEGKRRAGAAIVDGKRTVWASSLPEGTSAQKAELVALTQALRLAEGKDINIYTDSRYAFATAHIHGAIYKQRGWLTSAGKDIKNKEEILALLEAIHLPKRVAIIHCPGHQKGNDPVATGNRRADEAAKQAALSTRVLAETTKPAGKRTADGSEFEKRTADGSEFESPKKKAKVE

SEQ ID NO: 902 - protein, 2094 aa, synthetic construct
MPAAKRVKLDGGDKKYSIGLDIGTNSVGWAVITDEYKVPSKKFKVLGNTDRHSIKKNLIGALLFDSGETAEATRLKRTARRRYTRRKNRICYLQEIFSNEMAKVDDSFFHRLEESFLVEEDKKHERHPIFGNIVDEVAYHEKYPTIYHLRKKLVDSTDKADLRLIYLALAHMIKFRGHFLIEGDLNPDNSDVDKLFIQLVQTYNQLFEENPINASGVDAKAILSARLSKSRRLENLIAQLPGEKKNGLFGNLIALSLGLTPNFKSNFDLAEDAKLQLSKDTYDDDLDNLLAQIGDQYADLFLAAKNLSDAILLSDILRVNTEITKAPLSASMIKRYDEHHQDLTLLKALVRQQLPEKYKEIFFDQSKNGYAGYIDGGASQEEFYKFIKPILEKMDGTEELLVKLNREDLLRKQRTFDNGSIPHQIHLGELHAILRRQEDFYPFLKDNREKIEKILTFRIPYYVGPLARGNSRFAWMTRKSEETITPWNFEEVVDKGASAQSFIERMTNFDKNLPNEKVLPKHSLLYEYFTVYNELTKVKYVTEGMRKPAFLSGEQKKAIVDLLFKTNRKVTVKQLKEDYFKKIECFDSVEISGVEDRFNASLGTYHDLLKIIKDKDFLDNEENEDILEDIVLTLTLFEDREMIEERLKTYAHLFDDKVMKQLKRRRYTGWGRLSRKLINGIRDKQSGKTILDFLKSDGFANRNFMQLIHDDSLTFKEDIQKAQVSGQGDSLHEHIANLAGSPAIKKGILQTVKVVDELVKVMGRHKPENIVIEMARENQTTQKGQKNSRERMKRIEEGIKELGSQILKEHPVENTQLQNEKLYLYYLQNGRDMYVDQELDINRLSDYDVDHIVPQSFLKDDSIDNKVLTRSDKARGKSDNVPSEEVVKKMKNYWRQLLNAKLITQRKFDNLTKAERGGLSELDKAGFIKRQLVETRQITKHVAQILDSRMNTKYDENDKLIREVKVITLKSKLVSDFRKDFQFYKVREINNYHHAHDAYLNAVVGTALIKKYPKLESEFVYGDYKVYDVRKMIAKSEQEIGKATAKYFFYSNIMNFFKTEITLANGEIRKRPLIETNGETGEIVWDKGRDFATVRKVLSMPQVNIVKKTEVQTGGFSKESILPKRNSDKLIARKKDWDPKKYGGFDSPTVAYSVLVVAKVEKGKSKKLKSVKELLGITIMERSSFEKNPIDFLEAKGYKEVKKDLIIKLPKYSLFELENGRKRMLASAGELQKGNELALPSKYVNFLYLASHYEKLKGSPEDNEQKQLFVEQHKHYLDEIIEQISEFSKRVILADANLDKVLSAYNKHRDKPIREQAENIIHLFTLTNLGAPAAFKYFDTTIDRKRYTSTKEVLDATLIHQSITGLYETRIDLSQLGGDGGGGSEAAAKGGGGGVLNLEEEYRLHEKPVPSSIDPSWLQLFPTVWAERAGMGLANQVPPVVVELRSGASPVAVRQYPMSKEAREGIRPHIQRFLDLGVLVPCQSPWNTPLLPVKKPGTNDYRPVQDLREINKRVQDIHPTVPNPYNLLSSLPPSHTWYSVLDLKDAFFCLKLHPNSQPLFAFEWRDPEKGNTGQLTWTRLPQGFKNSPTLFNEALHRDLAPFRALNPQVVLLQYVDDLLVAAPTYRDCKEGTQKLLQELSKLGYRVSAKKAQLCQKEVTYLGYLLKEGKRWLTPARKATVMKIPPPTTPRQVREFLGKAGFCRLFIPGFASLAAPLYPLTKPSIPFIWTEEHQKAFDRIKEALLSAPALALPDLTKPFTLYVDERAGVARGVLTQTLGPWRRPVAYLSKKLDPVASGWPTCLKAVAAVALLLKDADKLTLGQNVTVIASHSLESIVRQPPDRWMTNARMTHYQSLLLNERVSFAPPAVLNPATLLPVESEATPVHRCSEILAEETGTRRDLKDQPLPGVPAWYTDGSSFIAEGKRRAGAAIVDGKRTVWASSLPEGTSAQKAELVALTQALRLAEGKDINIYTDSRYAFATAHIHGAIYKQRGWLTSAGKDIKNKEEILALLEAIHLPKRVAIIHCPGHQKGNDPVATGNRRADEAAKQAALSTRVLAETTKPAGKRTADGSEFEKRTADGSEFESPKKKAKVE

SEQ ID NO: 903 - protein, 2092 aa, synthetic construct
MPAAKRVKLDGGDKKYSIGLDIGTNSVGWAVITDEYKVPSKKFKVLGNTDRHSIKKNLIGALLFDSGETAEATRLKRTARRRYTRRKNRICYLQEIFSNEMAKVDDSFFHRLEESFLVEEDKKHERHPIFGNIVDEVAYHEKYPTIYHLRKKLVDSTDKADLRLIYLALAHMIKFRGHFLIEGDLNPDNSDVDKLFIQLVQTYNQLFEENPINASGVDAKAILSARLSKSRRLENLIAQLPGEKKNGLFGNLIALSLGLTPNFKSNFDLAEDAKLQLSKDTYDDDLDNLLAQIGDQYADLFLAAKNLSDAILLSDILRVNTEITKAPLSASMIKRYDEHHQDLTLLKALVRQQLPEKYKEIFFDQSKNGYAGYIDGGASQEEFYKFIKPILEKMDGTEELLVKLNREDLLRKQRTFDNGSIPHQIHLGELHAILRRQEDFYPFLKDNREKIEKILTFRIPYYVGPLARGNSRFAWMTRKSEETITPWNFEEVVDKGASAQSFIERMTNFDKNLPNEKVLPKHSLLYEYFTVYNELTKVKYVTEGMRKPAFLSGEQKKAIVDLLFKTNRKVTVKQLKEDYFKKIECFDSVEISGVEDRFNASLGTYHDLLKIIKDKDFLDNEENEDILEDIVLTLTLFEDREMIEERLKTYAHLFDDKVMKQLKRRRYTGWGRLSRKLINGIRDKQSGKTILDFLKSDGFANRNFMQLIHDDSLTFKEDIQKAQVSGQGDSLHEHIANLAGSPAIKKGILQTVKVVDELVKVMGRHKPENIVIEMARENQTTQKGQKNSRERMKRIEEGIKELGSQILKEHPVENTQLQNEKLYLYYLQNGRDMYVDQELDINRLSDYDVDHIVPQSFLKDDSIDNKVLTRSDKARGKSDNVPSEEVVKKMKNYWRQLLNAKLITQRKFDNLTKAERGGLSELDKAGFIKRQLVETRQITKHVAQILDSRMNTKYDENDKLIREVKVITLKSKLVSDFRKDFQFYKVREINNYHHAHDAYLNAVVGTALIKKYPKLESEFVYGDYKVYDVRKMIAKSEQEIGKATAKYFFYSNIMNFFKTEITLANGEIRKRPLIETNGETGEIVWDKGRDFATVRKVLSMPQVNIVKKTEVQTGGFSKESILPKRNSDKLIARKKDWDPKKYGGFDSPTVAYSVLVVAKVEKGKSKKLKSVKELLGITIMERSSFEKNPIDFLEAKGYKEVKKDLIIKLPKYSLFELENGRKRMLASAGELQKGNELALPSKYVNFLYLASHYEKLKGSPEDNEQKQLFVEQHKHYLDEIIEQISEFSKRVILADANLDKVLSAYNKHRDKPIREQAENIIHLFTLTNLGAPAAFKYFDTTIDRKRYTSTKEVLDATLIHQSITGLYETRIDLSQLGGDGGGGSGGGGSSGGVLNLEEEYRLHEKPVPSSIDPSWLQLFPTVWAERAGMGLANQVPPVVVELRSGASPVAVRQYPMSKEAREGIRPHIQRFLDLGVLVPCQSPWNTPLLPVKKPGTNDYRPVQDLREINKRVQDIHPTVPNPYNLLSSLPPSHTWYSVLDLKDAFFCLKLHPNSQPLFAFEWRDPEKGNTGQLTWTRLPQGFKNSPTLFNEALHRDLAPFRALNPQVVLLQYVDDLLVAAPTYRDCKEGTQKLLQELSKLGYRVSAKKAQLCQKEVTYLGYLLKEGKRWLTPARKATVMKIPPPTTPRQVREFLGKAGFCRLFIPGFASLAAPLYPLTKPSIPFIWTEEHQKAFDRIKEALLSAPALALPDLTKPFTLYVDERAGVARGVLTQTLGPWRRPVAYLSKKLDPVASGWPTCLKAVAAVALLLKDADKLTLGQNVTVIASHSLESIVRQPPDRWMTNARMTHYQSLLLNERVSFAPPAVLNPATLLPVESEATPVHRCSEILAEETGTRRDLKDQPLPGVPAWYTDGSSFIAEGKRRAGAAIVDGKRTVWASSLPEGTSAQKAELVALTQALRLAEGKDINIYTDSRYAFATAHIHGAIYKQRGWLTSAGKDIKNKEEILALLEAIHLPKRVAIIHCPGHQKGNDPVATGNRRADEAAKQAALSTRVLAETTKPAGKRTADGSEFEKRTADGSEFESPKKKAKVE

SEQ ID NO: 904 - protein, 2088 aa, synthetic construct
MPAAKRVKLDGGDKKYSIGLDIGTNSVGWAVITDEYKVPSKKFKVLGNTDRHSIKKNLIGALLFDSGETAEATRLKRTARRRYTRRKNRICYLQEIFSNEMAKVDDSFFHRLEESFLVEEDKKHERHPIFGNIVDEVAYHEKYPTIYHLRKKLVDSTDKADLRLIYLALAHMIKFRGHFLIEGDLNPDNSDVDKLFIQLVQTYNQLFEENPINASGVDAKAILSARLSKSRRLENLIAQLPGEKKNGLFGNLIALSLGLTPNFKSNFDLAEDAKLQLSKDTYDDDLDNLLAQIGDQYADLFLAAKNLSDAILLSDILRVNTEITKAPLSASMIKRYDEHHQDLTLLKALVRQQLPEKYKEIFFDQSKNGYAGYIDGGASQEEFYKFIKPILEKMDGTEELLVKLNREDLLRKQRTFDNGSIPHQIHLGELHAILRRQEDFYPFLKDNREKIEKILTFRIPYYVGPLARGNSRFAWMTRKSEETITPWNFEEVVDKGASAQSFIERMTNFDKNLPNEKVLPKHSLLYEYFTVYNELTKVKYVTEGMRKPAFLSGEQKKAIVDLLFKTNRKVTVKQLKEDYFKKIECFDSVEISGVEDRFNASLGTYHDLLKIIKDKDFLDNEENEDILEDIVLTLTLFEDREMIEERLKTYAHLFDDKVMKQLKRRRYTGWGRLSRKLINGIRDKQSGKTILDFLKSDGFANRNFMQLIHDDSLTFKEDIQKAQVSGQGDSLHEHIANLAGSPAIKKGILQTVKVVDELVKVMGRHKPENIVIEMARENQTTQKGQKNSRERMKRIEEGIKELGSQILKEHPVENTQLQNEKLYLYYLQNGRDMYVDQELDINRLSDYDVDHIVPQSFLKDDSIDNKVLTRSDKARGKSDNVPSEEVVKKMKNYWRQLLNAKLITQRKFDNLTKAERGGLSELDKAGFIKRQLVETRQITKHVAQILDSRMNTKYDENDKLIREVKVITLKSKLVSDFRKDFQFYKVREINNYHHAHDAYLNAVVGTALIKKYPKLESEFVYGDYKVYDVRKMIAKSEQEIGKATAKYFFYSNIMNFFKTEITLANGEIRKRPLIETNGETGEIVWDKGRDFATVRKVLSMPQVNIVKKTEVQTGGFSKESILPKRNSDKLIARKKDWDPKKYGGFDSPTVAYSVLVVAKVEKGKSKKLKSVKELLGITIMERSSFEKNPIDFLEAKGYKEVKKDLIIKLPKYSLFELENGRKRMLASAGELQKGNELALPSKYVNFLYLASHYEKLKGSPEDNEQKQLFVEQHKHYLDEIIEQISEFSKRVILADANLDKVLSAYNKHRDKPIREQAENIIHLFTLTNLGAPAAFKYFDTTIDRKRYTSTKEVLDATLIHQSITGLYETRIDLSQLGGDGGPAPAPGGVLNLEEEYRLHEKPVPSSIDPSWLQLFPTVWAERAGMGLANQVPPVVVELRSGASPVAVRQYPMSKEAREGIRPHIQRFLDLGVLVPCQSPWNTPLLPVKKPGTNDYRPVQDLREINKRVQDIHPTVPNPYNLLSSLPPSHTWYSVLDLKDAFFCLKLHPNSQPLFAFEWRDPEKGNTGQLTWTRLPQGFKNSPTLFNEALHRDLAPFRALNPQVVLLQYVDDLLVAAPTYRDCKEGTQKLLQELSKLGYRVSAKKAQLCQKEVTYLGYLLKEGKRWLTPARKATVMKIPPPTTPRQVREFLGKAGFCRLFIPGFASLAAPLYPLTKPSIPFIWTEEHQKAFDRIKEALLSAPALALPDLTKPFTLYVDERAGVARGVLTQTLGPWRRPVAYLSKKLDPVASGWPTCLKAVAAVALLLKDADKLTLGQNVTVIASHSLESIVRQPPDRWMTNARMTHYQSLLLNERVSFAPPAVLNPATLLPVESEATPVHRCSEILAEETGTRRDLKDQPLPGVPAWYTDGSSFIAEGKRRAGAAIVDGKRTVWASSLPEGTSAQKAELVALTQALRLAEGKDINIYTDSRYAFATAHIHGAIYKQRGWLTSAGKDIKNKEEILALLEAIHLPKRVAIIHCPGHQKGNDPVATGNRRADEAAKQAALSTRVLAETTKPAGKRTADGSEFEKRTADGSEFESPKKKAKVE

SEQ ID NO: 905 - protein, 2094 aa, synthetic construct
MPAAKRVKLDGGDKKYSIGLDIGTNSVGWAVITDEYKVPSKKFKVLGNTDRHSIKKNLIGALLFDSGETAEATRLKRTARRRYTRRKNRICYLQEIFSNEMAKVDDSFFHRLEESFLVEEDKKHERHPIFGNIVDEVAYHEKYPTIYHLRKKLVDSTDKADLRLIYLALAHMIKFRGHFLIEGDLNPDNSDVDKLFIQLVQTYNQLFEENPINASGVDAKAILSARLSKSRRLENLIAQLPGEKKNGLFGNLIALSLGLTPNFKSNFDLAEDAKLQLSKDTYDDDLDNLLAQIGDQYADLFLAAKNLSDAILLSDILRVNTEITKAPLSASMIKRYDEHHQDLTLLKALVRQQLPEKYKEIFFDQSKNGYAGYIDGGASQEEFYKFIKPILEKMDGTEELLVKLNREDLLRKQRTFDNGSIPHQIHLGELHAILRRQEDFYPFLKDNREKIEKILTFRIPYYVGPLARGNSRFAWMTRKSEETITPWNFEEVVDKGASAQSFIERMTNFDKNLPNEKVLPKHSLLYEYFTVYNELTKVKYVTEGMRKPAFLSGEQKKAIVDLLFKTNRKVTVKQLKEDYFKKIECFDSVEISGVEDRFNASLGTYHDLLKIIKDKDFLDNEENEDILEDIVLTLTLFEDREMIEERLKTYAHLFDDKVMKQLKRRRYTGWGRLSRKLINGIRDKQSGKTILDFLKSDGFANRNFMQLIHDDSLTFKEDIQKAQVSGQGDSLHEHIANLAGSPAIKKGILQTVKVVDELVKVMGRHKPENIVIEMARENQTTQKGQKNSRERMKRIEEGIKELGSQILKEHPVENTQLQNEKLYLYYLQNGRDMYVDQELDINRLSDYDVDHIVPQSFLKDDSIDNKVLTRSDKARGKSDNVPSEEVVKKMKNYWRQLLNAKLITQRKFDNLTKAERGGLSELDKAGFIKRQLVETRQITKHVAQILDSRMNTKYDENDKLIREVKVITLKSKLVSDFRKDFQFYKVREINNYHHAHDAYLNAVVGTALIKKYPKLESEFVYGDYKVYDVRKMIAKSEQEIGKATAKYFFYSNIMNFFKTEITLANGEIRKRPLIETNGETGEIVWDKGRDFATVRKVLSMPQVNIVKKTEVQTGGFSKESILPKRNSDKLIARKKDWDPKKYGGFDSPTVAYSVLVVAKVEKGKSKKLKSVKELLGITIMERSSFEKNPIDFLEAKGYKEVKKDLIIKLPKYSLFELENGRKRMLASAGELQKGNELALPSKYVNFLYLASHYEKLKGSPEDNEQKQLFVEQHKHYLDEIIEQISEFSKRVILADANLDKVLSAYNKHRDKPIREQAENIIHLFTLTNLGAPAAFKYFDTTIDRKRYTSTKEVLDATLIHQSITGLYETRIDLSQLGGDGGEAAAKGGSGSSGGVLNLEEEYRLHEKPVPSSIDPSWLQLFPTVWAERAGMGLANQVPPVVVELRSGASPVAVRQYPMSKEAREGIRPHIQRFLDLGVLVPCQSPWNTPLLPVKKPGTNDYRPVQDLREINKRVQDIHPTVPNPYNLLSSLPPSHTWYSVLDLKDAFFCLKLHPNSQPLFAFEWRDPEKGNTGQLTWTRLPQGFKNSPTLFNEALHRDLAPFRALNPQVVLLQYVDDLLVAAPTYRDCKEGTQKLLQELSKLGYRVSAKKAQLCQKEVTYLGYLLKEGKRWLTPARKATVMKIPPPTTPRQVREFLGKAGFCRLFIPGFASLAAPLYPLTKPSIPFIWTEEHQKAFDRIKEALLSAPALALPDLTKPFTLYVDERAGVARGVLTQTLGPWRRPVAYLSKKLDPVASGWPTCLKAVAAVALLLKDADKLTLGQNVTVIASHSLESIVRQPPDRWMTNARMTHYQSLLLNERVSFAPPAVLNPATLLPVESEATPVHRCSEILAEETGTRRDLKDQPLPGVPAWYTDGSSFIAEGKRRAGAAIVDGKRTVWASSLPEGTSAQKAELVALTQALRLAEGKDINIYTDSRYAFATAHIHGAIYKQRGWLTSAGKDIKNKEEILALLEAIHLPKRVAIIHCPGHQKGNDPVATGNRRADEAAKQAALSTRVLAETTKPAGKRTADGSEFEKRTADGSEFESPKKKAKVE

SEQ ID NO: 906 - protein, 2089 aa, synthetic construct
MPAAKRVKLDGGDKKYSIGLDIGTNSVGWAVITDEYKVPSKKFKVLGNTDRHSIKKNLIGALLFDSGETAEATRLKRTARRRYTRRKNRICYLQEIFSNEMAKVDDSFFHRLEESFLVEEDKKHERHPIFGNIVDEVAYHEKYPTIYHLRKKLVDSTDKADLRLIYLALAHMIKFRGHFLIEGDLNPDNSDVDKLFIQLVQTYNQLFEENPINASGVDAKAILSARLSKSRRLENLIAQLPGEKKNGLFGNLIALSLGLTPNFKSNFDLAEDAKLQLSKDTYDDDLDNLLAQIGDQYADLFLAAKNLSDAILLSDILRVNTEITKAPLSASMIKRYDEHHQDLTLLKALVRQQLPEKYKEIFFDQSKNGYAGYIDGGASQEEFYKFIKPILEKMDGTEELLVKLNREDLLRKQRTFDNGSIPHQIHLGELHAILRRQEDFYPFLKDNREKIEKILTFRIPYYVGPLARGNSRFAWMTRKSEETITPWNFEEVVDKGASAQSFIERMTNFDKNLPNEKVLPKHSLLYEYFTVYNELTKVKYVTEGMRKPAFLSGEQKKAIVDLLFKTNRKVTVKQLKEDYFKKIECFDSVEISGVEDRFNASLGTYHDLLKIIKDKDFLDNEENEDILEDIVLTLTLFEDREMIEERLKTYAHLFDDKVMKQLKRRRYTGWGRLSRKLINGIRDKQSGKTILDFLKSDGFANRNFMQLIHDDSLTFKEDIQKAQVSGQGDSLHEHIANLAGSPAIKKGILQTVKVVDELVKVMGRHKPENIVIEMARENQTTQKGQKNSRERMKRIEEGIKELGSQILKEHPVENTQLQNEKLYLYYLQNGRDMYVDQELDINRLSDYDVDHIVPQSFLKDDSIDNKVLTRSDKARGKSDNVPSEEVVKKMKNYWRQLLNAKLITQRKFDNLTKAERGGLSELDKAGFIKRQLVETRQITKHVAQILDSRMNTKYDENDKLIREVKVITLKSKLVSDFRKDFQFYKVREINNYHHAHDAYLNAVVGTALIKKYPKLESEFVYGDYKVYDVRKMIAKSEQEIGKATAKYFFYSNIMNFFKTEITLANGEIRKRPLIETNGETGEIVWDKGRDFATVRKVLSMPQVNIVKKTEVQTGGFSKESILPKRNSDKLIARKKDWDPKKYGGFDSPTVAYSVLVVAKVEKGKSKKLKSVKELLGITIMERSSFEKNPIDFLEAKGYKEVKKDLIIKLPKYSLFELENGRKRMLASAGELQKGNELALPSKYVNFLYLASHYEKLKGSPEDNEQKQLFVEQHKHYLDEIIEQISEFSKRVILADANLDKVLSAYNKHRDKPIREQAENIIHLFTLTNLGAPAAFKYFDTTIDRKRYTSTKEVLDATLIHQSITGLYETRIDLSQLGGDGGGGSGGSGGVLNLEEEYRLHEKPVPSSIDPSWLQLFPTVWAERAGMGLANQVPPVVVELRSGASPVAVRQYPMSKEAREGIRPHIQRFLDLGVLVPCQSPWNTPLLPVKKPGTNDYRPVQDLREINKRVQDIHPTVPNPYNLLSSLPPSHTWYSVLDLKDAFFCLKLHPNSQPLFAFEWRDPEKGNTGQLTWTRLPQGFKNSPTLFNEALHRDLAPFRALNPQVVLLQYVDDLLVAAPTYRDCKEGTQKLLQELSKLGYRVSAKKAQLCQKEVTYLGYLLKEGKRWLTPARKATVMKIPPPTTPRQVREFLGKAGFCRLFIPGFASLAAPLYPLTKPSIPFIWTEEHQKAFDRIKEALLSAPALALPDLTKPFTLYVDERAGVARGVLTQTLGPWRRPVAYLSKKLDPVASGWPTCLKAVAAVALLLKDADKLTLGQNVTVIASHSLESIVRQPPDRWMTNARMTHYQSLLLNERVSFAPPAVLNPATLLPVESEATPVHRCSEILAEETGTRRDLKDQPLPGVPAWYTDGSSFIAEGKRRAGAAIVDGKRTVWASSLPEGTSAQKAELVALTQALRLAEGKDINIYTDSRYAFATAHIHGAIYKQRGWLTSAGKDIKNKEEILALLEAIHLPKRVAIIHCPGHQKGNDPVATGNRRADEAAKQAALSTRVLAETTKPAGKRTADGSEFEKRTADGSEFESPKKKAKVE

SEQ ID NO: 907 - protein, 2095 aa, synthetic construct
MPAAKRVKLDGGDKKYSIGLDIGTNSVGWAVITDEYKVPSKKFKVLGNTDRHSIKKNLIGALLFDSGETAEATRLKRTARRRYTRRKNRICYLQEIFSNEMAKVDDSFFHRLEESFLVEEDKKHERHPIFGNIVDEVAYHEKYPTIYHLRKKLVDSTDKADLRLIYLALAHMIKFRGHFLIEGDLNPDNSDVDKLFIQLVQTYNQLFEENPINASGVDAKAILSARLSKSRRLENLIAQLPGEKKNGLFGNLIALSLGLTPNFKSNFDLAEDAKLQLSKDTYDDDLDNLLAQIGDQYADLFLAAKNLSDAILLSDILRVNTEITKAPLSASMIKRYDEHHQDLTLLKALVRQQLPEKYKEIFFDQSKNGYAGYIDGGASQEEFYKFIKPILEKMDGTEELLVKLNREDLLRKQRTFDNGSIPHQIHLGELHAILRRQEDFYPFLKDNREKIEKILTFRIPYYVGPLARGNSRFAWMTRKSEETITPWNFEEVVDKGASAQSFIERMTNFDKNLPNEKVLPKHSLLYEYFTVYNELTKVKYVTEGMRKPAFLSGEQKKAIVDLLFKTNRKVTVKQLKEDYFKKIECFDSVEISGVEDRFNASLGTYHDLLKIIKDKDFLDNEENEDILEDIVLTLTLFEDREMIEERLKTYAHLFDDKVMKQLKRRRYTGWGRLSRKLINGIRDKQSGKTILDFLKSDGFANRNFMQLIHDDSLTFKEDIQKAQVSGQGDSLHEHIANLAGSPAIKKGILQTVKVVDELVKVMGRHKPENIVIEMARENQTTQKGQKNSRERMKRIEEGIKELGSQILKEHPVENTQLQNEKLYLYYLQNGRDMYVDQELDINRLSDYDVDHIVPQSFLKDDSIDNKVLTRSDKARGKSDNVPSEEVVKKMKNYWRQLLNAKLITQRKFDNLTKAERGGLSELDKAGFIKRQLVETRQITKHVAQILDSRMNTKYDENDKLIREVKVITLKSKLVSDFRKDFQFYKVREINNYHHAHDAYLNAVVGTALIKKYPKLESEFVYGDYKVYDVRKMIAKSEQEIGKATAKYFFYSNIMNFFKTEITLANGEIRKRPLIETNGETGEIVWDKGRDFATVRKVLSMPQVNIVKKTEVQTGGFSKESILPKRNSDKLIARKKDWDPKKYGGFDSPTVAYSVLVVAKVEKGKSKKLKSVKELLGITIMERSSFEKNPIDFLEAKGYKEVKKDLIIKLPKYSLFELENGRKRMLASAGELQKGNELALPSKYVNFLYLASHYEKLKGSPEDNEQKQLFVEQHKHYLDEIIEQISEFSKRVILADANLDKVLSAYNKHRDKPIREQAENIIHLFTLTNLGAPAAFKYFDTTIDRKRYTSTKEVLDATLIHQSITGLYETRIDLSQLGGDGGGSAGSAAGSGEFGGVLNLEEEYRLHEKPVPSSIDPSWLQLFPTVWAERAGMGLANQVPPVVVELRSGASPVAVRQYPMSKEAREGIRPHIQRFLDLGVLVPCQSPWNTPLLPVKKPGTNDYRPVQDLREINKRVQDIHPTVPNPYNLLSSLPPSHTWYSVLDLKDAFFCLKLHPNSQPLFAFEWRDPEKGNTGQLTWTRLPQGFKNSPTLFNEALHRDLAPFRALNPQVVLLQYVDDLLVAAPTYRDCKEGTQKLLQELSKLGYRVSAKKAQLCQKEVTYLGYLLKEGKRWLTPARKATVMKIPPPTTPRQVREFLGKAGFCRLFIPGFASLAAPLYPLTKPSIPFIWTEEHQKAFDRIKEALLSAPALALPDLTKPFTLYVDERAGVARGVLTQTLGPWRRPVAYLSKKLDPVASGWPTCLKAVAAVALLLKDADKLTLGQNVTVIASHSLESIVRQPPDRWMTNARMTHYQSLLLNERVSFAPPAVLNPATLLPVESEATPVHRCSEILAEETGTRRDLKDQPLPGVPAWYTDGSSFIAEGKRRAGAAIVDGKRTVWASSLPEGTSAQKAELVALTQALRLAEGKDINIYTDSRYAFATAHIHGAIYKQRGWLTSAGKDIKNKEEILALLEAIHLPKRVAIIHCPGHQKGNDPVATGNRRADEAAKQAALSTRVLAETTKPAGKRTADGSEFEKRTADGSEFESPKKKAKVE

SEQ ID NO: 908 - protein, 2092 aa, synthetic construct
MPAAKRVKLDGGDKKYSIGLDIGTNSVGWAVITDEYKVPSKKFKVLGNTDRHSIKKNLIGALLFDSGETAEATRLKRTARRRYTRRKNRICYLQEIFSNEMAKVDDSFFHRLEESFLVEEDKKHERHPIFGNIVDEVAYHEKYPTIYHLRKKLVDSTDKADLRLIYLALAHMIKFRGHFLIEGDLNPDNSDVDKLFIQLVQTYNQLFEENPINASGVDAKAILSARLSKSRRLENLIAQLPGEKKNGLFGNLIALSLGLTPNFKSNFDLAEDAKLQLSKDTYDDDLDNLLAQIGDQYADLFLAAKNLSDAILLSDILRVNTEITKAPLSASMIKRYDEHHQDLTLLKALVRQQLPEKYKEIFFDQSKNGYAGYIDGGASQEEFYKFIKPILEKMDGTEELLVKLNREDLLRKQRTFDNGSIPHQIHLGELHAILRRQEDFYPFLKDNREKIEKILTFRIPYYVGPLARGNSRFAWMTRKSEETITPWNFEEVVDKGASAQSFIERMTNFDKNLPNEKVLPKHSLLYEYFTVYNELTKVKYVTEGMRKPAFLSGEQKKAIVDLLFKTNRKVTVKQLKEDYFKKIECFDSVEISGVEDRFNASLGTYHDLLKIIKDKDFLDNEENEDILEDIVLTLTLFEDREMIEERLKTYAHLFDDKVMKQLKRRRYTGWGRLSRKLINGIRDKQSGKTILDFLKSDGFANRNFMQLIHDDSLTFKEDIQKAQVSGQGDSLHEHIANLAGSPAIKKGILQTVKVVDELVKVMGRHKPENIVIEMARENQTTQKGQKNSRERMKRIEEGIKELGSQILKEHPVENTQLQNEKLYLYYLQNGRDMYVDQELDINRLSDYDVDHIVPQSFLKDDSIDNKVLTRSDKARGKSDNVPSEEVVKKMKNYWRQLLNAKLITQRKFDNLTKAERGGLSELDKAGFIKRQLVETRQITKHVAQILDSRMNTKYDENDKLIREVKVITLKSKLVSDFRKDFQFYKVREINNYHHAHDAYLNAVVGTALIKKYPKLESEFVYGDYKVYDVRKMIAKSEQEIGKATAKYFFYSNIMNFFKTEITLANGEIRKRPLIETNGETGEIVWDKGRDFATVRKVLSMPQVNIVKKTEVQTGGFSKESILPKRNSDKLIARKKDWDPKKYGGFDSPTVAYSVLVVAKVEKGKSKKLKSVKELLGITIMERSSFEKNPIDFLEAKGYKEVKKDLIIKLPKYSLFELENGRKRMLASAGELQKGNELALPSKYVNFLYLASHYEKLKGSPEDNEQKQLFVEQHKHYLDEIIEQISEFSKRVILADANLDKVLSAYNKHRDKPIREQAENIIHLFTLTNLGAPAAFKYFDTTIDRKRYTSTKEVLDATLIHQSITGLYETRIDLSQLGGDGGGGSGGGPAPGGVLNLEEEYRLHEKPVPSSIDPSWLQLFPTVWAERAGMGLANQVPPVVVELRSGASPVAVRQYPMSKEAREGIRPHIQRFLDLGVLVPCQSPWNTPLLPVKKPGTNDYRPVQDLREINKRVQDIHPTVPNPYNLLSSLPPSHTWYSVLDLKDAFFCLKLHPNSQPLFAFEWRDPEKGNTGQLTWTRLPQGFKNSPTLFNEALHRDLAPFRALNPQVVLLQYVDDLLVAAPTYRDCKEGTQKLLQELSKLGYRVSAKKAQLCQKEVTYLGYLLKEGKRWLTPARKATVMKIPPPTTPRQVREFLGKAGFCRLFIPGFASLAAPLYPLTKPSIPFIWTEEHQKAFDRIKEALLSAPALALPDLTKPFTLYVDERAGVARGVLTQTLGPWRRPVAYLSKKLDPVASGWPTCLKAVAAVALLLKDADKLTLGQNVTVIASHSLESIVRQPPDRWMTNARMTHYQSLLLNERVSFAPPAVLNPATLLPVESEATPVHRCSEILAEETGTRRDLKDQPLPGVPAWYTDGSSFIAEGKRRAGAAIVDGKRTVWASSLPEGTSAQKAELVALTQALRLAEGKDINIYTDSRYAFATAHIHGAIYKQRGWLTSAGKDIKNKEEILALLEAIHLPKRVAIIHCPGHQKGNDPVATGNRRADEAAKQAALSTRVLAETTKPAGKRTADGSEFEKRTADGSEFESPKKKAKVE

SEQ ID NO: 909 - protein, 2092 aa, synthetic construct
MPAAKRVKLDGGDKKYSIGLDIGTNSVGWAVITDEYKVPSKKFKVLGNTDRHSIKKNLIGALLFDSGETAEATRLKRTARRRYTRRKNRICYLQEIFSNEMAKVDDSFFHRLEESFLVEEDKKHERHPIFGNIVDEVAYHEKYPTIYHLRKKLVDSTDKADLRLIYLALAHMIKFRGHFLIEGDLNPDNSDVDKLFIQLVQTYNQLFEENPINASGVDAKAILSARLSKSRRLENLIAQLPGEKKNGLFGNLIALSLGLTPNFKSNFDLAEDAKLQLSKDTYDDDLDNLLAQIGDQYADLFLAAKNLSDAILLSDILRVNTEITKAPLSASMIKRYDEHHQDLTLLKALVRQQLPEKYKEIFFDQSKNGYAGYIDGGASQEEFYKFIKPILEKMDGTEELLVKLNREDLLRKQRTFDNGSIPHQIHLGELHAILRRQEDFYPFLKDNREKIEKILTFRIPYYVGPLARGNSRFAWMTRKSEETITPWNFEEVVDKGASAQSFIERMTNFDKNLPNEKVLPKHSLLYEYFTVYNELTKVKYVTEGMRKPAFLSGEQKKAIVDLLFKTNRKVTVKQLKEDYFKKIECFDSVEISGVEDRFNASLGTYHDLLKIIKDKDFLDNEENEDILEDIVLTLTLFEDREMIEERLKTYAHLFDDKVMKQLKRRRYTGWGRLSRKLINGIRDKQSGKTILDFLKSDGFANRNFMQLIHDDSLTFKEDIQKAQVSGQGDSLHEHIANLAGSPAIKKGILQTVKVVDELVKVMGRHKPENIVIEMARENQTTQKGQKNSRERMKRIEEGIKELGSQILKEHPVENTQLQNEKLYLYYLQNGRDMYVDQELDINRLSDYDVDHIVPQSFLKDDSIDNKVLTRSDKARGKSDNVPSEEVVKKMKNYWRQLLNAKLITQRKFDNLTKAERGGLSELDKAGFIKRQLVETRQITKHVAQILDSRMNTKYDENDKLIREVKVITLKSKLVSDFRKDFQFYKVREINNYHHAHDAYLNAVVGTALIKKYPKLESEFVYGDYKVYDVRKMIAKSEQEIGKATAKYFFYSNIMNFFKTEITLANGEIRKRPLIETNGETGEIVWDKGRDFATVRKVLSMPQVNIVKKTEVQTGGFSKESILPKRNSDKLIARKKDWDPKKYGGFDSPTVAYSVLVVAKVEKGKSKKLKSVKELLGITIMERSSFEKNPIDFLEAKGYKEVKKDLIIKLPKYSLFELENGRKRMLASAGELQKGNELALPSKYVNFLYLASHYEKLKGSPEDNEQKQLFVEQHKHYLDEIIEQISEFSKRVILADANLDKVLSAYNKHRDKPIREQAENIIHLFTLTNLGAPAAFKYFDTTIDRKRYTSTKEVLDATLIHQSITGLYETRIDLSQLGGDGGGGSGSSGGGGGVLNLEEEYRLHEKPVPSSIDPSWLQLFPTVWAERAGMGLANQVPPVVVELRSGASPVAVRQYPMSKEAREGIRPHIQRFLDLGVLVPCQSPWNTPLLPVKKPGTNDYRPVQDLREINKRVQDIHPTVPNPYNLLSSLPPSHTWYSVLDLKDAFFCLKLHPNSQPLFAFEWRDPEKGNTGQLTWTRLPQGFKNSPTLFNEALHRDLAPFRALNPQVVLLQYVDDLLVAAPTYRDCKEGTQKLLQELSKLGYRVSAKKAQLCQKEVTYLGYLLKEGKRWLTPARKATVMKIPPPTTPRQVREFLGKAGFCRLFIPGFASLAAPLYPLTKPSIPFIWTEEHQKAFDRIKEALLSAPALALPDLTKPFTLYVDERAGVARGVLTQTLGPWRRPVAYLSKKLDPVASGWPTCLKAVAAVALLLKDADKLTLGQNVTVIASHSLESIVRQPPDRWMTNARMTHYQSLLLNERVSFAPPAVLNPATLLPVESEATPVHRCSEILAEETGTRRDLKDQPLPGVPAWYTDGSSFIAEGKRRAGAAIVDGKRTVWASSLPEGTSAQKAELVALTQALRLAEGKDINIYTDSRYAFATAHIHGAIYKQRGWLTSAGKDIKNKEEILALLEAIHLPKRVAIIHCPGHQKGNDPVATGNRRADEAAKQAALSTRVLAETTKPAGKRTADGSEFEKRTADGSEFESPKKKAKVE

SEQ ID NO: 910 - protein, 2094 aa, synthetic construct
MPAAKRVKLDGGDKKYSIGLDIGTNSVGWAVITDEYKVPSKKFKVLGNTDRHSIKKNLIGALLFDSGETAEATRLKRTARRRYTRRKNRICYLQEIFSNEMAKVDDSFFHRLEESFLVEEDKKHERHPIFGNIVDEVAYHEKYPTIYHLRKKLVDSTDKADLRLIYLALAHMIKFRGHFLIEGDLNPDNSDVDKLFIQLVQTYNQLFEENPINASGVDAKAILSARLSKSRRLENLIAQLPGEKKNGLFGNLIALSLGLTPNFKSNFDLAEDAKLQLSKDTYDDDLDNLLAQIGDQYADLFLAAKNLSDAILLSDILRVNTEITKAPLSASMIKRYDEHHQDLTLLKALVRQQLPEKYKEIFFDQSKNGYAGYIDGGASQEEFYKFIKPILEKMDGTEELLVKLNREDLLRKQRTFDNGSIPHQIHLGELHAILRRQEDFYPFLKDNREKIEKILTFRIPYYVGPLARGNSRFAWMTRKSEETITPWNFEEVVDKGASAQSFIERMTNFDKNLPNEKVLPKHSLLYEYFTVYNELTKVKYVTEGMRKPAFLSGEQKKAIVDLLFKTNRKVTVKQLKEDYFKKIECFDSVEISGVEDRFNASLGTYHDLLKIIKDKDFLDNEENEDILEDIVLTLTLFEDREMIEERLKTYAHLFDDKVMKQLKRRRYTGWGRLSRKLINGIRDKQSGKTILDFLKSDGFANRNFMQLIHDDSLTFKEDIQKAQVSGQGDSLHEHIANLAGSPAIKKGILQTVKVVDELVKVMGRHKPENIVIEMARENQTTQKGQKNSRERMKRIEEGIKELGSQILKEHPVENTQLQNEKLYLYYLQNGRDMYVDQELDINRLSDYDVDHIVPQSFLKDDSIDNKVLTRSDKARGKSDNVPSEEVVKKMKNYWRQLLNAKLITQRKFDNLTKAERGGLSELDKAGFIKRQLVETRQITKHVAQILDSRMNTKYDENDKLIREVKVITLKSKLVSDFRKDFQFYKVREINNYHHAHDAYLNAVVGTALIKKYPKLESEFVYGDYKVYDVRKMIAKSEQEIGKATAKYFFYSNIMNFFKTEITLANGEIRKRPLIETNGETGEIVWDKGRDFATVRKVLSMPQVNIVKKTEVQTGGFSKESILPKRNSDKLIARKKDWDPKKYGGFDSPTVAYSVLVVAKVEKGKSKKLKSVKELLGITIMERSSFEKNPIDFLEAKGYKEVKKDLIIKLPKYSLFELENGRKRMLASAGELQKGNELALPSKYVNFLYLASHYEKLKGSPEDNEQKQLFVEQHKHYLDEIIEQISEFSKRVILADANLDKVLSAYNKHRDKPIREQAENIIHLFTLTNLGAPAAFKYFDTTIDRKRYTSTKEVLDATLIHQSITGLYETRIDLSQLGGDGGGSSEAAAKGGGGGVLNLEEEYRLHEKPVPSSIDPSWLQLFPTVWAERAGMGLANQVPPVVVELRSGASPVAVRQYPMSKEAREGIRPHIQRFLDLGVLVPCQSPWNTPLLPVKKPGTNDYRPVQDLREINKRVQDIHPTVPNPYNLLSSLPPSHTWYSVLDLKDAFFCLKLHPNSQPLFAFEWRDPEKGNTGQLTWTRLPQGFKNSPTLFNEALHRDLAPFRALNPQVVLLQYVDDLLVAAPTYRDCKEGTQKLLQELSKLGYRVSAKKAQLCQKEVTYLGYLLKEGKRWLTPARKATVMKIPPPTTPRQVREFLGKAGFCRLFIPGFASLAAPLYPLTKPSIPFIWTEEHQKAFDRIKEALLSAPALALPDLTKPFTLYVDERAGVARGVLTQTLGPWRRPVAYLSKKLDPVASGWPTCLKAVAAVALLLKDADKLTLGQNVTVIASHSLESIVRQPPDRWMTNARMTHYQSLLLNERVSFAPPAVLNPATLLPVESEATPVHRCSEILAEETGTRRDLKDQPLPGVPAWYTDGSSFIAEGKRRAGAAIVDGKRTVWASSLPEGTSAQKAELVALTQALRLAEGKDINIYTDSRYAFATAHIHGAIYKQRGWLTSAGKDIKNKEEILALLEAIHLPKRVAIIHCPGHQKGNDPVATGNRRADEAAKQAALSTRVLAETTKPAGKRTADGSEFEKRTADGSEFESPKKKAKVE

SEQ ID NO: 911 - protein, 2098 aa, synthetic construct
MPAAKRVKLDGGDKKYSIGLDIGTNSVGWAVITDEYKVPSKKFKVLGNTDRHSIKKNLIGALLFDSGETAEATRLKRTARRRYTRRKNRICYLQEIFSNEMAKVDDSFFHRLEESFLVEEDKKHERHPIFGNIVDEVAYHEKYPTIYHLRKKLVDSTDKADLRLIYLALAHMIKFRGHFLIEGDLNPDNSDVDKLFIQLVQTYNQLFEENPINASGVDAKAILSARLSKSRRLENLIAQLPGEKKNGLFGNLIALSLGLTPNFKSNFDLAEDAKLQLSKDTYDDDLDNLLAQIGDQYADLFLAAKNLSDAILLSDILRVNTEITKAPLSASMIKRYDEHHQDLTLLKALVRQQLPEKYKEIFFDQSKNGYAGYIDGGASQEEFYKFIKPILEKMDGTEELLVKLNREDLLRKQRTFDNGSIPHQIHLGELHAILRRQEDFYPFLKDNREKIEKILTFRIPYYVGPLARGNSRFAWMTRKSEETITPWNFEEVVDKGASAQSFIERMTNFDKNLPNEKVLPKHSLLYEYFTVYNELTKVKYVTEGMRKPAFLSGEQKKAIVDLLFKTNRKVTVKQLKEDYFKKIECFDSVEISGVEDRFNASLGTYHDLLKIIKDKDFLDNEENEDILEDIVLTLTLFEDREMIEERLKTYAHLFDDKVMKQLKRRRYTGWGRLSRKLINGIRDKQSGKTILDFLKSDGFANRNFMQLIHDDSLTFKEDIQKAQVSGQGDSLHEHIANLAGSPAIKKGILQTVKVVDELVKVMGRHKPENIVIEMARENQTTQKGQKNSRERMKRIEEGIKELGSQILKEHPVENTQLQNEKLYLYYLQNGRDMYVDQELDINRLSDYDVDHIVPQSFLKDDSIDNKVLTRSDKARGKSDNVPSEEVVKKMKNYWRQLLNAKLITQRKFDNLTKAERGGLSELDKAGFIKRQLVETRQITKHVAQILDSRMNTKYDENDKLIREVKVITLKSKLVSDFRKDFQFYKVREINNYHHAHDAYLNAVVGTALIKKYPKLESEFVYGDYKVYDVRKMIAKSEQEIGKATAKYFFYSNIMNFFKTEITLANGEIRKRPLIETNGETGEIVWDKGRDFATVRKVLSMPQVNIVKKTEVQTGGFSKESILPKRNSDKLIARKKDWDPKKYGGFDSPTVAYSVLVVAKVEKGKSKKLKSVKELLGITIMERSSFEKNPIDFLEAKGYKEVKKDLIIKLPKYSLFELENGRKRMLASAGELQKGNELALPSKYVNFLYLASHYEKLKGSPEDNEQKQLFVEQHKHYLDEIIEQISEFSKRVILADANLDKVLSAYNKHRDKPIREQAENIIHLFTLTNLGAPAAFKYFDTTIDRKRYTSTKEVLDATLIHQSITGLYETRIDLSQLGGDGGGGGGSEAAAKGGGGSGGVLNLEEEYRLHEKPVPSSIDPSWLQLFPTVWAERAGMGLANQVPPVVVELRSGASPVAVRQYPMSKEAREGIRPHIQRFLDLGVLVPCQSPWNTPLLPVKKPGTNDYRPVQDLREINKRVQDIHPTVPNPYNLLSSLPPSHTWYSVLDLKDAFFCLKLHPNSQPLFAFEWRDPEKGNTGQLTWTRLPQGFKNSPTLFNEALHRDLAPFRALNPQVVLLQYVDDLLVAAPTYRDCKEGTQKLLQELSKLGYRVSAKKAQLCQKEVTYLGYLLKEGKRWLTPARKATVMKIPPPTTPRQVREFLGKAGFCRLFIPGFASLAAPLYPLTKPSIPFIWTEEHQKAFDRIKEALLSAPALALPDLTKPFTLYVDERAGVARGVLTQTLGPWRRPVAYLSKKLDPVASGWPTCLKAVAAVALLLKDADKLTLGQNVTVIASHSLESIVRQPPDRWMTNARMTHYQSLLLNERVSFAPPAVLNPATLLPVESEATPVHRCSEILAEETGTRRDLKDQPLPGVPAWYTDGSSFIAEGKRRAGAAIVDGKRTVWASSLPEGTSAQKAELVALTQALRLAEGKDINIYTDSRYAFATAHIHGAIYKQRGWLTSAGKDIKNKEEILALLEAIHLPKRVAIIHCPGHQKGNDPVATGNRRADEAAKQAALSTRVLAETTKPAGKRTADGSEFEKRTADGSEFESPKKKAKVE

SEQ ID NO: 912 - protein, 2094 aa, synthetic construct
MPAAKRVKLDGGDKKYSIGLDIGTNSVGWAVITDEYKVPSKKFKVLGNTDRHSIKKNLIGALLFDSGETAEATRLKRTARRRYTRRKNRICYLQEIFSNEMAKVDDSFFHRLEESFLVEEDKKHERHPIFGNIVDEVAYHEKYPTIYHLRKKLVDSTDKADLRLIYLALAHMIKFRGHFLIEGDLNPDNSDVDKLFIQLVQTYNQLFEENPINASGVDAKAILSARLSKSRRLENLIAQLPGEKKNGLFGNLIALSLGLTPNFKSNFDLAEDAKLQLSKDTYDDDLDNLLAQIGDQYADLFLAAKNLSDAILLSDILRVNTEITKAPLSASMIKRYDEHHQDLTLLKALVRQQLPEKYKEIFFDQSKNGYAGYIDGGASQEEFYKFIKPILEKMDGTEELLVKLNREDLLRKQRTFDNGSIPHQIHLGELHAILRRQEDFYPFLKDNREKIEKILTFRIPYYVGPLARGNSRFAWMTRKSEETITPWNFEEVVDKGASAQSFIERMTNFDKNLPNEKVLPKHSLLYEYFTVYNELTKVKYVTEGMRKPAFLSGEQKKAIVDLLFKTNRKVTVKQLKEDYFKKIECFDSVEISGVEDRFNASLGTYHDLLKIIKDKDFLDNEENEDILEDIVLTLTLFEDREMIEERLKTYAHLFDDKVMKQLKRRRYTGWGRLSRKLINGIRDKQSGKTILDFLKSDGFANRNFMQLIHDDSLTFKEDIQKAQVSGQGDSLHEHIANLAGSPAIKKGILQTVKVVDELVKVMGRHKPENIVIEMARENQTTQKGQKNSRERMKRIEEGIKELGSQILKEHPVENTQLQNEKLYLYYLQNGRDMYVDQELDINRLSDYDVDHIVPQSFLKDDSIDNKVLTRSDKARGKSDNVPSEEVVKKMKNYWRQLLNAKLITQRKFDNLTKAERGGLSELDKAGFIKRQLVETRQITKHVAQILDSRMNTKYDENDKLIREVKVITLKSKLVSDFRKDFQFYKVREINNYHHAHDAYLNAVVGTALIKKYPKLESEFVYGDYKVYDVRKMIAKSEQEIGKATAKYFFYSNIMNFFKTEITLANGEIRKRPLIETNGETGEIVWDKGRDFATVRKVLSMPQVNIVKKTEVQTGGFSKESILPKRNSDKLIARKKDWDPKKYGGFDSPTVAYSVLVVAKVEKGKSKKLKSVKELLGITIMERSSFEKNPIDFLEAKGYKEVKKDLIIKLPKYSLFELENGRKRMLASAGELQKGNELALPSKYVNFLYLASHYEKLKGSPEDNEQKQLFVEQHKHYLDEIIEQISEFSKRVILADANLDKVLSAYNKHRDKPIREQAENIIHLFTLTNLGAPAAFKYFDTTIDRKRYTSTKEVLDATLIHQSITGLYETRIDLSQLGGDGGGGSEAAAKPAPGGVLNLEEEYRLHEKPVPSSIDPSWLQLFPTVWAERAGMGLANQVPPVVVELRSGASPVAVRQYPMSKEAREGIRPHIQRFLDLGVLVPCQSPWNTPLLPVKKPGTNDYRPVQDLREINKRVQDIHPTVPNPYNLLSSLPPSHTWYSVLDLKDAFFCLKLHPNSQPLFAFEWRDPEKGNTGQLTWTRLPQGFKNSPTLFNEALHRDLAPFRALNPQVVLLQYVDDLLVAAPTYRDCKEGTQKLLQELSKLGYRVSAKKAQLCQKEVTYLGYLLKEGKRWLTPARKATVMKIPPPTTPRQVREFLGKAGFCRLFIPGFASLAAPLYPLTKPSIPFIWTEEHQKAFDRIKEALLSAPALALPDLTKPFTLYVDERAGVARGVLTQTLGPWRRPVAYLSKKLDPVASGWPTCLKAVAAVALLLKDADKLTLGQNVTVIASHSLESIVRQPPDRWMTNARMTHYQSLLLNERVSFAPPAVLNPATLLPVESEATPVHRCSEILAEETGTRRDLKDQPLPGVPAWYTDGSSFIAEGKRRAGAAIVDGKRTVWASSLPEGTSAQKAELVALTQALRLAEGKDINIYTDSRYAFATAHIHGAIYKQRGWLTSAGKDIKNKEEILALLEAIHLPKRVAIIHCPGHQKGNDPVATGNRRADEAAKQAALSTRVLAETTKPAGKRTADGSEFEKRTADGSEFESPKKKAKVE

SEQ ID NO: 913 - protein, 2092 aa, synthetic construct
MPAAKRVKLDGGDKKYSIGLDIGTNSVGWAVITDEYKVPSKKFKVLGNTDRHSIKKNLIGALLFDSGETAEATRLKRTARRRYTRRKNRICYLQEIFSNEMAKVDDSFFHRLEESFLVEEDKKHERHPIFGNIVDEVAYHEKYPTIYHLRKKLVDSTDKADLRLIYLALAHMIKFRGHFLIEGDLNPDNSDVDKLFIQLVQTYNQLFEENPINASGVDAKAILSARLSKSRRLENLIAQLPGEKKNGLFGNLIALSLGLTPNFKSNFDLAEDAKLQLSKDTYDDDLDNLLAQIGDQYADLFLAAKNLSDAILLSDILRVNTEITKAPLSASMIKRYDEHHQDLTLLKALVRQQLPEKYKEIFFDQSKNGYAGYIDGGASQEEFYKFIKPILEKMDGTEELLVKLNREDLLRKQRTFDNGSIPHQIHLGELHAILRRQEDFYPFLKDNREKIEKILTFRIPYYVGPLARGNSRFAWMTRKSEETITPWNFEEVVDKGASAQSFIERMTNFDKNLPNEKVLPKHSLLYEYFTVYNELTKVKYVTEGMRKPAFLSGEQKKAIVDLLFKTNRKVTVKQLKEDYFKKIECFDSVEISGVEDRFNASLGTYHDLLKIIKDKDFLDNEENEDILEDIVLTLTLFEDREMIEERLKTYAHLFDDKVMKQLKRRRYTGWGRLSRKLINGIRDKQSGKTILDFLKSDGFANRNFMQLIHDDSLTFKEDIQKAQVSGQGDSLHEHIANLAGSPAIKKGILQTVKVVDELVKVMGRHKPENIVIEMARENQTTQKGQKNSRERMKRIEEGIKELGSQILKEHPVENTQLQNEKLYLYYLQNGRDMYVDQELDINRLSDYDVDHIVPQSFLKDDSIDNKVLTRSDKARGKSDNVPSEEVVKKMKNYWRQLLNAKLITQRKFDNLTKAERGGLSELDKAGFIKRQLVETRQITKHVAQILDSRMNTKYDENDKLIREVKVITLKSKLVSDFRKDFQFYKVREINNYHHAHDAYLNAVVGTALIKKYPKLESEFVYGDYKVYDVRKMIAKSEQEIGKATAKYFFYSNIMNFFKTEITLANGEIRKRPLIETNGETGEIVWDKGRDFATVRKVLSMPQVNIVKKTEVQTGGFSKESILPKRNSDKLIARKKDWDPKKYGGFDSPTVAYSVLVVAKVEKGKSKKLKSVKELLGITIMERSSFEKNPIDFLEAKGYKEVKKDLIIKLPKYSLFELENGRKRMLASAGELQKGNELALPSKYVNFLYLASHYEKLKGSPEDNEQKQLFVEQHKHYLDEIIEQISEFSKRVILADANLDKVLSAYNKHRDKPIREQAENIIHLFTLTNLGAPAAFKYFDTTIDRKRYTSTKEVLDATLIHQSITGLYETRIDLSQLGGDGGGGGPAPGSSGGVLNLEEEYRLHEKPVPSSIDPSWLQLFPTVWAERAGMGLANQVPPVVVELRSGASPVAVRQYPMSKEAREGIRPHIQRFLDLGVLVPCQSPWNTPLLPVKKPGTNDYRPVQDLREINKRVQDIHPTVPNPYNLLSSLPPSHTWYSVLDLKDAFFCLKLHPNSQPLFAFEWRDPEKGNTGQLTWTRLPQGFKNSPTLFNEALHRDLAPFRALNPQVVLLQYVDDLLVAAPTYRDCKEGTQKLLQELSKLGYRVSAKKAQLCQKEVTYLGYLLKEGKRWLTPARKATVMKIPPPTTPRQVREFLGKAGFCRLFIPGFASLAAPLYPLTKPSIPFIWTEEHQKAFDRIKEALLSAPALALPDLTKPFTLYVDERAGVARGVLTQTLGPWRRPVAYLSKKLDPVASGWPTCLKAVAAVALLLKDADKLTLGQNVTVIASHSLESIVRQPPDRWMTNARMTHYQSLLLNERVSFAPPAVLNPATLLPVESEATPVHRCSEILAEETGTRRDLKDQPLPGVPAWYTDGSSFIAEGKRRAGAAIVDGKRTVWASSLPEGTSAQKAELVALTQALRLAEGKDINIYTDSRYAFATAHIHGAIYKQRGWLTSAGKDIKNKEEILALLEAIHLPKRVAIIHCPGHQKGNDPVATGNRRADEAAKQAALSTRVLAETTKPAGKRTADGSEFEKRTADGSEFESPKKKAKVE

SEQ ID NO: 914 - protein, 2089 aa, synthetic construct
MPAAKRVKLDGGDKKYSIGLDIGTNSVGWAVITDEYKVPSKKFKVLGNTDRHSIKKNLIGALLFDSGETAEATRLKRTARRRYTRRKNRICYLQEIFSNEMAKVDDSFFHRLEESFLVEEDKKHERHPIFGNIVDEVAYHEKYPTIYHLRKKLVDSTDKADLRLIYLALAHMIKFRGHFLIEGDLNPDNSDVDKLFIQLVQTYNQLFEENPINASGVDAKAILSARLSKSRRLENLIAQLPGEKKNGLFGNLIALSLGLTPNFKSNFDLAEDAKLQLSKDTYDDDLDNLLAQIGDQYADLFLAAKNLSDAILLSDILRVNTEITKAPLSASMIKRYDEHHQDLTLLKALVRQQLPEKYKEIFFDQSKNGYAGYIDGGASQEEFYKFIKPILEKMDGTEELLVKLNREDLLRKQRTFDNGSIPHQIHLGELHAILRRQEDFYPFLKDNREKIEKILTFRIPYYVGPLARGNSRFAWMTRKSEETITPWNFEEVVDKGASAQSFIERMTNFDKNLPNEKVLPKHSLLYEYFTVYNELTKVKYVTEGMRKPAFLSGEQKKAIVDLLFKTNRKVTVKQLKEDYFKKIECFDSVEISGVEDRFNASLGTYHDLLKIIKDKDFLDNEENEDILEDIVLTLTLFEDREMIEERLKTYAHLFDDKVMKQLKRRRYTGWGRLSRKLINGIRDKQSGKTILDFLKSDGFANRNFMQLIHDDSLTFKEDIQKAQVSGQGDSLHEHIANLAGSPAIKKGILQTVKVVDELVKVMGRHKPENIVIEMARENQTTQKGQKNSRERMKRIEEGIKELGSQILKEHPVENTQLQNEKLYLYYLQNGRDMYVDQELDINRLSDYDVDHIVPQSFLKDDSIDNKVLTRSDKARGKSDNVPSEEVVKKMKNYWRQLLNAKLITQRKFDNLTKAERGGLSELDKAGFIKRQLVETRQITKHVAQILDSRMNTKYDENDKLIREVKVITLKSKLVSDFRKDFQFYKVREINNYHHAHDAYLNAVVGTALIKKYPKLESEFVYGDYKVYDVRKMIAKSEQEIGKATAKYFFYSNIMNFFKTEITLANGEIRKRPLIETNGETGEIVWDKGRDFATVRKVLSMPQVNIVKKTEVQTGGFSKESILPKRNSDKLIARKKDWDPKKYGGFDSPTVAYSVLVVAKVEKGKSKKLKSVKELLGITIMERSSFEKNPIDFLEAKGYKEVKKDLIIKLPKYSLFELENGRKRMLASAGELQKGNELALPSKYVNFLYLASHYEKLKGSPEDNEQKQLFVEQHKHYLDEIIEQISEFSKRVILADANLDKVLSAYNKHRDKPIREQAENIIHLFTLTNLGAPAAFKYFDTTIDRKRYTSTKEVLDATLIHQSITGLYETRIDLSQLGGDGGPAPGGGGGVLNLEEEYRLHEKPVPSSIDPSWLQLFPTVWAERAGMGLANQVPPVVVELRSGASPVAVRQYPMSKEAREGIRPHIQRFLDLGVLVPCQSPWNTPLLPVKKPGTNDYRPVQDLREINKRVQDIHPTVPNPYNLLSSLPPSHTWYSVLDLKDAFFCLKLHPNSQPLFAFEWRDPEKGNTGQLTWTRLPQGFKNSPTLFNEALHRDLAPFRALNPQVVLLQYVDDLLVAAPTYRDCKEGTQKLLQELSKLGYRVSAKKAQLCQKEVTYLGYLLKEGKRWLTPARKATVMKIPPPTTPRQVREFLGKAGFCRLFIPGFASLAAPLYPLTKPSIPFIWTEEHQKAFDRIKEALLSAPALALPDLTKPFTLYVDERAGVARGVLTQTLGPWRRPVAYLSKKLDPVASGWPTCLKAVAAVALLLKDADKLTLGQNVTVIASHSLESIVRQPPDRWMTNARMTHYQSLLLNERVSFAPPAVLNPATLLPVESEATPVHRCSEILAEETGTRRDLKDQPLPGVPAWYTDGSSFIAEGKRRAGAAIVDGKRTVWASSLPEGTSAQKAELVALTQALRLAEGKDINIYTDSRYAFATAHIHGAIYKQRGWLTSAGKDIKNKEEILALLEAIHLPKRVAIIHCPGHQKGNDPVATGNRRADEAAKQAALSTRVLAETTKPAGKRTADGSEFEKRTADGSEFESPKKKAKVE

SEQ ID NO: 915 - protein, 2094 aa, synthetic construct
MPAAKRVKLDGGDKKYSIGLDIGTNSVGWAVITDEYKVPSKKFKVLGNTDRHSIKKNLIGALLFDSGETAEATRLKRTARRRYTRRKNRICYLQEIFSNEMAKVDDSFFHRLEESFLVEEDKKHERHPIFGNIVDEVAYHEKYPTIYHLRKKLVDSTDKADLRLIYLALAHMIKFRGHFLIEGDLNPDNSDVDKLFIQLVQTYNQLFEENPINASGVDAKAILSARLSKSRRLENLIAQLPGEKKNGLFGNLIALSLGLTPNFKSNFDLAEDAKLQLSKDTYDDDLDNLLAQIGDQYADLFLAAKNLSDAILLSDILRVNTEITKAPLSASMIKRYDEHHQDLTLLKALVRQQLPEKYKEIFFDQSKNGYAGYIDGGASQEEFYKFIKPILEKMDGTEELLVKLNREDLLRKQRTFDNGSIPHQIHLGELHAILRRQEDFYPFLKDNREKIEKILTFRIPYYVGPLARGNSRFAWMTRKSEETITPWNFEEVVDKGASAQSFIERMTNFDKNLPNEKVLPKHSLLYEYFTVYNELTKVKYVTEGMRKPAFLSGEQKKAIVDLLFKTNRKVTVKQLKEDYFKKIECFDSVEISGVEDRFNASLGTYHDLLKIIKDKDFLDNEENEDILEDIVLTLTLFEDREMIEERLKTYAHLFDDKVMKQLKRRRYTGWGRLSRKLINGIRDKQSGKTILDFLKSDGFANRNFMQLIHDDSLTFKEDIQKAQVSGQGDSLHEHIANLAGSPAIKKGILQTVKVVDELVKVMGRHKPENIVIEMARENQTTQKGQKNSRERMKRIEEGIKELGSQILKEHPVENTQLQNEKLYLYYLQNGRDMYVDQELDINRLSDYDVDHIVPQSFLKDDSIDNKVLTRSDKARGKSDNVPSEEVVKKMKNYWRQLLNAKLITQRKFDNLTKAERGGLSELDKAGFIKRQLVETRQITKHVAQILDSRMNTKYDENDKLIREVKVITLKSKLVSDFRKDFQFYKVREINNYHHAHDAYLNAVVGTALIKKYPKLESEFVYGDYKVYDVRKMIAKSEQEIGKATAKYFFYSNIMNFFKTEITLANGEIRKRPLIETNGETGEIVWDKGRDFATVRKVLSMPQVNIVKKTEVQTGGFSKESILPKRNSDKLIARKKDWDPKKYGGFDSPTVAYSVLVVAKVEKGKSKKLKSVKELLGITIMERSSFEKNPIDFLEAKGYKEVKKDLIIKLPKYSLFELENGRKRMLASAGELQKGNELALPSKYVNFLYLASHYEKLKGSPEDNEQKQLFVEQHKHYLDEIIEQISEFSKRVILADANLDKVLSAYNKHRDKPIREQAENIIHLFTLTNLGAPAAFKYFDTTIDRKRYTSTKEVLDATLIHQSITGLYETRIDLSQLGGDGGGSSGGSEAAAKGGVLNLEEEYRLHEKPVPSSIDPSWLQLFPTVWAERAGMGLANQVPPVVVELRSGASPVAVRQYPMSKEAREGIRPHIQRFLDLGVLVPCQSPWNTPLLPVKKPGTNDYRPVQDLREINKRVQDIHPTVPNPYNLLSSLPPSHTWYSVLDLKDAFFCLKLHPNSQPLFAFEWRDPEKGNTGQLTWTRLPQGFKNSPTLFNEALHRDLAPFRALNPQVVLLQYVDDLLVAAPTYRDCKEGTQKLLQELSKLGYRVSAKKAQLCQKEVTYLGYLLKEGKRWLTPARKATVMKIPPPTTPRQVREFLGKAGFCRLFIPGFASLAAPLYPLTKPSIPFIWTEEHQKAFDRIKEALLSAPALALPDLTKPFTLYVDERAGVARGVLTQTLGPWRRPVAYLSKKLDPVASGWPTCLKAVAAVALLLKDADKLTLGQNVTVIASHSLESIVRQPPDRWMTNARMTHYQSLLLNERVSFAPPAVLNPATLLPVESEATPVHRCSEILAEETGTRRDLKDQPLPGVPAWYTDGSSFIAEGKRRAGAAIVDGKRTVWASSLPEGTSAQKAELVALTQALRLAEGKDINIYTDSRYAFATAHIHGAIYKQRGWLTSAGKDIKNKEEILALLEAIHLPKRVAIIHCPGHQKGNDPVATGNRRADEAAKQAALSTRVLAETTKPAGKRTADGSEFEKRTADGSEFESPKKKAKVE

SEQ ID NO: 916 - protein, 2092 aa, synthetic construct
MPAAKRVKLDGGDKKYSIGLDIGTNSVGWAVITDEYKVPSKKFKVLGNTDRHSIKKNLIGALLFDSGETAEATRLKRTARRRYTRRKNRICYLQEIFSNEMAKVDDSFFHRLEESFLVEEDKKHERHPIFGNIVDEVAYHEKYPTIYHLRKKLVDSTDKADLRLIYLALAHMIKFRGHFLIEGDLNPDNSDVDKLFIQLVQTYNQLFEENPINASGVDAKAILSARLSKSRRLENLIAQLPGEKKNGLFGNLIALSLGLTPNFKSNFDLAEDAKLQLSKDTYDDDLDNLLAQIGDQYADLFLAAKNLSDAILLSDILRVNTEITKAPLSASMIKRYDEHHQDLTLLKALVRQQLPEKYKEIFFDQSKNGYAGYIDGGASQEEFYKFIKPILEKMDGTEELLVKLNREDLLRKQRTFDNGSIPHQIHLGELHAILRRQEDFYPFLKDNREKIEKILTFRIPYYVGPLARGNSRFAWMTRKSEETITPWNFEEVVDKGASAQSFIERMTNFDKNLPNEKVLPKHSLLYEYFTVYNELTKVKYVTEGMRKPAFLSGEQKKAIVDLLFKTNRKVTVKQLKEDYFKKIECFDSVEISGVEDRFNASLGTYHDLLKIIKDKDFLDNEENEDILEDIVLTLTLFEDREMIEERLKTYAHLFDDKVMKQLKRRRYTGWGRLSRKLINGIRDKQSGKTILDFLKSDGFANRNFMQLIHDDSLTFKEDIQKAQVSGQGDSLHEHIANLAGSPAIKKGILQTVKVVDELVKVMGRHKPENIVIEMARENQTTQKGQKNSRERMKRIEEGIKELGSQILKEHPVENTQLQNEKLYLYYLQNGRDMYVDQELDINRLSDYDVDHIVPQSFLKDDSIDNKVLTRSDKARGKSDNVPSEEVVKKMKNYWRQLLNAKLITQRKFDNLTKAERGGLSELDKAGFIKRQLVETRQITKHVAQILDSRMNTKYDENDKLIREVKVITLKSKLVSDFRKDFQFYKVREINNYHHAHDAYLNAVVGTALIKKYPKLESEFVYGDYKVYDVRKMIAKSEQEIGKATAKYFFYSNIMNFFKTEITLANGEIRKRPLIETNGETGEIVWDKGRDFATVRKVLSMPQVNIVKKTEVQTGGFSKESILPKRNSDKLIARKKDWDPKKYGGFDSPTVAYSVLVVAKVEKGKSKKLKSVKELLGITIMERSSFEKNPIDFLEAKGYKEVKKDLIIKLPKYSLFELENGRKRMLASAGELQKGNELALPSKYVNFLYLASHYEKLKGSPEDNEQKQLFVEQHKHYLDEIIEQISEFSKRVILADANLDKVLSAYNKHRDKPIREQAENIIHLFTLTNLGAPAAFKYFDTTIDRKRYTSTKEVLDATLIHQSITGLYETRIDLSQLGGDGGPAPAPAPAPGGVLNLEEEYRLHEKPVPSSIDPSWLQLFPTVWAERAGMGLANQVPPVVVELRSGASPVAVRQYPMSKEAREGIRPHIQRFLDLGVLVPCQSPWNTPLLPVKKPGTNDYRPVQDLREINKRVQDIHPTVPNPYNLLSSLPPSHTWYSVLDLKDAFFCLKLHPNSQPLFAFEWRDPEKGNTGQLTWTRLPQGFKNSPTLFNEALHRDLAPFRALNPQVVLLQYVDDLLVAAPTYRDCKEGTQKLLQELSKLGYRVSAKKAQLCQKEVTYLGYLLKEGKRWLTPARKATVMKIPPPTTPRQVREFLGKAGFCRLFIPGFASLAAPLYPLTKPSIPFIWTEEHQKAFDRIKEALLSAPALALPDLTKPFTLYVDERAGVARGVLTQTLGPWRRPVAYLSKKLDPVASGWPTCLKAVAAVALLLKDADKLTLGQNVTVIASHSLESIVRQPPDRWMTNARMTHYQSLLLNERVSFAPPAVLNPATLLPVESEATPVHRCSEILAEETGTRRDLKDQPLPGVPAWYTDGSSFIAEGKRRAGAAIVDGKRTVWASSLPEGTSAQKAELVALTQALRLAEGKDINIYTDSRYAFATAHIHGAIYKQRGWLTSAGKDIKNKEEILALLEAIHLPKRVAIIHCPGHQKGNDPVATGNRRADEAAKQAALSTRVLAETTKPAGKRTADGSEFEKRTADGSEFESPKKKAKVE

SEQ ID NO: 917 - protein, 2093 aa, synthetic construct
MPAAKRVKLDGGDKKYSIGLDIGTNSVGWAVITDEYKVPSKKFKVLGNTDRHSIKKNLIGALLFDSGETAEATRLKRTARRRYTRRKNRICYLQEIFSNEMAKVDDSFFHRLEESFLVEEDKKHERHPIFGNIVDEVAYHEKYPTIYHLRKKLVDSTDKADLRLIYLALAHMIKFRGHFLIEGDLNPDNSDVDKLFIQLVQTYNQLFEENPINASGVDAKAILSARLSKSRRLENLIAQLPGEKKNGLFGNLIALSLGLTPNFKSNFDLAEDAKLQLSKDTYDDDLDNLLAQIGDQYADLFLAAKNLSDAILLSDILRVNTEITKAPLSASMIKRYDEHHQDLTLLKALVRQQLPEKYKEIFFDQSKNGYAGYIDGGASQEEFYKFIKPILEKMDGTEELLVKLNREDLLRKQRTFDNGSIPHQIHLGELHAILRRQEDFYPFLKDNREKIEKILTFRIPYYVGPLARGNSRFAWMTRKSEETITPWNFEEVVDKGASAQSFIERMTNFDKNLPNEKVLPKHSLLYEYFTVYNELTKVKYVTEGMRKPAFLSGEQKKAIVDLLFKTNRKVTVKQLKEDYFKKIECFDSVEISGVEDRFNASLGTYHDLLKIIKDKDFLDNEENEDILEDIVLTLTLFEDREMIEERLKTYAHLFDDKVMKQLKRRRYTGWGRLSRKLINGIRDKQSGKTILDFLKSDGFANRNFMQLIHDDSLTFKEDIQKAQVSGQGDSLHEHIANLAGSPAIKKGILQTVKVVDELVKVMGRHKPENIVIEMARENQTTQKGQKNSRERMKRIEEGIKELGSQILKEHPVENTQLQNEKLYLYYLQNGRDMYVDQELDINRLSDYDVDHIVPQSFLKDDSIDNKVLTRSDKARGKSDNVPSEEVVKKMKNYWRQLLNAKLITQRKFDNLTKAERGGLSELDKAGFIKRQLVETRQITKHVAQILDSRMNTKYDENDKLIREVKVITLKSKLVSDFRKDFQFYKVREINNYHHAHDAYLNAVVGTALIKKYPKLESEFVYGDYKVYDVRKMIAKSEQEIGKATAKYFFYSNIMNFFKTEITLANGEIRKRPLIETNGETGEIVWDKGRDFATVRKVLSMPQVNIVKKTEVQTGGFSKESILPKRNSDKLIARKKDWDPKKYGGFDSPTVAYSVLVVAKVEKGKSKKLKSVKELLGITIMERSSFEKNPIDFLEAKGYKEVKKDLIIKLPKYSLFELENGRKRMLASAGELQKGNELALPSKYVNFLYLASHYEKLKGSPEDNEQKQLFVEQHKHYLDEIIEQISEFSKRVILADANLDKVLSAYNKHRDKPIREQAENIIHLFTLTNLGAPAAFKYFDTTIDRKRYTSTKEVLDATLIHQSITGLYETRIDLSQLGGDGGEAAAKEAAAKGGVLNLEEEYRLHEKPVPSSIDPSWLQLFPTVWAERAGMGLANQVPPVVVELRSGASPVAVRQYPMSKEAREGIRPHIQRFLDLGVLVPCQSPWNTPLLPVKKPGTNDYRPVQDLREINKRVQDIHPTVPNPYNLLSSLPPSHTWYSVLDLKDAFFCLKLHPNSQPLFAFEWRDPEKGNTGQLTWTRLPQGFKNSPTLFNEALHRDLAPFRALNPQVVLLQYVDDLLVAAPTYRDCKEGTQKLLQELSKLGYRVSAKKAQLCQKEVTYLGYLLKEGKRWLTPARKATVMKIPPPTTPRQVREFLGKAGFCRLFIPGFASLAAPLYPLTKPSIPFIWTEEHQKAFDRIKEALLSAPALALPDLTKPFTLYVDERAGVARGVLTQTLGPWRRPVAYLSKKLDPVASGWPTCLKAVAAVALLLKDADKLTLGQNVTVIASHSLESIVRQPPDRWMTNARMTHYQSLLLNERVSFAPPAVLNPATLLPVESEATPVHRCSEILAEETGTRRDLKDQPLPGVPAWYTDGSSFIAEGKRRAGAAIVDGKRTVWASSLPEGTSAQKAELVALTQALRLAEGKDINIYTDSRYAFATAHIHGAIYKQRGWLTSAGKDIKNKEEILALLEAIHLPKRVAIIHCPGHQKGNDPVATGNRRADEAAKQAALSTRVLAETTKPAGKRTADGSEFEKRTADGSEFESPKKKAKVE

SEQ ID NO: 918 - protein, 2092 aa, synthetic construct
MPAAKRVKLDGGDKKYSIGLDIGTNSVGWAVITDEYKVPSKKFKVLGNTDRHSIKKNLIGALLFDSGETAEATRLKRTARRRYTRRKNRICYLQEIFSNEMAKVDDSFFHRLEESFLVEEDKKHERHPIFGNIVDEVAYHEKYPTIYHLRKKLVDSTDKADLRLIYLALAHMIKFRGHFLIEGDLNPDNSDVDKLFIQLVQTYNQLFEENPINASGVDAKAILSARLSKSRRLENLIAQLPGEKKNGLFGNLIALSLGLTPNFKSNFDLAEDAKLQLSKDTYDDDLDNLLAQIGDQYADLFLAAKNLSDAILLSDILRVNTEITKAPLSASMIKRYDEHHQDLTLLKALVRQQLPEKYKEIFFDQSKNGYAGYIDGGASQEEFYKFIKPILEKMDGTEELLVKLNREDLLRKQRTFDNGSIPHQIHLGELHAILRRQEDFYPFLKDNREKIEKILTFRIPYYVGPLARGNSRFAWMTRKSEETITPWNFEEVVDKGASAQSFIERMTNFDKNLPNEKVLPKHSLLYEYFTVYNELTKVKYVTEGMRKPAFLSGEQKKAIVDLLFKTNRKVTVKQLKEDYFKKIECFDSVEISGVEDRFNASLGTYHDLLKIIKDKDFLDNEENEDILEDIVLTLTLFEDREMIEERLKTYAHLFDDKVMKQLKRRRYTGWGRLSRKLINGIRDKQSGKTILDFLKSDGFANRNFMQLIHDDSLTFKEDIQKAQVSGQGDSLHEHIANLAGSPAIKKGILQTVKVVDELVKVMGRHKPENIVIEMARENQTTQKGQKNSRERMKRIEEGIKELGSQILKEHPVENTQLQNEKLYLYYLQNGRDMYVDQELDINRLSDYDVDHIVPQSFLKDDSIDNKVLTRSDKARGKSDNVPSEEVVKKMKNYWRQLLNAKLITQRKFDNLTKAERGGLSELDKAGFIKRQLVETRQITKHVAQILDSRMNTKYDENDKLIREVKVITLKSKLVSDFRKDFQFYKVREINNYHHAHDAYLNAVVGTALIKKYPKLESEFVYGDYKVYDVRKMIAKSEQEIGKATAKYFFYSNIMNFFKTEITLANGEIRKRPLIETNGETGEIVWDKGRDFATVRKVLSMPQVNIVKKTEVQTGGFSKESILPKRNSDKLIARKKDWDPKKYGGFDSPTVAYSVLVVAKVEKGKSKKLKSVKELLGITIMERSSFEKNPIDFLEAKGYKEVKKDLIIKLPKYSLFELENGRKRMLASAGELQKGNELALPSKYVNFLYLASHYEKLKGSPEDNEQKQLFVEQHKHYLDEIIEQISEFSKRVILADANLDKVLSAYNKHRDKPIREQAENIIHLFTLTNLGAPAAFKYFDTTIDRKRYTSTKEVLDATLIHQSITGLYETRIDLSQLGGDGGGSSGGGGGSGGVLNLEEEYRLHEKPVPSSIDPSWLQLFPTVWAERAGMGLANQVPPVVVELRSGASPVAVRQYPMSKEAREGIRPHIQRFLDLGVLVPCQSPWNTPLLPVKKPGTNDYRPVQDLREINKRVQDIHPTVPNPYNLLSSLPPSHTWYSVLDLKDAFFCLKLHPNSQPLFAFEWRDPEKGNTGQLTWTRLPQGFKNSPTLFNEALHRDLAPFRALNPQVVLLQYVDDLLVAAPTYRDCKEGTQKLLQELSKLGYRVSAKKAQLCQKEVTYLGYLLKEGKRWLTPARKATVMKIPPPTTPRQVREFLGKAGFCRLFIPGFASLAAPLYPLTKPSIPFIWTEEHQKAFDRIKEALLSAPALALPDLTKPFTLYVDERAGVARGVLTQTLGPWRRPVAYLSKKLDPVASGWPTCLKAVAAVALLLKDADKLTLGQNVTVIASHSLESIVRQPPDRWMTNARMTHYQSLLLNERVSFAPPAVLNPATLLPVESEATPVHRCSEILAEETGTRRDLKDQPLPGVPAWYTDGSSFIAEGKRRAGAAIVDGKRTVWASSLPEGTSAQKAELVALTQALRLAEGKDINIYTDSRYAFATAHIHGAIYKQRGWLTSAGKDIKNKEEILALLEAIHLPKRVAIIHCPGHQKGNDPVATGNRRADEAAKQAALSTRVLAETTKPAGKRTADGSEFEKRTADGSEFESPKKKAKVE

SEQ ID NO: 919 - protein, 2094 aa, synthetic construct
MPAAKRVKLDGGDKKYSIGLDIGTNSVGWAVITDEYKVPSKKFKVLGNTDRHSIKKNLIGALLFDSGETAEATRLKRTARRRYTRRKNRICYLQEIFSNEMAKVDDSFFHRLEESFLVEEDKKHERHPIFGNIVDEVAYHEKYPTIYHLRKKLVDSTDKADLRLIYLALAHMIKFRGHFLIEGDLNPDNSDVDKLFIQLVQTYNQLFEENPINASGVDAKAILSARLSKSRRLENLIAQLPGEKKNGLFGNLIALSLGLTPNFKSNFDLAEDAKLQLSKDTYDDDLDNLLAQIGDQYADLFLAAKNLSDAILLSDILRVNTEITKAPLSASMIKRYDEHHQDLTLLKALVRQQLPEKYKEIFFDQSKNGYAGYIDGGASQEEFYKFIKPILEKMDGTEELLVKLNREDLLRKQRTFDNGSIPHQIHLGELHAILRRQEDFYPFLKDNREKIEKILTFRIPYYVGPLARGNSRFAWMTRKSEETITPWNFEEVVDKGASAQSFIERMTNFDKNLPNEKVLPKHSLLYEYFTVYNELTKVKYVTEGMRKPAFLSGEQKKAIVDLLFKTNRKVTVKQLKEDYFKKIECFDSVEISGVEDRFNASLGTYHDLLKIIKDKDFLDNEENEDILEDIVLTLTLFEDREMIEERLKTYAHLFDDKVMKQLKRRRYTGWGRLSRKLINGIRDKQSGKTILDFLKSDGFANRNFMQLIHDDSLTFKEDIQKAQVSGQGDSLHEHIANLAGSPAIKKGILQTVKVVDELVKVMGRHKPENIVIEMARENQTTQKGQKNSRERMKRIEEGIKELGSQILKEHPVENTQLQNEKLYLYYLQNGRDMYVDQELDINRLSDYDVDHIVPQSFLKDDSIDNKVLTRSDKARGKSDNVPSEEVVKKMKNYWRQLLNAKLITQRKFDNLTKAERGGLSELDKAGFIKRQLVETRQITKHVAQILDSRMNTKYDENDKLIREVKVITLKSKLVSDFRKDFQFYKVREINNYHHAHDAYLNAVVGTALIKKYPKLESEFVYGDYKVYDVRKMIAKSEQEIGKATAKYFFYSNIMNFFKTEITLANGEIRKRPLIETNGETGEIVWDKGRDFATVRKVLSMPQVNIVKKTEVQTGGFSKESILPKRNSDKLIARKKDWDPKKYGGFDSPTVAYSVLVVAKVEKGKSKKLKSVKELLGITIMERSSFEKNPIDFLEAKGYKEVKKDLIIKLPKYSLFELENGRKRMLASAGELQKGNELALPSKYVNFLYLASHYEKLKGSPEDNEQKQLFVEQHKHYLDEIIEQISEFSKRVILADANLDKVLSAYNKHRDKPIREQAENIIHLFTLTNLGAPAAFKYFDTTIDRKRYTSTKEVLDATLIHQSITGLYETRIDLSQLGGDGGEAAAKGSSPAPGGVLNLEEEYRLHEKPVPSSIDPSWLQLFPTVWAERAGMGLANQVPPVVVELRSGASPVAVRQYPMSKEAREGIRPHIQRFLDLGVLVPCQSPWNTPLLPVKKPGTNDYRPVQDLREINKRVQDIHPTVPNPYNLLSSLPPSHTWYSVLDLKDAFFCLKLHPNSQPLFAFEWRDPEKGNTGQLTWTRLPQGFKNSPTLFNEALHRDLAPFRALNPQVVLLQYVDDLLVAAPTYRDCKEGTQKLLQELSKLGYRVSAKKAQLCQKEVTYLGYLLKEGKRWLTPARKATVMKIPPPTTPRQVREFLGKAGFCRLFIPGFASLAAPLYPLTKPSIPFIWTEEHQKAFDRIKEALLSAPALALPDLTKPFTLYVDERAGVARGVLTQTLGPWRRPVAYLSKKLDPVASGWPTCLKAVAAVALLLKDADKLTLGQNVTVIASHSLESIVRQPPDRWMTNARMTHYQSLLLNERVSFAPPAVLNPATLLPVESEATPVHRCSEILAEETGTRRDLKDQPLPGVPAWYTDGSSFIAEGKRRAGAAIVDGKRTVWASSLPEGTSAQKAELVALTQALRLAEGKDINIYTDSRYAFATAHIHGAIYKQRGWLTSAGKDIKNKEEILALLEAIHLPKRVAIIHCPGHQKGNDPVATGNRRADEAAKQAALSTRVLAETTKPAGKRTADGSEFEKRTADGSEFESPKKKAKVE

SEQ ID NO: 920 - protein, 2094 aa, synthetic construct
MPAAKRVKLDGGDKKYSIGLDIGTNSVGWAVITDEYKVPSKKFKVLGNTDRHSIKKNLIGALLFDSGETAEATRLKRTARRRYTRRKNRICYLQEIFSNEMAKVDDSFFHRLEESFLVEEDKKHERHPIFGNIVDEVAYHEKYPTIYHLRKKLVDSTDKADLRLIYLALAHMIKFRGHFLIEGDLNPDNSDVDKLFIQLVQTYNQLFEENPINASGVDAKAILSARLSKSRRLENLIAQLPGEKKNGLFGNLIALSLGLTPNFKSNFDLAEDAKLQLSKDTYDDDLDNLLAQIGDQYADLFLAAKNLSDAILLSDILRVNTEITKAPLSASMIKRYDEHHQDLTLLKALVRQQLPEKYKEIFFDQSKNGYAGYIDGGASQEEFYKFIKPILEKMDGTEELLVKLNREDLLRKQRTFDNGSIPHQIHLGELHAILRRQEDFYPFLKDNREKIEKILTFRIPYYVGPLARGNSRFAWMTRKSEETITPWNFEEVVDKGASAQSFIERMTNFDKNLPNEKVLPKHSLLYEYFTVYNELTKVKYVTEGMRKPAFLSGEQKKAIVDLLFKTNRKVTVKQLKEDYFKKIECFDSVEISGVEDRFNASLGTYHDLLKIIKDKDFLDNEENEDILEDIVLTLTLFEDREMIEERLKTYAHLFDDKVMKQLKRRRYTGWGRLSRKLINGIRDKQSGKTILDFLKSDGFANRNFMQLIHDDSLTFKEDIQKAQVSGQGDSLHEHIANLAGSPAIKKGILQTVKVVDELVKVMGRHKPENIVIEMARENQTTQKGQKNSRERMKRIEEGIKELGSQILKEHPVENTQLQNEKLYLYYLQNGRDMYVDQELDINRLSDYDVDHIVPQSFLKDDSIDNKVLTRSDKARGKSDNVPSEEVVKKMKNYWRQLLNAKLITQRKFDNLTKAERGGLSELDKAGFIKRQLVETRQITKHVAQILDSRMNTKYDENDKLIREVKVITLKSKLVSDFRKDFQFYKVREINNYHHAHDAYLNAVVGTALIKKYPKLESEFVYGDYKVYDVRKMIAKSEQEIGKATAKYFFYSNIMNFFKTEITLANGEIRKRPLIETNGETGEIVWDKGRDFATVRKVLSMPQVNIVKKTEVQTGGFSKESILPKRNSDKLIARKKDWDPKKYGGFDSPTVAYSVLVVAKVEKGKSKKLKSVKELLGITIMERSSFEKNPIDFLEAKGYKEVKKDLIIKLPKYSLFELENGRKRMLASAGELQKGNELALPSKYVNFLYLASHYEKLKGSPEDNEQKQLFVEQHKHYLDEIIEQISEFSKRVILADANLDKVLSAYNKHRDKPIREQAENIIHLFTLTNLGAPAAFKYFDTTIDRKRYTSTKEVLDATLIHQSITGLYETRIDLSQLGGDGGGSSGGGEAAAKGGVLNLEEEYRLHEKPVPSSIDPSWLQLFPTVWAERAGMGLANQVPPVVVELRSGASPVAVRQYPMSKEAREGIRPHIQRFLDLGVLVPCQSPWNTPLLPVKKPGTNDYRPVQDLREINKRVQDIHPTVPNPYNLLSSLPPSHTWYSVLDLKDAFFCLKLHPNSQPLFAFEWRDPEKGNTGQLTWTRLPQGFKNSPTLFNEALHRDLAPFRALNPQVVLLQYVDDLLVAAPTYRDCKEGTQKLLQELSKLGYRVSAKKAQLCQKEVTYLGYLLKEGKRWLTPARKATVMKIPPPTTPRQVREFLGKAGFCRLFIPGFASLAAPLYPLTKPSIPFIWTEEHQKAFDRIKEALLSAPALALPDLTKPFTLYVDERAGVARGVLTQTLGPWRRPVAYLSKKLDPVASGWPTCLKAVAAVALLLKDADKLTLGQNVTVIASHSLESIVRQPPDRWMTNARMTHYQSLLLNERVSFAPPAVLNPATLLPVESEATPVHRCSEILAEETGTRRDLKDQPLPGVPAWYTDGSSFIAEGKRRAGAAIVDGKRTVWASSLPEGTSAQKAELVALTQALRLAEGKDINIYTDSRYAFATAHIHGAIYKQRGWLTSAGKDIKNKEEILALLEAIHLPKRVAIIHCPGHQKGNDPVATGNRRADEAAKQAALSTRVLAETTKPAGKRTADGSEFEKRTADGSEFESPKKKAKVE

SEQ ID NO: 921 - protein, 2094 aa, synthetic construct
MPAAKRVKLDGGDKKYSIGLDIGTNSVGWAVITDEYKVPSKKFKVLGNTDRHSIKKNLIGALLFDSGETAEATRLKRTARRRYTRRKNRICYLQEIFSNEMAKVDDSFFHRLEESFLVEEDKKHERHPIFGNIVDEVAYHEKYPTIYHLRKKLVDSTDKADLRLIYLALAHMIKFRGHFLIEGDLNPDNSDVDKLFIQLVQTYNQLFEENPINASGVDAKAILSARLSKSRRLENLIAQLPGEKKNGLFGNLIALSLGLTPNFKSNFDLAEDAKLQLSKDTYDDDLDNLLAQIGDQYADLFLAAKNLSDAILLSDILRVNTEITKAPLSASMIKRYDEHHQDLTLLKALVRQQLPEKYKEIFFDQSKNGYAGYIDGGASQEEFYKFIKPILEKMDGTEELLVKLNREDLLRKQRTFDNGSIPHQIHLGELHAILRRQEDFYPFLKDNREKIEKILTFRIPYYVGPLARGNSRFAWMTRKSEETITPWNFEEVVDKGASAQSFIERMTNFDKNLPNEKVLPKHSLLYEYFTVYNELTKVKYVTEGMRKPAFLSGEQKKAIVDLLFKTNRKVTVKQLKEDYFKKIECFDSVEISGVEDRFNASLGTYHDLLKIIKDKDFLDNEENEDILEDIVLTLTLFEDREMIEERLKTYAHLFDDKVMKQLKRRRYTGWGRLSRKLINGIRDKQSGKTILDFLKSDGFANRNFMQLIHDDSLTFKEDIQKAQVSGQGDSLHEHIANLAGSPAIKKGILQTVKVVDELVKVMGRHKPENIVIEMARENQTTQKGQKNSRERMKRIEEGIKELGSQILKEHPVENTQLQNEKLYLYYLQNGRDMYVDQELDINRLSDYDVDHIVPQSFLKDDSIDNKVLTRSDKARGKSDNVPSEEVVKKMKNYWRQLLNAKLITQRKFDNLTKAERGGLSELDKAGFIKRQLVETRQITKHVAQILDSRMNTKYDENDKLIREVKVITLKSKLVSDFRKDFQFYKVREINNYHHAHDAYLNAVVGTALIKKYPKLESEFVYGDYKVYDVRKMIAKSEQEIGKATAKYFFYSNIMNFFKTEITLANGEIRKRPLIETNGETGEIVWDKGRDFATVRKVLSMPQVNIVKKTEVQTGGFSKESILPKRNSDKLIARKKDWDPKKYGGFDSPTVAYSVLVVAKVEKGKSKKLKSVKELLGITIMERSSFEKNPIDFLEAKGYKEVKKDLIIKLPKYSLFELENGRKRMLASAGELQKGNELALPSKYVNFLYLASHYEKLKGSPEDNEQKQLFVEQHKHYLDEIIEQISEFSKRVILADANLDKVLSAYNKHRDKPIREQAENIIHLFTLTNLGAPAAFKYFDTTIDRKRYTSTKEVLDATLIHQSITGLYETRIDLSQLGGDGGEAAAKPAPGGSGGVLNLEEEYRLHEKPVPSSIDPSWLQLFPTVWAERAGMGLANQVPPVVVELRSGASPVAVRQYPMSKEAREGIRPHIQRFLDLGVLVPCQSPWNTPLLPVKKPGTNDYRPVQDLREINKRVQDIHPTVPNPYNLLSSLPPSHTWYSVLDLKDAFFCLKLHPNSQPLFAFEWRDPEKGNTGQLTWTRLPQGFKNSPTLFNEALHRDLAPFRALNPQVVLLQYVDDLLVAAPTYRDCKEGTQKLLQELSKLGYRVSAKKAQLCQKEVTYLGYLLKEGKRWLTPARKATVMKIPPPTTPRQVREFLGKAGFCRLFIPGFASLAAPLYPLTKPSIPFIWTEEHQKAFDRIKEALLSAPALALPDLTKPFTLYVDERAGVARGVLTQTLGPWRRPVAYLSKKLDPVASGWPTCLKAVAAVALLLKDADKLTLGQNVTVIASHSLESIVRQPPDRWMTNARMTHYQSLLLNERVSFAPPAVLNPATLLPVESEATPVHRCSEILAEETGTRRDLKDQPLPGVPAWYTDGSSFIAEGKRRAGAAIVDGKRTVWASSLPEGTSAQKAELVALTQALRLAEGKDINIYTDSRYAFATAHIHGAIYKQRGWLTSAGKDIKNKEEILALLEAIHLPKRVAIIHCPGHQKGNDPVATGNRRADEAAKQAALSTRVLAETTKPAGKRTADGSEFEKRTADGSEFESPKKKAKVE

SEQ ID NO: 922 - protein, 2092 aa, synthetic construct
MPAAKRVKLDGGDKKYSIGLDIGTNSVGWAVITDEYKVPSKKFKVLGNTDRHSIKKNLIGALLFDSGETAEATRLKRTARRRYTRRKNRICYLQEIFSNEMAKVDDSFFHRLEESFLVEEDKKHERHPIFGNIVDEVAYHEKYPTIYHLRKKLVDSTDKADLRLIYLALAHMIKFRGHFLIEGDLNPDNSDVDKLFIQLVQTYNQLFEENPINASGVDAKAILSARLSKSRRLENLIAQLPGEKKNGLFGNLIALSLGLTPNFKSNFDLAEDAKLQLSKDTYDDDLDNLLAQIGDQYADLFLAAKNLSDAILLSDILRVNTEITKAPLSASMIKRYDEHHQDLTLLKALVRQQLPEKYKEIFFDQSKNGYAGYIDGGASQEEFYKFIKPILEKMDGTEELLVKLNREDLLRKQRTFDNGSIPHQIHLGELHAILRRQEDFYPFLKDNREKIEKILTFRIPYYVGPLARGNSRFAWMTRKSEETITPWNFEEVVDKGASAQSFIERMTNFDKNLPNEKVLPKHSLLYEYFTVYNELTKVKYVTEGMRKPAFLSGEQKKAIVDLLFKTNRKVTVKQLKEDYFKKIECFDSVEISGVEDRFNASLGTYHDLLKIIKDKDFLDNEENEDILEDIVLTLTLFEDREMIEERLKTYAHLFDDKVMKQLKRRRYTGWGRLSRKLINGIRDKQSGKTILDFLKSDGFANRNFMQLIHDDSLTFKEDIQKAQVSGQGDSLHEHIANLAGSPAIKKGILQTVKVVDELVKVMGRHKPENIVIEMARENQTTQKGQKNSRERMKRIEEGIKELGSQILKEHPVENTQLQNEKLYLYYLQNGRDMYVDQELDINRLSDYDVDHIVPQSFLKDDSIDNKVLTRSDKARGKSDNVPSEEVVKKMKNYWRQLLNAKLITQRKFDNLTKAERGGLSELDKAGFIKRQLVETRQITKHVAQILDSRMNTKYDENDKLIREVKVITLKSKLVSDFRKDFQFYKVREINNYHHAHDAYLNAVVGTALIKKYPKLESEFVYGDYKVYDVRKMIAKSEQEIGKATAKYFFYSNIMNFFKTEITLANGEIRKRPLIETNGETGEIVWDKGRDFATVRKVLSMPQVNIVKKTEVQTGGFSKESILPKRNSDKLIARKKDWDPKKYGGFDSPTVAYSVLVVAKVEKGKSKKLKSVKELLGITIMERSSFEKNPIDFLEAKGYKEVKKDLIIKLPKYSLFELENGRKRMLASAGELQKGNELALPSKYVNFLYLASHYEKLKGSPEDNEQKQLFVEQHKHYLDEIIEQISEFSKRVILADANLDKVLSAYNKHRDKPIREQAENIIHLFTLTNLGAPAAFKYFDTTIDRKRYTSTKEVLDATLIHQSITGLYETRIDLSQLGGDGGGSSPAPGGGGGVLNLEEEYRLHEKPVPSSIDPSWLQLFPTVWAERAGMGLANQVPPVVVELRSGASPVAVRQYPMSKEAREGIRPHIQRFLDLGVLVPCQSPWNTPLLPVKKPGTNDYRPVQDLREINKRVQDIHPTVPNPYNLLSSLPPSHTWYSVLDLKDAFFCLKLHPNSQPLFAFEWRDPEKGNTGQLTWTRLPQGFKNSPTLFNEALHRDLAPFRALNPQVVLLQYVDDLLVAAPTYRDCKEGTQKLLQELSKLGYRVSAKKAQLCQKEVTYLGYLLKEGKRWLTPARKATVMKIPPPTTPRQVREFLGKAGFCRLFIPGFASLAAPLYPLTKPSIPFIWTEEHQKAFDRIKEALLSAPALALPDLTKPFTLYVDERAGVARGVLTQTLGPWRRPVAYLSKKLDPVASGWPTCLKAVAAVALLLKDADKLTLGQNVTVIASHSLESIVRQPPDRWMTNARMTHYQSLLLNERVSFAPPAVLNPATLLPVESEATPVHRCSEILAEETGTRRDLKDQPLPGVPAWYTDGSSFIAEGKRRAGAAIVDGKRTVWASSLPEGTSAQKAELVALTQALRLAEGKDINIYTDSRYAFATAHIHGAIYKQRGWLTSAGKDIKNKEEILALLEAIHLPKRVAIIHCPGHQKGNDPVATGNRRADEAAKQAALSTRVLAETTKPAGKRTADGSEFEKRTADGSEFESPKKKAKVE

SEQ ID NO: 923 - protein, 2101 aa, synthetic construct
MPAAKRVKLDGGDKKYSIGLDIGTNSVGWAVITDEYKVPSKKFKVLGNTDRHSIKKNLIGALLFDSGETAEATRLKRTARRRYTRRKNRICYLQEIFSNEMAKVDDSFFHRLEESFLVEEDKKHERHPIFGNIVDEVAYHEKYPTIYHLRKKLVDSTDKADLRLIYLALAHMIKFRGHFLIEGDLNPDNSDVDKLFIQLVQTYNQLFEENPINASGVDAKAILSARLSKSRRLENLIAQLPGEKKNGLFGNLIALSLGLTPNFKSNFDLAEDAKLQLSKDTYDDDLDNLLAQIGDQYADLFLAAKNLSDAILLSDILRVNTEITKAPLSASMIKRYDEHHQDLTLLKALVRQQLPEKYKEIFFDQSKNGYAGYIDGGASQEEFYKFIKPILEKMDGTEELLVKLNREDLLRKQRTFDNGSIPHQIHLGELHAILRRQEDFYPFLKDNREKIEKILTFRIPYYVGPLARGNSRFAWMTRKSEETITPWNFEEVVDKGASAQSFIERMTNFDKNLPNEKVLPKHSLLYEYFTVYNELTKVKYVTEGMRKPAFLSGEQKKAIVDLLFKTNRKVTVKQLKEDYFKKIECFDSVEISGVEDRFNASLGTYHDLLKIIKDKDFLDNEENEDILEDIVLTLTLFEDREMIEERLKTYAHLFDDKVMKQLKRRRYTGWGRLSRKLINGIRDKQSGKTILDFLKSDGFANRNFMQLIHDDSLTFKEDIQKAQVSGQGDSLHEHIANLAGSPAIKKGILQTVKVVDELVKVMGRHKPENIVIEMARENQTTQKGQKNSRERMKRIEEGIKELGSQILKEHPVENTQLQNEKLYLYYLQNGRDMYVDQELDINRLSDYDVDHIVPQSFLKDDSIDNKVLTRSDKARGKSDNVPSEEVVKKMKNYWRQLLNAKLITQRKFDNLTKAERGGLSELDKAGFIKRQLVETRQITKHVAQILDSRMNTKYDENDKLIREVKVITLKSKLVSDFRKDFQFYKVREINNYHHAHDAYLNAVVGTALIKKYPKLESEFVYGDYKVYDVRKMIAKSEQEIGKATAKYFFYSNIMNFFKTEITLANGEIRKRPLIETNGETGEIVWDKGRDFATVRKVLSMPQVNIVKKTEVQTGGFSKESILPKRNSDKLIARKKDWDPKKYGGFDSPTVAYSVLVVAKVEKGKSKKLKSVKELLGITIMERSSFEKNPIDFLEAKGYKEVKKDLIIKLPKYSLFELENGRKRMLASAGELQKGNELALPSKYVNFLYLASHYEKLKGSPEDNEQKQLFVEQHKHYLDEIIEQISEFSKRVILADANLDKVLSAYNKHRDKPIREQAENIIHLFTLTNLGAPAAFKYFDTTIDRKRYTSTKEVLDATLIHQSITGLYETRIDLSQLGGDGGGSSGSSGSSGSSGSSGSSGGVLNLEEEYRLHEKPVPSSIDPSWLQLFPTVWAERAGMGLANQVPPVVVELRSGASPVAVRQYPMSKEAREGIRPHIQRFLDLGVLVPCQSPWNTPLLPVKKPGTNDYRPVQDLREINKRVQDIHPTVPNPYNLLSSLPPSHTWYSVLDLKDAFFCLKLHPNSQPLFAFEWRDPEKGNTGQLTWTRLPQGFKNSPTLFNEALHRDLAPFRALNPQVVLLQYVDDLLVAAPTYRDCKEGTQKLLQELSKLGYRVSAKKAQLCQKEVTYLGYLLKEGKRWLTPARKATVMKIPPPTTPRQVREFLGKAGFCRLFIPGFASLAAPLYPLTKPSIPFIWTEEHQKAFDRIKEALLSAPALALPDLTKPFTLYVDERAGVARGVLTQTLGPWRRPVAYLSKKLDPVASGWPTCLKAVAAVALLLKDADKLTLGQNVTVIASHSLESIVRQPPDRWMTNARMTHYQSLLLNERVSFAPPAVLNPATLLPVESEATPVHRCSEILAEETGTRRDLKDQPLPGVPAWYTDGSSFIAEGKRRAGAAIVDGKRTVWASSLPEGTSAQKAELVALTQALRLAEGKDINIYTDSRYAFATAHIHGAIYKQRGWLTSAGKDIKNKEEILALLEAIHLPKRVAIIHCPGHQKGNDPVATGNRRADEAAKQAALSTRVLAETTKPAGKRTADGSEFEKRTADGSEFESPKKKAKVE

SEQ ID NO: 924 - protein, 2092 aa, synthetic construct
MPAAKRVKLDGGDKKYSIGLDIGTNSVGWAVITDEYKVPSKKFKVLGNTDRHSIKKNLIGALLFDSGETAEATRLKRTARRRYTRRKNRICYLQEIFSNEMAKVDDSFFHRLEESFLVEEDKKHERHPIFGNIVDEVAYHEKYPTIYHLRKKLVDSTDKADLRLIYLALAHMIKFRGHFLIEGDLNPDNSDVDKLFIQLVQTYNQLFEENPINASGVDAKAILSARLSKSRRLENLIAQLPGEKKNGLFGNLIALSLGLTPNFKSNFDLAEDAKLQLSKDTYDDDLDNLLAQIGDQYADLFLAAKNLSDAILLSDILRVNTEITKAPLSASMIKRYDEHHQDLTLLKALVRQQLPEKYKEIFFDQSKNGYAGYIDGGASQEEFYKFIKPILEKMDGTEELLVKLNREDLLRKQRTFDNGSIPHQIHLGELHAILRRQEDFYPFLKDNREKIEKILTFRIPYYVGPLARGNSRFAWMTRKSEETITPWNFEEVVDKGASAQSFIERMTNFDKNLPNEKVLPKHSLLYEYFTVYNELTKVKYVTEGMRKPAFLSGEQKKAIVDLLFKTNRKVTVKQLKEDYFKKIECFDSVEISGVEDRFNASLGTYHDLLKIIKDKDFLDNEENEDILEDIVLTLTLFEDREMIEERLKTYAHLFDDKVMKQLKRRRYTGWGRLSRKLINGIRDKQSGKTILDFLKSDGFANRNFMQLIHDDSLTFKEDIQKAQVSGQGDSLHEHIANLAGSPAIKKGILQTVKVVDELVKVMGRHKPENIVIEMARENQTTQKGQKNSRERMKRIEEGIKELGSQILKEHPVENTQLQNEKLYLYYLQNGRDMYVDQELDINRLSDYDVDHIVPQSFLKDDSIDNKVLTRSDKARGKSDNVPSEEVVKKMKNYWRQLLNAKLITQRKFDNLTKAERGGLSELDKAGFIKRQLVETRQITKHVAQILDSRMNTKYDENDKLIREVKVITLKSKLVSDFRKDFQFYKVREINNYHHAHDAYLNAVVGTALIKKYPKLESEFVYGDYKVYDVRKMIAKSEQEIGKATAKYFFYSNIMNFFKTEITLANGEIRKRPLIETNGETGEIVWDKGRDFATVRKVLSMPQVNIVKKTEVQTGGFSKESILPKRNSDKLIARKKDWDPKKYGGFDSPTVAYSVLVVAKVEKGKSKKLKSVKELLGITIMERSSFEKNPIDFLEAKGYKEVKKDLIIKLPKYSLFELENGRKRMLASAGELQKGNELALPSKYVNFLYLASHYEKLKGSPEDNEQKQLFVEQHKHYLDEIIEQISEFSKRVILADANLDKVLSAYNKHRDKPIREQAENIIHLFTLTNLGAPAAFKYFDTTIDRKRYTSTKEVLDATLIHQSITGLYETRIDLSQLGGDGGGGSGSSPAPGGVLNLEEEYRLHEKPVPSSIDPSWLQLFPTVWAERAGMGLANQVPPVVVELRSGASPVAVRQYPMSKEAREGIRPHIQRFLDLGVLVPCQSPWNTPLLPVKKPGTNDYRPVQDLREINKRVQDIHPTVPNPYNLLSSLPPSHTWYSVLDLKDAFFCLKLHPNSQPLFAFEWRDPEKGNTGQLTWTRLPQGFKNSPTLFNEALHRDLAPFRALNPQVVLLQYVDDLLVAAPTYRDCKEGTQKLLQELSKLGYRVSAKKAQLCQKEVTYLGYLLKEGKRWLTPARKATVMKIPPPTTPRQVREFLGKAGFCRLFIPGFASLAAPLYPLTKPSIPFIWTEEHQKAFDRIKEALLSAPALALPDLTKPFTLYVDERAGVARGVLTQTLGPWRRPVAYLSKKLDPVASGWPTCLKAVAAVALLLKDADKLTLGQNVTVIASHSLESIVRQPPDRWMTNARMTHYQSLLLNERVSFAPPAVLNPATLLPVESEATPVHRCSEILAEETGTRRDLKDQPLPGVPAWYTDGSSFIAEGKRRAGAAIVDGKRTVWASSLPEGTSAQKAELVALTQALRLAEGKDINIYTDSRYAFATAHIHGAIYKQRGWLTSAGKDIKNKEEILALLEAIHLPKRVAIIHCPGHQKGNDPVATGNRRADEAAKQAALSTRVLAETTKPAGKRTADGSEFEKRTADGSEFESPKKKAKVE

SEQ ID NO: 925 - protein, 2094 aa, synthetic construct
MPAAKRVKLDGGDKKYSIGLDIGTNSVGWAVITDEYKVPSKKFKVLGNTDRHSIKKNLIGALLFDSGETAEATRLKRTARRRYTRRKNRICYLQEIFSNEMAKVDDSFFHRLEESFLVEEDKKHERHPIFGNIVDEVAYHEKYPTIYHLRKKLVDSTDKADLRLIYLALAHMIKFRGHFLIEGDLNPDNSDVDKLFIQLVQTYNQLFEENPINASGVDAKAILSARLSKSRRLENLIAQLPGEKKNGLFGNLIALSLGLTPNFKSNFDLAEDAKLQLSKDTYDDDLDNLLAQIGDQYADLFLAAKNLSDAILLSDILRVNTEITKAPLSASMIKRYDEHHQDLTLLKALVRQQLPEKYKEIFFDQSKNGYAGYIDGGASQEEFYKFIKPILEKMDGTEELLVKLNREDLLRKQRTFDNGSIPHQIHLGELHAILRRQEDFYPFLKDNREKIEKILTFRIPYYVGPLARGNSRFAWMTRKSEETITPWNFEEVVDKGASAQSFIERMTNFDKNLPNEKVLPKHSLLYEYFTVYNELTKVKYVTEGMRKPAFLSGEQKKAIVDLLFKTNRKVTVKQLKEDYFKKIECFDSVEISGVEDRFNASLGTYHDLLKIIKDKDFLDNEENEDILEDIVLTLTLFEDREMIEERLKTYAHLFDDKVMKQLKRRRYTGWGRLSRKLINGIRDKQSGKTILDFLKSDGFANRNFMQLIHDDSLTFKEDIQKAQVSGQGDSLHEHIANLAGSPAIKKGILQTVKVVDELVKVMGRHKPENIVIEMARENQTTQKGQKNSRERMKRIEEGIKELGSQILKEHPVENTQLQNEKLYLYYLQNGRDMYVDQELDINRLSDYDVDHIVPQSFLKDDSIDNKVLTRSDKARGKSDNVPSEEVVKKMKNYWRQLLNAKLITQRKFDNLTKAERGGLSELDKAGFIKRQLVETRQITKHVAQILDSRMNTKYDENDKLIREVKVITLKSKLVSDFRKDFQFYKVREINNYHHAHDAYLNAVVGTALIKKYPKLESEFVYGDYKVYDVRKMIAKSEQEIGKATAKYFFYSNIMNFFKTEITLANGEIRKRPLIETNGETGEIVWDKGRDFATVRKVLSMPQVNIVKKTEVQTGGFSKESILPKRNSDKLIARKKDWDPKKYGGFDSPTVAYSVLVVAKVEKGKSKKLKSVKELLGITIMERSSFEKNPIDFLEAKGYKEVKKDLIIKLPKYSLFELENGRKRMLASAGELQKGNELALPSKYVNFLYLASHYEKLKGSPEDNEQKQLFVEQHKHYLDEIIEQISEFSKRVILADANLDKVLSAYNKHRDKPIREQAENIIHLFTLTNLGAPAAFKYFDTTIDRKRYTSTKEVLDATLIHQSITGLYETRIDLSQLGGDGGGGGEAAAKGSSGGVLNLEEEYRLHEKPVPSSIDPSWLQLFPTVWAERAGMGLANQVPPVVVELRSGASPVAVRQYPMSKEAREGIRPHIQRFLDLGVLVPCQSPWNTPLLPVKKPGTNDYRPVQDLREINKRVQDIHPTVPNPYNLLSSLPPSHTWYSVLDLKDAFFCLKLHPNSQPLFAFEWRDPEKGNTGQLTWTRLPQGFKNSPTLFNEALHRDLAPFRALNPQVVLLQYVDDLLVAAPTYRDCKEGTQKLLQELSKLGYRVSAKKAQLCQKEVTYLGYLLKEGKRWLTPARKATVMKIPPPTTPRQVREFLGKAGFCRLFIPGFASLAAPLYPLTKPSIPFIWTEEHQKAFDRIKEALLSAPALALPDLTKPFTLYVDERAGVARGVLTQTLGPWRRPVAYLSKKLDPVASGWPTCLKAVAAVALLLKDADKLTLGQNVTVIASHSLESIVRQPPDRWMTNARMTHYQSLLLNERVSFAPPAVLNPATLLPVESEATPVHRCSEILAEETGTRRDLKDQPLPGVPAWYTDGSSFIAEGKRRAGAAIVDGKRTVWASSLPEGTSAQKAELVALTQALRLAEGKDINIYTDSRYAFATAHIHGAIYKQRGWLTSAGKDIKNKEEILALLEAIHLPKRVAIIHCPGHQKGNDPVATGNRRADEAAKQAALSTRVLAETTKPAGKRTADGSEFEKRTADGSEFESPKKKAKVE

SEQ ID NO: 926 - protein, 2087 aa, synthetic construct
MPAAKRVKLDGGDKKYSIGLDIGTNSVGWAVITDEYKVPSKKFKVLGNTDRHSIKKNLIGALLFDSGETAEATRLKRTARRRYTRRKNRICYLQEIFSNEMAKVDDSFFHRLEESFLVEEDKKHERHPIFGNIVDEVAYHEKYPTIYHLRKKLVDSTDKADLRLIYLALAHMIKFRGHFLIEGDLNPDNSDVDKLFIQLVQTYNQLFEENPINASGVDAKAILSARLSKSRRLENLIAQLPGEKKNGLFGNLIALSLGLTPNFKSNFDLAEDAKLQLSKDTYDDDLDNLLAQIGDQYADLFLAAKNLSDAILLSDILRVNTEITKAPLSASMIKRYDEHHQDLTLLKALVRQQLPEKYKEIFFDQSKNGYAGYIDGGASQEEFYKFIKPILEKMDGTEELLVKLNREDLLRKQRTFDNGSIPHQIHLGELHAILRRQEDFYPFLKDNREKIEKILTFRIPYYVGPLARGNSRFAWMTRKSEETITPWNFEEVVDKGASAQSFIERMTNFDKNLPNEKVLPKHSLLYEYFTVYNELTKVKYVTEGMRKPAFLSGEQKKAIVDLLFKTNRKVTVKQLKEDYFKKIECFDSVEISGVEDRFNASLGTYHDLLKIIKDKDFLDNEENEDILEDIVLTLTLFEDREMIEERLKTYAHLFDDKVMKQLKRRRYTGWGRLSRKLINGIRDKQSGKTILDFLKSDGFANRNFMQLIHDDSLTFKEDIQKAQVSGQGDSLHEHIANLAGSPAIKKGILQTVKVVDELVKVMGRHKPENIVIEMARENQTTQKGQKNSRERMKRIEEGIKELGSQILKEHPVENTQLQNEKLYLYYLQNGRDMYVDQELDINRLSDYDVDHIVPQSFLKDDSIDNKVLTRSDKARGKSDNVPSEEVVKKMKNYWRQLLNAKLITQRKFDNLTKAERGGLSELDKAGFIKRQLVETRQITKHVAQILDSRMNTKYDENDKLIREVKVITLKSKLVSDFRKDFQFYKVREINNYHHAHDAYLNAVVGTALIKKYPKLESEFVYGDYKVYDVRKMIAKSEQEIGKATAKYFFYSNIMNFFKTEITLANGEIRKRPLIETNGETGEIVWDKGRDFATVRKVLSMPQVNIVKKTEVQTGGFSKESILPKRNSDKLIARKKDWDPKKYGGFDSPTVAYSVLVVAKVEKGKSKKLKSVKELLGITIMERSSFEKNPIDFLEAKGYKEVKKDLIIKLPKYSLFELENGRKRMLASAGELQKGNELALPSKYVNFLYLASHYEKLKGSPEDNEQKQLFVEQHKHYLDEIIEQISEFSKRVILADANLDKVLSAYNKHRDKPIREQAENIIHLFTLTNLGAPAAFKYFDTTIDRKRYTSTKEVLDATLIHQSITGLYETRIDLSQLGGDGGGGGGGGVLNLEEEYRLHEKPVPSSIDPSWLQLFPTVWAERAGMGLANQVPPVVVELRSGASPVAVRQYPMSKEAREGIRPHIQRFLDLGVLVPCQSPWNTPLLPVKKPGTNDYRPVQDLREINKRVQDIHPTVPNPYNLLSSLPPSHTWYSVLDLKDAFFCLKLHPNSQPLFAFEWRDPEKGNTGQLTWTRLPQGFKNSPTLFNEALHRDLAPFRALNPQVVLLQYVDDLLVAAPTYRDCKEGTQKLLQELSKLGYRVSAKKAQLCQKEVTYLGYLLKEGKRWLTPARKATVMKIPPPTTPRQVREFLGKAGFCRLFIPGFASLAAPLYPLTKPSIPFIWTEEHQKAFDRIKEALLSAPALALPDLTKPFTLYVDERAGVARGVLTQTLGPWRRPVAYLSKKLDPVASGWPTCLKAVAAVALLLKDADKLTLGQNVTVIASHSLESIVRQPPDRWMTNARMTHYQSLLLNERVSFAPPAVLNPATLLPVESEATPVHRCSEILAEETGTRRDLKDQPLPGVPAWYTDGSSFIAEGKRRAGAAIVDGKRTVWASSLPEGTSAQKAELVALTQALRLAEGKDINIYTDSRYAFATAHIHGAIYKQRGWLTSAGKDIKNKEEILALLEAIHLPKRVAIIHCPGHQKGNDPVATGNRRADEAAKQAALSTRVLAETTKPAGKRTADGSEFEKRTADGSEFESPKKKAKVE

SEQ ID NO: 927 - protein, 2092 aa, synthetic construct
MPAAKRVKLDGGDKKYSIGLDIGTNSVGWAVITDEYKVPSKKFKVLGNTDRHSIKKNLIGALLFDSGETAEATRLKRTARRRYTRRKNRICYLQEIFSNEMAKVDDSFFHRLEESFLVEEDKKHERHPIFGNIVDEVAYHEKYPTIYHLRKKLVDSTDKADLRLIYLALAHMIKFRGHFLIEGDLNPDNSDVDKLFIQLVQTYNQLFEENPINASGVDAKAILSARLSKSRRLENLIAQLPGEKKNGLFGNLIALSLGLTPNFKSNFDLAEDAKLQLSKDTYDDDLDNLLAQIGDQYADLFLAAKNLSDAILLSDILRVNTEITKAPLSASMIKRYDEHHQDLTLLKALVRQQLPEKYKEIFFDQSKNGYAGYIDGGASQEEFYKFIKPILEKMDGTEELLVKLNREDLLRKQRTFDNGSIPHQIHLGELHAILRRQEDFYPFLKDNREKIEKILTFRIPYYVGPLARGNSRFAWMTRKSEETITPWNFEEVVDKGASAQSFIERMTNFDKNLPNEKVLPKHSLLYEYFTVYNELTKVKYVTEGMRKPAFLSGEQKKAIVDLLFKTNRKVTVKQLKEDYFKKIECFDSVEISGVEDRFNASLGTYHDLLKIIKDKDFLDNEENEDILEDIVLTLTLFEDREMIEERLKTYAHLFDDKVMKQLKRRRYTGWGRLSRKLINGIRDKQSGKTILDFLKSDGFANRNFMQLIHDDSLTFKEDIQKAQVSGQGDSLHEHIANLAGSPAIKKGILQTVKVVDELVKVMGRHKPENIVIEMARENQTTQKGQKNSRERMKRIEEGIKELGSQILKEHPVENTQLQNEKLYLYYLQNGRDMYVDQELDINRLSDYDVDHIVPQSFLKDDSIDNKVLTRSDKARGKSDNVPSEEVVKKMKNYWRQLLNAKLITQRKFDNLTKAERGGLSELDKAGFIKRQLVETRQITKHVAQILDSRMNTKYDENDKLIREVKVITLKSKLVSDFRKDFQFYKVREINNYHHAHDAYLNAVVGTALIKKYPKLESEFVYGDYKVYDVRKMIAKSEQEIGKATAKYFFYSNIMNFFKTEITLANGEIRKRPLIETNGETGEIVWDKGRDFATVRKVLSMPQVNIVKKTEVQTGGFSKESILPKRNSDKLIARKKDWDPKKYGGFDSPTVAYSVLVVAKVEKGKSKKLKSVKELLGITIMERSSFEKNPIDFLEAKGYKEVKKDLIIKLPKYSLFELENGRKRMLASAGELQKGNELALPSKYVNFLYLASHYEKLKGSPEDNEQKQLFVEQHKHYLDEIIEQISEFSKRVILADANLDKVLSAYNKHRDKPIREQAENIIHLFTLTNLGAPAAFKYFDTTIDRKRYTSTKEVLDATLIHQSITGLYETRIDLSQLGGDGGPAPGSSGGGGGVLNLEEEYRLHEKPVPSSIDPSWLQLFPTVWAERAGMGLANQVPPVVVELRSGASPVAVRQYPMSKEAREGIRPHIQRFLDLGVLVPCQSPWNTPLLPVKKPGTNDYRPVQDLREINKRVQDIHPTVPNPYNLLSSLPPSHTWYSVLDLKDAFFCLKLHPNSQPLFAFEWRDPEKGNTGQLTWTRLPQGFKNSPTLFNEALHRDLAPFRALNPQVVLLQYVDDLLVAAPTYRDCKEGTQKLLQELSKLGYRVSAKKAQLCQKEVTYLGYLLKEGKRWLTPARKATVMKIPPPTTPRQVREFLGKAGFCRLFIPGFASLAAPLYPLTKPSIPFIWTEEHQKAFDRIKEALLSAPALALPDLTKPFTLYVDERAGVARGVLTQTLGPWRRPVAYLSKKLDPVASGWPTCLKAVAAVALLLKDADKLTLGQNVTVIASHSLESIVRQPPDRWMTNARMTHYQSLLLNERVSFAPPAVLNPATLLPVESEATPVHRCSEILAEETGTRRDLKDQPLPGVPAWYTDGSSFIAEGKRRAGAAIVDGKRTVWASSLPEGTSAQKAELVALTQALRLAEGKDINIYTDSRYAFATAHIHGAIYKQRGWLTSAGKDIKNKEEILALLEAIHLPKRVAIIHCPGHQKGNDPVATGNRRADEAAKQAALSTRVLAETTKPAGKRTADGSEFEKRTADGSEFESPKKKAKVE

SEQ ID NO: 928 - protein, 2094 aa, synthetic construct
MPAAKRVKLDGGDKKYSIGLDIGTNSVGWAVITDEYKVPSKKFKVLGNTDRHSIKKNLIGALLFDSGETAEATRLKRTARRRYTRRKNRICYLQEIFSNEMAKVDDSFFHRLEESFLVEEDKKHERHPIFGNIVDEVAYHEKYPTIYHLRKKLVDSTDKADLRLIYLALAHMIKFRGHFLIEGDLNPDNSDVDKLFIQLVQTYNQLFEENPINASGVDAKAILSARLSKSRRLENLIAQLPGEKKNGLFGNLIALSLGLTPNFKSNFDLAEDAKLQLSKDTYDDDLDNLLAQIGDQYADLFLAAKNLSDAILLSDILRVNTEITKAPLSASMIKRYDEHHQDLTLLKALVRQQLPEKYKEIFFDQSKNGYAGYIDGGASQEEFYKFIKPILEKMDGTEELLVKLNREDLLRKQRTFDNGSIPHQIHLGELHAILRRQEDFYPFLKDNREKIEKILTFRIPYYVGPLARGNSRFAWMTRKSEETITPWNFEEVVDKGASAQSFIERMTNFDKNLPNEKVLPKHSLLYEYFTVYNELTKVKYVTEGMRKPAFLSGEQKKAIVDLLFKTNRKVTVKQLKEDYFKKIECFDSVEISGVEDRFNASLGTYHDLLKIIKDKDFLDNEENEDILEDIVLTLTLFEDREMIEERLKTYAHLFDDKVMKQLKRRRYTGWGRLSRKLINGIRDKQSGKTILDFLKSDGFANRNFMQLIHDDSLTFKEDIQKAQVSGQGDSLHEHIANLAGSPAIKKGILQTVKVVDELVKVMGRHKPENIVIEMARENQTTQKGQKNSRERMKRIEEGIKELGSQILKEHPVENTQLQNEKLYLYYLQNGRDMYVDQELDINRLSDYDVDHIVPQSFLKDDSIDNKVLTRSDKARGKSDNVPSEEVVKKMKNYWRQLLNAKLITQRKFDNLTKAERGGLSELDKAGFIKRQLVETRQITKHVAQILDSRMNTKYDENDKLIREVKVITLKSKLVSDFRKDFQFYKVREINNYHHAHDAYLNAVVGTALIKKYPKLESEFVYGDYKVYDVRKMIAKSEQEIGKATAKYFFYSNIMNFFKTEITLANGEIRKRPLIETNGETGEIVWDKGRDFATVRKVLSMPQVNIVKKTEVQTGGFSKESILPKRNSDKLIARKKDWDPKKYGGFDSPTVAYSVLVVAKVEKGKSKKLKSVKELLGITIMERSSFEKNPIDFLEAKGYKEVKKDLIIKLPKYSLFELENGRKRMLASAGELQKGNELALPSKYVNFLYLASHYEKLKGSPEDNEQKQLFVEQHKHYLDEIIEQISEFSKRVILADANLDKVLSAYNKHRDKPIREQAENIIHLFTLTNLGAPAAFKYFDTTIDRKRYTSTKEVLDATLIHQSITGLYETRIDLSQLGGDGGGGGEAAAKPAPGGVLNLEEEYRLHEKPVPSSIDPSWLQLFPTVWAERAGMGLANQVPPVVVELRSGASPVAVRQYPMSKEAREGIRPHIQRFLDLGVLVPCQSPWNTPLLPVKKPGTNDYRPVQDLREINKRVQDIHPTVPNPYNLLSSLPPSHTWYSVLDLKDAFFCLKLHPNSQPLFAFEWRDPEKGNTGQLTWTRLPQGFKNSPTLFNEALHRDLAPFRALNPQVVLLQYVDDLLVAAPTYRDCKEGTQKLLQELSKLGYRVSAKKAQLCQKEVTYLGYLLKEGKRWLTPARKATVMKIPPPTTPRQVREFLGKAGFCRLFIPGFASLAAPLYPLTKPSIPFIWTEEHQKAFDRIKEALLSAPALALPDLTKPFTLYVDERAGVARGVLTQTLGPWRRPVAYLSKKLDPVASGWPTCLKAVAAVALLLKDADKLTLGQNVTVIASHSLESIVRQPPDRWMTNARMTHYQSLLLNERVSFAPPAVLNPATLLPVESEATPVHRCSEILAEETGTRRDLKDQPLPGVPAWYTDGSSFIAEGKRRAGAAIVDGKRTVWASSLPEGTSAQKAELVALTQALRLAEGKDINIYTDSRYAFATAHIHGAIYKQRGWLTSAGKDIKNKEEILALLEAIHLPKRVAIIHCPGHQKGNDPVATGNRRADEAAKQAALSTRVLAETTKPAGKRTADGSEFEKRTADGSEFESPKKKAKVE

SEQ ID NO: 929 - protein, 2092 aa, synthetic construct
MPAAKRVKLDGGDKKYSIGLDIGTNSVGWAVITDEYKVPSKKFKVLGNTDRHSIKKNLIGALLFDSGETAEATRLKRTARRRYTRRKNRICYLQEIFSNEMAKVDDSFFHRLEESFLVEEDKKHERHPIFGNIVDEVAYHEKYPTIYHLRKKLVDSTDKADLRLIYLALAHMIKFRGHFLIEGDLNPDNSDVDKLFIQLVQTYNQLFEENPINASGVDAKAILSARLSKSRRLENLIAQLPGEKKNGLFGNLIALSLGLTPNFKSNFDLAEDAKLQLSKDTYDDDLDNLLAQIGDQYADLFLAAKNLSDAILLSDILRVNTEITKAPLSASMIKRYDEHHQDLTLLKALVRQQLPEKYKEIFFDQSKNGYAGYIDGGASQEEFYKFIKPILEKMDGTEELLVKLNREDLLRKQRTFDNGSIPHQIHLGELHAILRRQEDFYPFLKDNREKIEKILTFRIPYYVGPLARGNSRFAWMTRKSEETITPWNFEEVVDKGASAQSFIERMTNFDKNLPNEKVLPKHSLLYEYFTVYNELTKVKYVTEGMRKPAFLSGEQKKAIVDLLFKTNRKVTVKQLKEDYFKKIECFDSVEISGVEDRFNASLGTYHDLLKIIKDKDFLDNEENEDILEDIVLTLTLFEDREMIEERLKTYAHLFDDKVMKQLKRRRYTGWGRLSRKLINGIRDKQSGKTILDFLKSDGFANRNFMQLIHDDSLTFKEDIQKAQVSGQGDSLHEHIANLAGSPAIKKGILQTVKVVDELVKVMGRHKPENIVIEMARENQTTQKGQKNSRERMKRIEEGIKELGSQILKEHPVENTQLQNEKLYLYYLQNGRDMYVDQELDINRLSDYDVDHIVPQSFLKDDSIDNKVLTRSDKARGKSDNVPSEEVVKKMKNYWRQLLNAKLITQRKFDNLTKAERGGLSELDKAGFIKRQLVETRQITKHVAQILDSRMNTKYDENDKLIREVKVITLKSKLVSDFRKDFQFYKVREINNYHHAHDAYLNAVVGTALIKKYPKLESEFVYGDYKVYDVRKMIAKSEQEIGKATAKYFFYSNIMNFFKTEITLANGEIRKRPLIETNGETGEIVWDKGRDFATVRKVLSMPQVNIVKKTEVQTGGFSKESILPKRNSDKLIARKKDWDPKKYGGFDSPTVAYSVLVVAKVEKGKSKKLKSVKELLGITIMERSSFEKNPIDFLEAKGYKEVKKDLIIKLPKYSLFELENGRKRMLASAGELQKGNELALPSKYVNFLYLASHYEKLKGSPEDNEQKQLFVEQHKHYLDEIIEQISEFSKRVILADANLDKVLSAYNKHRDKPIREQAENIIHLFTLTNLGAPAAFKYFDTTIDRKRYTSTKEVLDATLIHQSITGLYETRIDLSQLGGDGGGSSGSSGSSGGVLNLEEEYRLHEKPVPSSIDPSWLQLFPTVWAERAGMGLANQVPPVVVELRSGASPVAVRQYPMSKEAREGIRPHIQRFLDLGVLVPCQSPWNTPLLPVKKPGTNDYRPVQDLREINKRVQDIHPTVPNPYNLLSSLPPSHTWYSVLDLKDAFFCLKLHPNSQPLFAFEWRDPEKGNTGQLTWTRLPQGFKNSPTLFNEALHRDLAPFRALNPQVVLLQYVDDLLVAAPTYRDCKEGTQKLLQELSKLGYRVSAKKAQLCQKEVTYLGYLLKEGKRWLTPARKATVMKIPPPTTPRQVREFLGKAGFCRLFIPGFASLAAPLYPLTKPSIPFIWTEEHQKAFDRIKEALLSAPALALPDLTKPFTLYVDERAGVARGVLTQTLGPWRRPVAYLSKKLDPVASGWPTCLKAVAAVALLLKDADKLTLGQNVTVIASHSLESIVRQPPDRWMTNARMTHYQSLLLNERVSFAPPAVLNPATLLPVESEATPVHRCSEILAEETGTRRDLKDQPLPGVPAWYTDGSSFIAEGKRRAGAAIVDGKRTVWASSLPEGTSAQKAELVALTQALRLAEGKDINIYTDSRYAFATAHIHGAIYKQRGWLTSAGKDIKNKEEILALLEAIHLPKRVAIIHCPGHQKGNDPVATGNRRADEAAKQAALSTRVLAETTKPAGKRTADGSEFEKRTADGSEFESPKKKAKVE

SEQ ID NO: 930 - protein, 2092 aa, synthetic construct
MPAAKRVKLDGGDKKYSIGLDIGTNSVGWAVITDEYKVPSKKFKVLGNTDRHSIKKNLIGALLFDSGETAEATRLKRTARRRYTRRKNRICYLQEIFSNEMAKVDDSFFHRLEESFLVEEDKKHERHPIFGNIVDEVAYHEKYPTIYHLRKKLVDSTDKADLRLIYLALAHMIKFRGHFLIEGDLNPDNSDVDKLFIQLVQTYNQLFEENPINASGVDAKAILSARLSKSRRLENLIAQLPGEKKNGLFGNLIALSLGLTPNFKSNFDLAEDAKLQLSKDTYDDDLDNLLAQIGDQYADLFLAAKNLSDAILLSDILRVNTEITKAPLSASMIKRYDEHHQDLTLLKALVRQQLPEKYKEIFFDQSKNGYAGYIDGGASQEEFYKFIKPILEKMDGTEELLVKLNREDLLRKQRTFDNGSIPHQIHLGELHAILRRQEDFYPFLKDNREKIEKILTFRIPYYVGPLARGNSRFAWMTRKSEETITPWNFEEVVDKGASAQSFIERMTNFDKNLPNEKVLPKHSLLYEYFTVYNELTKVKYVTEGMRKPAFLSGEQKKAIVDLLFKTNRKVTVKQLKEDYFKKIECFDSVEISGVEDRFNASLGTYHDLLKIIKDKDFLDNEENEDILEDIVLTLTLFEDREMIEERLKTYAHLFDDKVMKQLKRRRYTGWGRLSRKLINGIRDKQSGKTILDFLKSDGFANRNFMQLIHDDSLTFKEDIQKAQVSGQGDSLHEHIANLAGSPAIKKGILQTVKVVDELVKVMGRHKPENIVIEMARENQTTQKGQKNSRERMKRIEEGIKELGSQILKEHPVENTQLQNEKLYLYYLQNGRDMYVDQELDINRLSDYDVDHIVPQSFLKDDSIDNKVLTRSDKARGKSDNVPSEEVVKKMKNYWRQLLNAKLITQRKFDNLTKAERGGLSELDKAGFIKRQLVETRQITKHVAQILDSRMNTKYDENDKLIREVKVITLKSKLVSDFRKDFQFYKVREINNYHHAHDAYLNAVVGTALIKKYPKLESEFVYGDYKVYDVRKMIAKSEQEIGKATAKYFFYSNIMNFFKTEITLANGEIRKRPLIETNGETGEIVWDKGRDFATVRKVLSMPQVNIVKKTEVQTGGFSKESILPKRNSDKLIARKKDWDPKKYGGFDSPTVAYSVLVVAKVEKGKSKKLKSVKELLGITIMERSSFEKNPIDFLEAKGYKEVKKDLIIKLPKYSLFELENGRKRMLASAGELQKGNELALPSKYVNFLYLASHYEKLKGSPEDNEQKQLFVEQHKHYLDEIIEQISEFSKRVILADANLDKVLSAYNKHRDKPIREQAENIIHLFTLTNLGAPAAFKYFDTTIDRKRYTSTKEVLDATLIHQSITGLYETRIDLSQLGGDGGGGSPAPGGGGGVLNLEEEYRLHEKPVPSSIDPSWLQLFPTVWAERAGMGLANQVPPVVVELRSGASPVAVRQYPMSKEAREGIRPHIQRFLDLGVLVPCQSPWNTPLLPVKKPGTNDYRPVQDLREINKRVQDIHPTVPNPYNLLSSLPPSHTWYSVLDLKDAFFCLKLHPNSQPLFAFEWRDPEKGNTGQLTWTRLPQGFKNSPTLFNEALHRDLAPFRALNPQVVLLQYVDDLLVAAPTYRDCKEGTQKLLQELSKLGYRVSAKKAQLCQKEVTYLGYLLKEGKRWLTPARKATVMKIPPPTTPRQVREFLGKAGFCRLFIPGFASLAAPLYPLTKPSIPFIWTEEHQKAFDRIKEALLSAPALALPDLTKPFTLYVDERAGVARGVLTQTLGPWRRPVAYLSKKLDPVASGWPTCLKAVAAVALLLKDADKLTLGQNVTVIASHSLESIVRQPPDRWMTNARMTHYQSLLLNERVSFAPPAVLNPATLLPVESEATPVHRCSEILAEETGTRRDLKDQPLPGVPAWYTDGSSFIAEGKRRAGAAIVDGKRTVWASSLPEGTSAQKAELVALTQALRLAEGKDINIYTDSRYAFATAHIHGAIYKQRGWLTSAGKDIKNKEEILALLEAIHLPKRVAIIHCPGHQKGNDPVATGNRRADEAAKQAALSTRVLAETTKPAGKRTADGSEFEKRTADGSEFESPKKKAKVE

SEQ ID NO: 931 - protein, 2091 aa, synthetic construct
MPAAKRVKLDGGDKKYSIGLDIGTNSVGWAVITDEYKVPSKKFKVLGNTDRHSIKKNLIGALLFDSGETAEATRLKRTARRRYTRRKNRICYLQEIFSNEMAKVDDSFFHRLEESFLVEEDKKHERHPIFGNIVDEVAYHEKYPTIYHLRKKLVDSTDKADLRLIYLALAHMIKFRGHFLIEGDLNPDNSDVDKLFIQLVQTYNQLFEENPINASGVDAKAILSARLSKSRRLENLIAQLPGEKKNGLFGNLIALSLGLTPNFKSNFDLAEDAKLQLSKDTYDDDLDNLLAQIGDQYADLFLAAKNLSDAILLSDILRVNTEITKAPLSASMIKRYDEHHQDLTLLKALVRQQLPEKYKEIFFDQSKNGYAGYIDGGASQEEFYKFIKPILEKMDGTEELLVKLNREDLLRKQRTFDNGSIPHQIHLGELHAILRRQEDFYPFLKDNREKIEKILTFRIPYYVGPLARGNSRFAWMTRKSEETITPWNFEEVVDKGASAQSFIERMTNFDKNLPNEKVLPKHSLLYEYFTVYNELTKVKYVTEGMRKPAFLSGEQKKAIVDLLFKTNRKVTVKQLKEDYFKKIECFDSVEISGVEDRFNASLGTYHDLLKIIKDKDFLDNEENEDILEDIVLTLTLFEDREMIEERLKTYAHLFDDKVMKQLKRRRYTGWGRLSRKLINGIRDKQSGKTILDFLKSDGFANRNFMQLIHDDSLTFKEDIQKAQVSGQGDSLHEHIANLAGSPAIKKGILQTVKVVDELVKVMGRHKPENIVIEMARENQTTQKGQKNSRERMKRIEEGIKELGSQILKEHPVENTQLQNEKLYLYYLQNGRDMYVDQELDINRLSDYDVDHIVPQSFLKDDSIDNKVLTRSDKARGKSDNVPSEEVVKKMKNYWRQLLNAKLITQRKFDNLTKAERGGLSELDKAGFIKRQLVETRQITKHVAQILDSRMNTKYDENDKLIREVKVITLKSKLVSDFRKDFQFYKVREINNYHHAHDAYLNAVVGTALIKKYPKLESEFVYGDYKVYDVRKMIAKSEQEIGKATAKYFFYSNIMNFFKTEITLANGEIRKRPLIETNGETGEIVWDKGRDFATVRKVLSMPQVNIVKKTEVQTGGFSKESILPKRNSDKLIARKKDWDPKKYGGFDSPTVAYSVLVVAKVEKGKSKKLKSVKELLGITIMERSSFEKNPIDFLEAKGYKEVKKDLIIKLPKYSLFELENGRKRMLASAGELQKGNELALPSKYVNFLYLASHYEKLKGSPEDNEQKQLFVEQHKHYLDEIIEQISEFSKRVILADANLDKVLSAYNKHRDKPIREQAENIIHLFTLTNLGAPAAFKYFDTTIDRKRYTSTKEVLDATLIHQSITGLYETRIDLSQLGGDGGEAAAKGGGGGVLNLEEEYRLHEKPVPSSIDPSWLQLFPTVWAERAGMGLANQVPPVVVELRSGASPVAVRQYPMSKEAREGIRPHIQRFLDLGVLVPCQSPWNTPLLPVKKPGTNDYRPVQDLREINKRVQDIHPTVPNPYNLLSSLPPSHTWYSVLDLKDAFFCLKLHPNSQPLFAFEWRDPEKGNTGQLTWTRLPQGFKNSPTLFNEALHRDLAPFRALNPQVVLLQYVDDLLVAAPTYRDCKEGTQKLLQELSKLGYRVSAKKAQLCQKEVTYLGYLLKEGKRWLTPARKATVMKIPPPTTPRQVREFLGKAGFCRLFIPGFASLAAPLYPLTKPSIPFIWTEEHQKAFDRIKEALLSAPALALPDLTKPFTLYVDERAGVARGVLTQTLGPWRRPVAYLSKKLDPVASGWPTCLKAVAAVALLLKDADKLTLGQNVTVIASHSLESIVRQPPDRWMTNARMTHYQSLLLNERVSFAPPAVLNPATLLPVESEATPVHRCSEILAEETGTRRDLKDQPLPGVPAWYTDGSSFIAEGKRRAGAAIVDGKRTVWASSLPEGTSAQKAELVALTQALRLAEGKDINIYTDSRYAFATAHIHGAIYKQRGWLTSAGKDIKNKEEILALLEAIHLPKRVAIIHCPGHQKGNDPVATGNRRADEAAKQAALSTRVLAETTKPAGKRTADGSEFEKRTADGSEFESPKKKAKVE

SEQ ID NO: 932 - protein, 2089 aa, synthetic construct
MPAAKRVKLDGGDKKYSIGLDIGTNSVGWAVITDEYKVPSKKFKVLGNTDRHSIKKNLIGALLFDSGETAEATRLKRTARRRYTRRKNRICYLQEIFSNEMAKVDDSFFHRLEESFLVEEDKKHERHPIFGNIVDEVAYHEKYPTIYHLRKKLVDSTDKADLRLIYLALAHMIKFRGHFLIEGDLNPDNSDVDKLFIQLVQTYNQLFEENPINASGVDAKAILSARLSKSRRLENLIAQLPGEKKNGLFGNLIALSLGLTPNFKSNFDLAEDAKLQLSKDTYDDDLDNLLAQIGDQYADLFLAAKNLSDAILLSDILRVNTEITKAPLSASMIKRYDEHHQDLTLLKALVRQQLPEKYKEIFFDQSKNGYAGYIDGGASQEEFYKFIKPILEKMDGTEELLVKLNREDLLRKQRTFDNGSIPHQIHLGELHAILRRQEDFYPFLKDNREKIEKILTFRIPYYVGPLARGNSRFAWMTRKSEETITPWNFEEVVDKGASAQSFIERMTNFDKNLPNEKVLPKHSLLYEYFTVYNELTKVKYVTEGMRKPAFLSGEQKKAIVDLLFKTNRKVTVKQLKEDYFKKIECFDSVEISGVEDRFNASLGTYHDLLKIIKDKDFLDNEENEDILEDIVLTLTLFEDREMIEERLKTYAHLFDDKVMKQLKRRRYTGWGRLSRKLINGIRDKQSGKTILDFLKSDGFANRNFMQLIHDDSLTFKEDIQKAQVSGQGDSLHEHIANLAGSPAIKKGILQTVKVVDELVKVMGRHKPENIVIEMARENQTTQKGQKNSRERMKRIEEGIKELGSQILKEHPVENTQLQNEKLYLYYLQNGRDMYVDQELDINRLSDYDVDHIVPQSFLKDDSIDNKVLTRSDKARGKSDNVPSEEVVKKMKNYWRQLLNAKLITQRKFDNLTKAERGGLSELDKAGFIKRQLVETRQITKHVAQILDSRMNTKYDENDKLIREVKVITLKSKLVSDFRKDFQFYKVREINNYHHAHDAYLNAVVGTALIKKYPKLESEFVYGDYKVYDVRKMIAKSEQEIGKATAKYFFYSNIMNFFKTEITLANGEIRKRPLIETNGETGEIVWDKGRDFATVRKVLSMPQVNIVKKTEVQTGGFSKESILPKRNSDKLIARKKDWDPKKYGGFDSPTVAYSVLVVAKVEKGKSKKLKSVKELLGITIMERSSFEKNPIDFLEAKGYKEVKKDLIIKLPKYSLFELENGRKRMLASAGELQKGNELALPSKYVNFLYLASHYEKLKGSPEDNEQKQLFVEQHKHYLDEIIEQISEFSKRVILADANLDKVLSAYNKHRDKPIREQAENIIHLFTLTNLGAPAAFKYFDTTIDRKRYTSTKEVLDATLIHQSITGLYETRIDLSQLGGDGGGSSGSSGGVLNLEEEYRLHEKPVPSSIDPSWLQLFPTVWAERAGMGLANQVPPVVVELRSGASPVAVRQYPMSKEAREGIRPHIQRFLDLGVLVPCQSPWNTPLLPVKKPGTNDYRPVQDLREINKRVQDIHPTVPNPYNLLSSLPPSHTWYSVLDLKDAFFCLKLHPNSQPLFAFEWRDPEKGNTGQLTWTRLPQGFKNSPTLFNEALHRDLAPFRALNPQVVLLQYVDDLLVAAPTYRDCKEGTQKLLQELSKLGYRVSAKKAQLCQKEVTYLGYLLKEGKRWLTPARKATVMKIPPPTTPRQVREFLGKAGFCRLFIPGFASLAAPLYPLTKPSIPFIWTEEHQKAFDRIKEALLSAPALALPDLTKPFTLYVDERAGVARGVLTQTLGPWRRPVAYLSKKLDPVASGWPTCLKAVAAVALLLKDADKLTLGQNVTVIASHSLESIVRQPPDRWMTNARMTHYQSLLLNERVSFAPPAVLNPATLLPVESEATPVHRCSEILAEETGTRRDLKDQPLPGVPAWYTDGSSFIAEGKRRAGAAIVDGKRTVWASSLPEGTSAQKAELVALTQALRLAEGKDINIYTDSRYAFATAHIHGAIYKQRGWLTSAGKDIKNKEEILALLEAIHLPKRVAIIHCPGHQKGNDPVATGNRRADEAAKQAALSTRVLAETTKPAGKRTADGSEFEKRTADGSEFESPKKKAKVE

SEQ ID NO: 933 - protein, 2098 aa, synthetic construct
MPAAKRVKLDGGDKKYSIGLDIGTNSVGWAVITDEYKVPSKKFKVLGNTDRHSIKKNLIGALLFDSGETAEATRLKRTARRRYTRRKNRICYLQEIFSNEMAKVDDSFFHRLEESFLVEEDKKHERHPIFGNIVDEVAYHEKYPTIYHLRKKLVDSTDKADLRLIYLALAHMIKFRGHFLIEGDLNPDNSDVDKLFIQLVQTYNQLFEENPINASGVDAKAILSARLSKSRRLENLIAQLPGEKKNGLFGNLIALSLGLTPNFKSNFDLAEDAKLQLSKDTYDDDLDNLLAQIGDQYADLFLAAKNLSDAILLSDILRVNTEITKAPLSASMIKRYDEHHQDLTLLKALVRQQLPEKYKEIFFDQSKNGYAGYIDGGASQEEFYKFIKPILEKMDGTEELLVKLNREDLLRKQRTFDNGSIPHQIHLGELHAILRRQEDFYPFLKDNREKIEKILTFRIPYYVGPLARGNSRFAWMTRKSEETITPWNFEEVVDKGASAQSFIERMTNFDKNLPNEKVLPKHSLLYEYFTVYNELTKVKYVTEGMRKPAFLSGEQKKAIVDLLFKTNRKVTVKQLKEDYFKKIECFDSVEISGVEDRFNASLGTYHDLLKIIKDKDFLDNEENEDILEDIVLTLTLFEDREMIEERLKTYAHLFDDKVMKQLKRRRYTGWGRLSRKLINGIRDKQSGKTILDFLKSDGFANRNFMQLIHDDSLTFKEDIQKAQVSGQGDSLHEHIANLAGSPAIKKGILQTVKVVDELVKVMGRHKPENIVIEMARENQTTQKGQKNSRERMKRIEEGIKELGSQILKEHPVENTQLQNEKLYLYYLQNGRDMYVDQELDINRLSDYDVDHIVPQSFLKDDSIDNKVLTRSDKARGKSDNVPSEEVVKKMKNYWRQLLNAKLITQRKFDNLTKAERGGLSELDKAGFIKRQLVETRQITKHVAQILDSRMNTKYDENDKLIREVKVITLKSKLVSDFRKDFQFYKVREINNYHHAHDAYLNAVVGTALIKKYPKLESEFVYGDYKVYDVRKMIAKSEQEIGKATAKYFFYSNIMNFFKTEITLANGEIRKRPLIETNGETGEIVWDKGRDFATVRKVLSMPQVNIVKKTEVQTGGFSKESILPKRNSDKLIARKKDWDPKKYGGFDSPTVAYSVLVVAKVEKGKSKKLKSVKELLGITIMERSSFEKNPIDFLEAKGYKEVKKDLIIKLPKYSLFELENGRKRMLASAGELQKGNELALPSKYVNFLYLASHYEKLKGSPEDNEQKQLFVEQHKHYLDEIIEQISEFSKRVILADANLDKVLSAYNKHRDKPIREQAENIIHLFTLTNLGAPAAFKYFDTTIDRKRYTSTKEVLDATLIHQSITGLYETRIDLSQLGGDGGEAAAKEAAAKEAAAKGGVLNLEEEYRLHEKPVPSSIDPSWLQLFPTVWAERAGMGLANQVPPVVVELRSGASPVAVRQYPMSKEAREGIRPHIQRFLDLGVLVPCQSPWNTPLLPVKKPGTNDYRPVQDLREINKRVQDIHPTVPNPYNLLSSLPPSHTWYSVLDLKDAFFCLKLHPNSQPLFAFEWRDPEKGNTGQLTWTRLPQGFKNSPTLFNEALHRDLAPFRALNPQVVLLQYVDDLLVAAPTYRDCKEGTQKLLQELSKLGYRVSAKKAQLCQKEVTYLGYLLKEGKRWLTPARKATVMKIPPPTTPRQVREFLGKAGFCRLFIPGFASLAAPLYPLTKPSIPFIWTEEHQKAFDRIKEALLSAPALALPDLTKPFTLYVDERAGVARGVLTQTLGPWRRPVAYLSKKLDPVASGWPTCLKAVAAVALLLKDADKLTLGQNVTVIASHSLESIVRQPPDRWMTNARMTHYQSLLLNERVSFAPPAVLNPATLLPVESEATPVHRCSEILAEETGTRRDLKDQPLPGVPAWYTDGSSFIAEGKRRAGAAIVDGKRTVWASSLPEGTSAQKAELVALTQALRLAEGKDINIYTDSRYAFATAHIHGAIYKQRGWLTSAGKDIKNKEEILALLEAIHLPKRVAIIHCPGHQKGNDPVATGNRRADEAAKQAALSTRVLAETTKPAGKRTADGSEFEKRTADGSEFESPKKKAKVE

SEQ ID NO: 934 - protein, 2091 aa, synthetic construct
MPAAKRVKLDGGDKKYSIGLDIGTNSVGWAVITDEYKVPSKKFKVLGNTDRHSIKKNLIGALLFDSGETAEATRLKRTARRRYTRRKNRICYLQEIFSNEMAKVDDSFFHRLEESFLVEEDKKHERHPIFGNIVDEVAYHEKYPTIYHLRKKLVDSTDKADLRLIYLALAHMIKFRGHFLIEGDLNPDNSDVDKLFIQLVQTYNQLFEENPINASGVDAKAILSARLSKSRRLENLIAQLPGEKKNGLFGNLIALSLGLTPNFKSNFDLAEDAKLQLSKDTYDDDLDNLLAQIGDQYADLFLAAKNLSDAILLSDILRVNTEITKAPLSASMIKRYDEHHQDLTLLKALVRQQLPEKYKEIFFDQSKNGYAGYIDGGASQEEFYKFIKPILEKMDGTEELLVKLNREDLLRKQRTFDNGSIPHQIHLGELHAILRRQEDFYPFLKDNREKIEKILTFRIPYYVGPLARGNSRFAWMTRKSEETITPWNFEEVVDKGASAQSFIERMTNFDKNLPNEKVLPKHSLLYEYFTVYNELTKVKYVTEGMRKPAFLSGEQKKAIVDLLFKTNRKVTVKQLKEDYFKKIECFDSVEISGVEDRFNASLGTYHDLLKIIKDKDFLDNEENEDILEDIVLTLTLFEDREMIEERLKTYAHLFDDKVMKQLKRRRYTGWGRLSRKLINGIRDKQSGKTILDFLKSDGFANRNFMQLIHDDSLTFKEDIQKAQVSGQGDSLHEHIANLAGSPAIKKGILQTVKVVDELVKVMGRHKPENIVIEMARENQTTQKGQKNSRERMKRIEEGIKELGSQILKEHPVENTQLQNEKLYLYYLQNGRDMYVDQELDINRLSDYDVDHIVPQSFLKDDSIDNKVLTRSDKARGKSDNVPSEEVVKKMKNYWRQLLNAKLITQRKFDNLTKAERGGLSELDKAGFIKRQLVETRQITKHVAQILDSRMNTKYDENDKLIREVKVITLKSKLVSDFRKDFQFYKVREINNYHHAHDAYLNAVVGTALIKKYPKLESEFVYGDYKVYDVRKMIAKSEQEIGKATAKYFFYSNIMNFFKTEITLANGEIRKRPLIETNGETGEIVWDKGRDFATVRKVLSMPQVNIVKKTEVQTGGFSKESILPKRNSDKLIARKKDWDPKKYGGFDSPTVAYSVLVVAKVEKGKSKKLKSVKELLGITIMERSSFEKNPIDFLEAKGYKEVKKDLIIKLPKYSLFELENGRKRMLASAGELQKGNELALPSKYVNFLYLASHYEKLKGSPEDNEQKQLFVEQHKHYLDEIIEQISEFSKRVILADANLDKVLSAYNKHRDKPIREQAENIIHLFTLTNLGAPAAFKYFDTTIDRKRYTSTKEVLDATLIHQSITGLYETRIDLSQLGGDGGGGGEAAAKGGVLNLEEEYRLHEKPVPSSIDPSWLQLFPTVWAERAGMGLANQVPPVVVELRSGASPVAVRQYPMSKEAREGIRPHIQRFLDLGVLVPCQSPWNTPLLPVKKPGTNDYRPVQDLREINKRVQDIHPTVPNPYNLLSSLPPSHTWYSVLDLKDAFFCLKLHPNSQPLFAFEWRDPEKGNTGQLTWTRLPQGFKNSPTLFNEALHRDLAPFRALNPQVVLLQYVDDLLVAAPTYRDCKEGTQKLLQELSKLGYRVSAKKAQLCQKEVTYLGYLLKEGKRWLTPARKATVMKIPPPTTPRQVREFLGKAGFCRLFIPGFASLAAPLYPLTKPSIPFIWTEEHQKAFDRIKEALLSAPALALPDLTKPFTLYVDERAGVARGVLTQTLGPWRRPVAYLSKKLDPVASGWPTCLKAVAAVALLLKDADKLTLGQNVTVIASHSLESIVRQPPDRWMTNARMTHYQSLLLNERVSFAPPAVLNPATLLPVESEATPVHRCSEILAEETGTRRDLKDQPLPGVPAWYTDGSSFIAEGKRRAGAAIVDGKRTVWASSLPEGTSAQKAELVALTQALRLAEGKDINIYTDSRYAFATAHIHGAIYKQRGWLTSAGKDIKNKEEILALLEAIHLPKRVAIIHCPGHQKGNDPVATGNRRADEAAKQAALSTRVLAETTKPAGKRTADGSEFEKRTADGSEFESPKKKAKVE

SEQ ID NO: 935 - protein, 2103 aa, synthetic construct
MPAAKRVKLDGGDKKYSIGLDIGTNSVGWAVITDEYKVPSKKFKVLGNTDRHSIKKNLIGALLFDSGETAEATRLKRTARRRYTRRKNRICYLQEIFSNEMAKVDDSFFHRLEESFLVEEDKKHERHPIFGNIVDEVAYHEKYPTIYHLRKKLVDSTDKADLRLIYLALAHMIKFRGHFLIEGDLNPDNSDVDKLFIQLVQTYNQLFEENPINASGVDAKAILSARLSKSRRLENLIAQLPGEKKNGLFGNLIALSLGLTPNFKSNFDLAEDAKLQLSKDTYDDDLDNLLAQIGDQYADLFLAAKNLSDAILLSDILRVNTEITKAPLSASMIKRYDEHHQDLTLLKALVRQQLPEKYKEIFFDQSKNGYAGYIDGGASQEEFYKFIKPILEKMDGTEELLVKLNREDLLRKQRTFDNGSIPHQIHLGELHAILRRQEDFYPFLKDNREKIEKILTFRIPYYVGPLARGNSRFAWMTRKSEETITPWNFEEVVDKGASAQSFIERMTNFDKNLPNEKVLPKHSLLYEYFTVYNELTKVKYVTEGMRKPAFLSGEQKKAIVDLLFKTNRKVTVKQLKEDYFKKIECFDSVEISGVEDRFNASLGTYHDLLKIIKDKDFLDNEENEDILEDIVLTLTLFEDREMIEERLKTYAHLFDDKVMKQLKRRRYTGWGRLSRKLINGIRDKQSGKTILDFLKSDGFANRNFMQLIHDDSLTFKEDIQKAQVSGQGDSLHEHIANLAGSPAIKKGILQTVKVVDELVKVMGRHKPENIVIEMARENQTTQKGQKNSRERMKRIEEGIKELGSQILKEHPVENTQLQNEKLYLYYLQNGRDMYVDQELDINRLSDYDVDHIVPQSFLKDDSIDNKVLTRSDKARGKSDNVPSEEVVKKMKNYWRQLLNAKLITQRKFDNLTKAERGGLSELDKAGFIKRQLVETRQITKHVAQILDSRMNTKYDENDKLIREVKVITLKSKLVSDFRKDFQFYKVREINNYHHAHDAYLNAVVGTALIKKYPKLESEFVYGDYKVYDVRKMIAKSEQEIGKATAKYFFYSNIMNFFKTEITLANGEIRKRPLIETNGETGEIVWDKGRDFATVRKVLSMPQVNIVKKTEVQTGGFSKESILPKRNSDKLIARKKDWDPKKYGGFDSPTVAYSVLVVAKVEKGKSKKLKSVKELLGITIMERSSFEKNPIDFLEAKGYKEVKKDLIIKLPKYSLFELENGRKRMLASAGELQKGNELALPSKYVNFLYLASHYEKLKGSPEDNEQKQLFVEQHKHYLDEIIEQISEFSKRVILADANLDKVLSAYNKHRDKPIREQAENIIHLFTLTNLGAPAAFKYFDTTIDRKRYTSTKEVLDATLIHQSITGLYETRIDLSQLGGDGGEAAAKEAAAKEAAAKEAAAKGGVLNLEEEYRLHEKPVPSSIDPSWLQLFPTVWAERAGMGLANQVPPVVVELRSGASPVAVRQYPMSKEAREGIRPHIQRFLDLGVLVPCQSPWNTPLLPVKKPGTNDYRPVQDLREINKRVQDIHPTVPNPYNLLSSLPPSHTWYSVLDLKDAFFCLKLHPNSQPLFAFEWRDPEKGNTGQLTWTRLPQGFKNSPTLFNEALHRDLAPFRALNPQVVLLQYVDDLLVAAPTYRDCKEGTQKLLQELSKLGYRVSAKKAQLCQKEVTYLGYLLKEGKRWLTPARKATVMKIPPPTTPRQVREFLGKAGFCRLFIPGFASLAAPLYPLTKPSIPFIWTEEHQKAFDRIKEALLSAPALALPDLTKPFTLYVDERAGVARGVLTQTLGPWRRPVAYLSKKLDPVASGWPTCLKAVAAVALLLKDADKLTLGQNVTVIASHSLESIVRQPPDRWMTNARMTHYQSLLLNERVSFAPPAVLNPATLLPVESEATPVHRCSEILAEETGTRRDLKDQPLPGVPAWYTDGSSFIAEGKRRAGAAIVDGKRTVWASSLPEGTSAQKAELVALTQALRLAEGKDINIYTDSRYAFATAHIHGAIYKQRGWLTSAGKDIKNKEEILALLEAIHLPKRVAIIHCPGHQKGNDPVATGNRRADEAAKQAALSTRVLAETTKPAGKRTADGSEFEKRTADGSEFESPKKKAKVE

SEQ ID NO: 936 - protein, 2094 aa, synthetic construct
MPAAKRVKLDGGDKKYSIGLDIGTNSVGWAVITDEYKVPSKKFKVLGNTDRHSIKKNLIGALLFDSGETAEATRLKRTARRRYTRRKNRICYLQEIFSNEMAKVDDSFFHRLEESFLVEEDKKHERHPIFGNIVDEVAYHEKYPTIYHLRKKLVDSTDKADLRLIYLALAHMIKFRGHFLIEGDLNPDNSDVDKLFIQLVQTYNQLFEENPINASGVDAKAILSARLSKSRRLENLIAQLPGEKKNGLFGNLIALSLGLTPNFKSNFDLAEDAKLQLSKDTYDDDLDNLLAQIGDQYADLFLAAKNLSDAILLSDILRVNTEITKAPLSASMIKRYDEHHQDLTLLKALVRQQLPEKYKEIFFDQSKNGYAGYIDGGASQEEFYKFIKPILEKMDGTEELLVKLNREDLLRKQRTFDNGSIPHQIHLGELHAILRRQEDFYPFLKDNREKIEKILTFRIPYYVGPLARGNSRFAWMTRKSEETITPWNFEEVVDKGASAQSFIERMTNFDKNLPNEKVLPKHSLLYEYFTVYNELTKVKYVTEGMRKPAFLSGEQKKAIVDLLFKTNRKVTVKQLKEDYFKKIECFDSVEISGVEDRFNASLGTYHDLLKIIKDKDFLDNEENEDILEDIVLTLTLFEDREMIEERLKTYAHLFDDKVMKQLKRRRYTGWGRLSRKLINGIRDKQSGKTILDFLKSDGFANRNFMQLIHDDSLTFKEDIQKAQVSGQGDSLHEHIANLAGSPAIKKGILQTVKVVDELVKVMGRHKPENIVIEMARENQTTQKGQKNSRERMKRIEEGIKELGSQILKEHPVENTQLQNEKLYLYYLQNGRDMYVDQELDINRLSDYDVDHIVPQSFLKDDSIDNKVLTRSDKARGKSDNVPSEEVVKKMKNYWRQLLNAKLITQRKFDNLTKAERGGLSELDKAGFIKRQLVETRQITKHVAQILDSRMNTKYDENDKLIREVKVITLKSKLVSDFRKDFQFYKVREINNYHHAHDAYLNAVVGTALIKKYPKLESEFVYGDYKVYDVRKMIAKSEQEIGKATAKYFFYSNIMNFFKTEITLANGEIRKRPLIETNGETGEIVWDKGRDFATVRKVLSMPQVNIVKKTEVQTGGFSKESILPKRNSDKLIARKKDWDPKKYGGFDSPTVAYSVLVVAKVEKGKSKKLKSVKELLGITIMERSSFEKNPIDFLEAKGYKEVKKDLIIKLPKYSLFELENGRKRMLASAGELQKGNELALPSKYVNFLYLASHYEKLKGSPEDNEQKQLFVEQHKHYLDEIIEQISEFSKRVILADANLDKVLSAYNKHRDKPIREQAENIIHLFTLTNLGAPAAFKYFDTTIDRKRYTSTKEVLDATLIHQSITGLYETRIDLSQLGGDGGGGSGSSEAAAKGGVLNLEEEYRLHEKPVPSSIDPSWLQLFPTVWAERAGMGLANQVPPVVVELRSGASPVAVRQYPMSKEAREGIRPHIQRFLDLGVLVPCQSPWNTPLLPVKKPGTNDYRPVQDLREINKRVQDIHPTVPNPYNLLSSLPPSHTWYSVLDLKDAFFCLKLHPNSQPLFAFEWRDPEKGNTGQLTWTRLPQGFKNSPTLFNEALHRDLAPFRALNPQVVLLQYVDDLLVAAPTYRDCKEGTQKLLQELSKLGYRVSAKKAQLCQKEVTYLGYLLKEGKRWLTPARKATVMKIPPPTTPRQVREFLGKAGFCRLFIPGFASLAAPLYPLTKPSIPFIWTEEHQKAFDRIKEALLSAPALALPDLTKPFTLYVDERAGVARGVLTQTLGPWRRPVAYLSKKLDPVASGWPTCLKAVAAVALLLKDADKLTLGQNVTVIASHSLESIVRQPPDRWMTNARMTHYQSLLLNERVSFAPPAVLNPATLLPVESEATPVHRCSEILAEETGTRRDLKDQPLPGVPAWYTDGSSFIAEGKRRAGAAIVDGKRTVWASSLPEGTSAQKAELVALTQALRLAEGKDINIYTDSRYAFATAHIHGAIYKQRGWLTSAGKDIKNKEEILALLEAIHLPKRVAIIHCPGHQKGNDPVATGNRRADEAAKQAALSTRVLAETTKPAGKRTADGSEFEKRTADGSEFESPKKKAKVE

SEQ ID NO: 937 - protein, 2092 aa, synthetic construct
MPAAKRVKLDGGDKKYSIGLDIGTNSVGWAVITDEYKVPSKKFKVLGNTDRHSIKKNLIGALLFDSGETAEATRLKRTARRRYTRRKNRICYLQEIFSNEMAKVDDSFFHRLEESFLVEEDKKHERHPIFGNIVDEVAYHEKYPTIYHLRKKLVDSTDKADLRLIYLALAHMIKFRGHFLIEGDLNPDNSDVDKLFIQLVQTYNQLFEENPINASGVDAKAILSARLSKSRRLENLIAQLPGEKKNGLFGNLIALSLGLTPNFKSNFDLAEDAKLQLSKDTYDDDLDNLLAQIGDQYADLFLAAKNLSDAILLSDILRVNTEITKAPLSASMIKRYDEHHQDLTLLKALVRQQLPEKYKEIFFDQSKNGYAGYIDGGASQEEFYKFIKPILEKMDGTEELLVKLNREDLLRKQRTFDNGSIPHQIHLGELHAILRRQEDFYPFLKDNREKIEKILTFRIPYYVGPLARGNSRFAWMTRKSEETITPWNFEEVVDKGASAQSFIERMTNFDKNLPNEKVLPKHSLLYEYFTVYNELTKVKYVTEGMRKPAFLSGEQKKAIVDLLFKTNRKVTVKQLKEDYFKKIECFDSVEISGVEDRFNASLGTYHDLLKIIKDKDFLDNEENEDILEDIVLTLTLFEDREMIEERLKTYAHLFDDKVMKQLKRRRYTGWGRLSRKLINGIRDKQSGKTILDFLKSDGFANRNFMQLIHDDSLTFKEDIQKAQVSGQGDSLHEHIANLAGSPAIKKGILQTVKVVDELVKVMGRHKPENIVIEMARENQTTQKGQKNSRERMKRIEEGIKELGSQILKEHPVENTQLQNEKLYLYYLQNGRDMYVDQELDINRLSDYDVDHIVPQSFLKDDSIDNKVLTRSDKARGKSDNVPSEEVVKKMKNYWRQLLNAKLITQRKFDNLTKAERGGLSELDKAGFIKRQLVETRQITKHVAQILDSRMNTKYDENDKLIREVKVITLKSKLVSDFRKDFQFYKVREINNYHHAHDAYLNAVVGTALIKKYPKLESEFVYGDYKVYDVRKMIAKSEQEIGKATAKYFFYSNIMNFFKTEITLANGEIRKRPLIETNGETGEIVWDKGRDFATVRKVLSMPQVNIVKKTEVQTGGFSKESILPKRNSDKLIARKKDWDPKKYGGFDSPTVAYSVLVVAKVEKGKSKKLKSVKELLGITIMERSSFEKNPIDFLEAKGYKEVKKDLIIKLPKYSLFELENGRKRMLASAGELQKGNELALPSKYVNFLYLASHYEKLKGSPEDNEQKQLFVEQHKHYLDEIIEQISEFSKRVILADANLDKVLSAYNKHRDKPIREQAENIIHLFTLTNLGAPAAFKYFDTTIDRKRYTSTKEVLDATLIHQSITGLYETRIDLSQLGGDGGGGGGGSGSSGGVLNLEEEYRLHEKPVPSSIDPSWLQLFPTVWAERAGMGLANQVPPVVVELRSGASPVAVRQYPMSKEAREGIRPHIQRFLDLGVLVPCQSPWNTPLLPVKKPGTNDYRPVQDLREINKRVQDIHPTVPNPYNLLSSLPPSHTWYSVLDLKDAFFCLKLHPNSQPLFAFEWRDPEKGNTGQLTWTRLPQGFKNSPTLFNEALHRDLAPFRALNPQVVLLQYVDDLLVAAPTYRDCKEGTQKLLQELSKLGYRVSAKKAQLCQKEVTYLGYLLKEGKRWLTPARKATVMKIPPPTTPRQVREFLGKAGFCRLFIPGFASLAAPLYPLTKPSIPFIWTEEHQKAFDRIKEALLSAPALALPDLTKPFTLYVDERAGVARGVLTQTLGPWRRPVAYLSKKLDPVASGWPTCLKAVAAVALLLKDADKLTLGQNVTVIASHSLESIVRQPPDRWMTNARMTHYQSLLLNERVSFAPPAVLNPATLLPVESEATPVHRCSEILAEETGTRRDLKDQPLPGVPAWYTDGSSFIAEGKRRAGAAIVDGKRTVWASSLPEGTSAQKAELVALTQALRLAEGKDINIYTDSRYAFATAHIHGAIYKQRGWLTSAGKDIKNKEEILALLEAIHLPKRVAIIHCPGHQKGNDPVATGNRRADEAAKQAALSTRVLAETTKPAGKRTADGSEFEKRTADGSEFESPKKKAKVE

SEQ ID NO: 938 - protein, 2098 aa, synthetic construct
MPAAKRVKLDGGDKKYSIGLDIGTNSVGWAVITDEYKVPSKKFKVLGNTDRHSIKKNLIGALLFDSGETAEATRLKRTARRRYTRRKNRICYLQEIFSNEMAKVDDSFFHRLEESFLVEEDKKHERHPIFGNIVDEVAYHEKYPTIYHLRKKLVDSTDKADLRLIYLALAHMIKFRGHFLIEGDLNPDNSDVDKLFIQLVQTYNQLFEENPINASGVDAKAILSARLSKSRRLENLIAQLPGEKKNGLFGNLIALSLGLTPNFKSNFDLAEDAKLQLSKDTYDDDLDNLLAQIGDQYADLFLAAKNLSDAILLSDILRVNTEITKAPLSASMIKRYDEHHQDLTLLKALVRQQLPEKYKEIFFDQSKNGYAGYIDGGASQEEFYKFIKPILEKMDGTEELLVKLNREDLLRKQRTFDNGSIPHQIHLGELHAILRRQEDFYPFLKDNREKIEKILTFRIPYYVGPLARGNSRFAWMTRKSEETITPWNFEEVVDKGASAQSFIERMTNFDKNLPNEKVLPKHSLLYEYFTVYNELTKVKYVTEGMRKPAFLSGEQKKAIVDLLFKTNRKVTVKQLKEDYFKKIECFDSVEISGVEDRFNASLGTYHDLLKIIKDKDFLDNEENEDILEDIVLTLTLFEDREMIEERLKTYAHLFDDKVMKQLKRRRYTGWGRLSRKLINGIRDKQSGKTILDFLKSDGFANRNFMQLIHDDSLTFKEDIQKAQVSGQGDSLHEHIANLAGSPAIKKGILQTVKVVDELVKVMGRHKPENIVIEMARENQTTQKGQKNSRERMKRIEEGIKELGSQILKEHPVENTQLQNEKLYLYYLQNGRDMYVDQELDINRLSDYDVDHIVPQSFLKDDSIDNKVLTRSDKARGKSDNVPSEEVVKKMKNYWRQLLNAKLITQRKFDNLTKAERGGLSELDKAGFIKRQLVETRQITKHVAQILDSRMNTKYDENDKLIREVKVITLKSKLVSDFRKDFQFYKVREINNYHHAHDAYLNAVVGTALIKKYPKLESEFVYGDYKVYDVRKMIAKSEQEIGKATAKYFFYSNIMNFFKTEITLANGEIRKRPLIETNGETGEIVWDKGRDFATVRKVLSMPQVNIVKKTEVQTGGFSKESILPKRNSDKLIARKKDWDPKKYGGFDSPTVAYSVLVVAKVEKGKSKKLKSVKELLGITIMERSSFEKNPIDFLEAKGYKEVKKDLIIKLPKYSLFELENGRKRMLASAGELQKGNELALPSKYVNFLYLASHYEKLKGSPEDNEQKQLFVEQHKHYLDEIIEQISEFSKRVILADANLDKVLSAYNKHRDKPIREQAENIIHLFTLTNLGAPAAFKYFDTTIDRKRYTSTKEVLDATLIHQSITGLYETRIDLSQLGGDGGGSSGSSGSSGSSGSSGGVLNLEEEYRLHEKPVPSSIDPSWLQLFPTVWAERAGMGLANQVPPVVVELRSGASPVAVRQYPMSKEAREGIRPHIQRFLDLGVLVPCQSPWNTPLLPVKKPGTNDYRPVQDLREINKRVQDIHPTVPNPYNLLSSLPPSHTWYSVLDLKDAFFCLKLHPNSQPLFAFEWRDPEKGNTGQLTWTRLPQGFKNSPTLFNEALHRDLAPFRALNPQVVLLQYVDDLLVAAPTYRDCKEGTQKLLQELSKLGYRVSAKKAQLCQKEVTYLGYLLKEGKRWLTPARKATVMKIPPPTTPRQVREFLGKAGFCRLFIPGFASLAAPLYPLTKPSIPFIWTEEHQKAFDRIKEALLSAPALALPDLTKPFTLYVDERAGVARGVLTQTLGPWRRPVAYLSKKLDPVASGWPTCLKAVAAVALLLKDADKLTLGQNVTVIASHSLESIVRQPPDRWMTNARMTHYQSLLLNERVSFAPPAVLNPATLLPVESEATPVHRCSEILAEETGTRRDLKDQPLPGVPAWYTDGSSFIAEGKRRAGAAIVDGKRTVWASSLPEGTSAQKAELVALTQALRLAEGKDINIYTDSRYAFATAHIHGAIYKQRGWLTSAGKDIKNKEEILALLEAIHLPKRVAIIHCPGHQKGNDPVATGNRRADEAAKQAALSTRVLAETTKPAGKRTADGSEFEKRTADGSEFESPKKKAKVE

SEQ ID NO: 939 - protein, 2094 aa, synthetic construct
MPAAKRVKLDGGDKKYSIGLDIGTNSVGWAVITDEYKVPSKKFKVLGNTDRHSIKKNLIGALLFDSGETAEATRLKRTARRRYTRRKNRICYLQEIFSNEMAKVDDSFFHRLEESFLVEEDKKHERHPIFGNIVDEVAYHEKYPTIYHLRKKLVDSTDKADLRLIYLALAHMIKFRGHFLIEGDLNPDNSDVDKLFIQLVQTYNQLFEENPINASGVDAKAILSARLSKSRRLENLIAQLPGEKKNGLFGNLIALSLGLTPNFKSNFDLAEDAKLQLSKDTYDDDLDNLLAQIGDQYADLFLAAKNLSDAILLSDILRVNTEITKAPLSASMIKRYDEHHQDLTLLKALVRQQLPEKYKEIFFDQSKNGYAGYIDGGASQEEFYKFIKPILEKMDGTEELLVKLNREDLLRKQRTFDNGSIPHQIHLGELHAILRRQEDFYPFLKDNREKIEKILTFRIPYYVGPLARGNSRFAWMTRKSEETITPWNFEEVVDKGASAQSFIERMTNFDKNLPNEKVLPKHSLLYEYFTVYNELTKVKYVTEGMRKPAFLSGEQKKAIVDLLFKTNRKVTVKQLKEDYFKKIECFDSVEISGVEDRFNASLGTYHDLLKIIKDKDFLDNEENEDILEDIVLTLTLFEDREMIEERLKTYAHLFDDKVMKQLKRRRYTGWGRLSRKLINGIRDKQSGKTILDFLKSDGFANRNFMQLIHDDSLTFKEDIQKAQVSGQGDSLHEHIANLAGSPAIKKGILQTVKVVDELVKVMGRHKPENIVIEMARENQTTQKGQKNSRERMKRIEEGIKELGSQILKEHPVENTQLQNEKLYLYYLQNGRDMYVDQELDINRLSDYDVDHIVPQSFLKDDSIDNKVLTRSDKARGKSDNVPSEEVVKKMKNYWRQLLNAKLITQRKFDNLTKAERGGLSELDKAGFIKRQLVETRQITKHVAQILDSRMNTKYDENDKLIREVKVITLKSKLVSDFRKDFQFYKVREINNYHHAHDAYLNAVVGTALIKKYPKLESEFVYGDYKVYDVRKMIAKSEQEIGKATAKYFFYSNIMNFFKTEITLANGEIRKRPLIETNGETGEIVWDKGRDFATVRKVLSMPQVNIVKKTEVQTGGFSKESILPKRNSDKLIARKKDWDPKKYGGFDSPTVAYSVLVVAKVEKGKSKKLKSVKELLGITIMERSSFEKNPIDFLEAKGYKEVKKDLIIKLPKYSLFELENGRKRMLASAGELQKGNELALPSKYVNFLYLASHYEKLKGSPEDNEQKQLFVEQHKHYLDEIIEQISEFSKRVILADANLDKVLSAYNKHRDKPIREQAENIIHLFTLTNLGAPAAFKYFDTTIDRKRYTSTKEVLDATLIHQSITGLYETRIDLSQLGGDGGPAPEAAAKGGSGGVLNLEEEYRLHEKPVPSSIDPSWLQLFPTVWAERAGMGLANQVPPVVVELRSGASPVAVRQYPMSKEAREGIRPHIQRFLDLGVLVPCQSPWNTPLLPVKKPGTNDYRPVQDLREINKRVQDIHPTVPNPYNLLSSLPPSHTWYSVLDLKDAFFCLKLHPNSQPLFAFEWRDPEKGNTGQLTWTRLPQGFKNSPTLFNEALHRDLAPFRALNPQVVLLQYVDDLLVAAPTYRDCKEGTQKLLQELSKLGYRVSAKKAQLCQKEVTYLGYLLKEGKRWLTPARKATVMKIPPPTTPRQVREFLGKAGFCRLFIPGFASLAAPLYPLTKPSIPFIWTEEHQKAFDRIKEALLSAPALALPDLTKPFTLYVDERAGVARGVLTQTLGPWRRPVAYLSKKLDPVASGWPTCLKAVAAVALLLKDADKLTLGQNVTVIASHSLESIVRQPPDRWMTNARMTHYQSLLLNERVSFAPPAVLNPATLLPVESEATPVHRCSEILAEETGTRRDLKDQPLPGVPAWYTDGSSFIAEGKRRAGAAIVDGKRTVWASSLPEGTSAQKAELVALTQALRLAEGKDINIYTDSRYAFATAHIHGAIYKQRGWLTSAGKDIKNKEEILALLEAIHLPKRVAIIHCPGHQKGNDPVATGNRRADEAAKQAALSTRVLAETTKPAGKRTADGSEFEKRTADGSEFESPKKKAKVE

SEQ ID NO: 940 - protein, 2089 aa, synthetic construct
MPAAKRVKLDGGDKKYSIGLDIGTNSVGWAVITDEYKVPSKKFKVLGNTDRHSIKKNLIGALLFDSGETAEATRLKRTARRRYTRRKNRICYLQEIFSNEMAKVDDSFFHRLEESFLVEEDKKHERHPIFGNIVDEVAYHEKYPTIYHLRKKLVDSTDKADLRLIYLALAHMIKFRGHFLIEGDLNPDNSDVDKLFIQLVQTYNQLFEENPINASGVDAKAILSARLSKSRRLENLIAQLPGEKKNGLFGNLIALSLGLTPNFKSNFDLAEDAKLQLSKDTYDDDLDNLLAQIGDQYADLFLAAKNLSDAILLSDILRVNTEITKAPLSASMIKRYDEHHQDLTLLKALVRQQLPEKYKEIFFDQSKNGYAGYIDGGASQEEFYKFIKPILEKMDGTEELLVKLNREDLLRKQRTFDNGSIPHQIHLGELHAILRRQEDFYPFLKDNREKIEKILTFRIPYYVGPLARGNSRFAWMTRKSEETITPWNFEEVVDKGASAQSFIERMTNFDKNLPNEKVLPKHSLLYEYFTVYNELTKVKYVTEGMRKPAFLSGEQKKAIVDLLFKTNRKVTVKQLKEDYFKKIECFDSVEISGVEDRFNASLGTYHDLLKIIKDKDFLDNEENEDILEDIVLTLTLFEDREMIEERLKTYAHLFDDKVMKQLKRRRYTGWGRLSRKLINGIRDKQSGKTILDFLKSDGFANRNFMQLIHDDSLTFKEDIQKAQVSGQGDSLHEHIANLAGSPAIKKGILQTVKVVDELVKVMGRHKPENIVIEMARENQTTQKGQKNSRERMKRIEEGIKELGSQILKEHPVENTQLQNEKLYLYYLQNGRDMYVDQELDINRLSDYDVDHIVPQSFLKDDSIDNKVLTRSDKARGKSDNVPSEEVVKKMKNYWRQLLNAKLITQRKFDNLTKAERGGLSELDKAGFIKRQLVETRQITKHVAQILDSRMNTKYDENDKLIREVKVITLKSKLVSDFRKDFQFYKVREINNYHHAHDAYLNAVVGTALIKKYPKLESEFVYGDYKVYDVRKMIAKSEQEIGKATAKYFFYSNIMNFFKTEITLANGEIRKRPLIETNGETGEIVWDKGRDFATVRKVLSMPQVNIVKKTEVQTGGFSKESILPKRNSDKLIARKKDWDPKKYGGFDSPTVAYSVLVVAKVEKGKSKKLKSVKELLGITIMERSSFEKNPIDFLEAKGYKEVKKDLIIKLPKYSLFELENGRKRMLASAGELQKGNELALPSKYVNFLYLASHYEKLKGSPEDNEQKQLFVEQHKHYLDEIIEQISEFSKRVILADANLDKVLSAYNKHRDKPIREQAENIIHLFTLTNLGAPAAFKYFDTTIDRKRYTSTKEVLDATLIHQSITGLYETRIDLSQLGGDGGGGGPAPGGVLNLEEEYRLHEKPVPSSIDPSWLQLFPTVWAERAGMGLANQVPPVVVELRSGASPVAVRQYPMSKEAREGIRPHIQRFLDLGVLVPCQSPWNTPLLPVKKPGTNDYRPVQDLREINKRVQDIHPTVPNPYNLLSSLPPSHTWYSVLDLKDAFFCLKLHPNSQPLFAFEWRDPEKGNTGQLTWTRLPQGFKNSPTLFNEALHRDLAPFRALNPQVVLLQYVDDLLVAAPTYRDCKEGTQKLLQELSKLGYRVSAKKAQLCQKEVTYLGYLLKEGKRWLTPARKATVMKIPPPTTPRQVREFLGKAGFCRLFIPGFASLAAPLYPLTKPSIPFIWTEEHQKAFDRIKEALLSAPALALPDLTKPFTLYVDERAGVARGVLTQTLGPWRRPVAYLSKKLDPVASGWPTCLKAVAAVALLLKDADKLTLGQNVTVIASHSLESIVRQPPDRWMTNARMTHYQSLLLNERVSFAPPAVLNPATLLPVESEATPVHRCSEILAEETGTRRDLKDQPLPGVPAWYTDGSSFIAEGKRRAGAAIVDGKRTVWASSLPEGTSAQKAELVALTQALRLAEGKDINIYTDSRYAFATAHIHGAIYKQRGWLTSAGKDIKNKEEILALLEAIHLPKRVAIIHCPGHQKGNDPVATGNRRADEAAKQAALSTRVLAETTKPAGKRTADGSEFEKRTADGSEFESPKKKAKVE

SEQ ID NO: 941 - protein, 2089 aa, synthetic construct
MPAAKRVKLDGGDKKYSIGLDIGTNSVGWAVITDEYKVPSKKFKVLGNTDRHSIKKNLIGALLFDSGETAEATRLKRTARRRYTRRKNRICYLQEIFSNEMAKVDDSFFHRLEESFLVEEDKKHERHPIFGNIVDEVAYHEKYPTIYHLRKKLVDSTDKADLRLIYLALAHMIKFRGHFLIEGDLNPDNSDVDKLFIQLVQTYNQLFEENPINASGVDAKAILSARLSKSRRLENLIAQLPGEKKNGLFGNLIALSLGLTPNFKSNFDLAEDAKLQLSKDTYDDDLDNLLAQIGDQYADLFLAAKNLSDAILLSDILRVNTEITKAPLSASMIKRYDEHHQDLTLLKALVRQQLPEKYKEIFFDQSKNGYAGYIDGGASQEEFYKFIKPILEKMDGTEELLVKLNREDLLRKQRTFDNGSIPHQIHLGELHAILRRQEDFYPFLKDNREKIEKILTFRIPYYVGPLARGNSRFAWMTRKSEETITPWNFEEVVDKGASAQSFIERMTNFDKNLPNEKVLPKHSLLYEYFTVYNELTKVKYVTEGMRKPAFLSGEQKKAIVDLLFKTNRKVTVKQLKEDYFKKIECFDSVEISGVEDRFNASLGTYHDLLKIIKDKDFLDNEENEDILEDIVLTLTLFEDREMIEERLKTYAHLFDDKVMKQLKRRRYTGWGRLSRKLINGIRDKQSGKTILDFLKSDGFANRNFMQLIHDDSLTFKEDIQKAQVSGQGDSLHEHIANLAGSPAIKKGILQTVKVVDELVKVMGRHKPENIVIEMARENQTTQKGQKNSRERMKRIEEGIKELGSQILKEHPVENTQLQNEKLYLYYLQNGRDMYVDQELDINRLSDYDVDHIVPQSFLKDDSIDNKVLTRSDKARGKSDNVPSEEVVKKMKNYWRQLLNAKLITQRKFDNLTKAERGGLSELDKAGFIKRQLVETRQITKHVAQILDSRMNTKYDENDKLIREVKVITLKSKLVSDFRKDFQFYKVREINNYHHAHDAYLNAVVGTALIKKYPKLESEFVYGDYKVYDVRKMIAKSEQEIGKATAKYFFYSNIMNFFKTEITLANGEIRKRPLIETNGETGEIVWDKGRDFATVRKVLSMPQVNIVKKTEVQTGGFSKESILPKRNSDKLIARKKDWDPKKYGGFDSPTVAYSVLVVAKVEKGKSKKLKSVKELLGITIMERSSFEKNPIDFLEAKGYKEVKKDLIIKLPKYSLFELENGRKRMLASAGELQKGNELALPSKYVNFLYLASHYEKLKGSPEDNEQKQLFVEQHKHYLDEIIEQISEFSKRVILADANLDKVLSAYNKHRDKPIREQAENIIHLFTLTNLGAPAAFKYFDTTIDRKRYTSTKEVLDATLIHQSITGLYETRIDLSQLGGDGGPAPGSSGGVLNLEEEYRLHEKPVPSSIDPSWLQLFPTVWAERAGMGLANQVPPVVVELRSGASPVAVRQYPMSKEAREGIRPHIQRFLDLGVLVPCQSPWNTPLLPVKKPGTNDYRPVQDLREINKRVQDIHPTVPNPYNLLSSLPPSHTWYSVLDLKDAFFCLKLHPNSQPLFAFEWRDPEKGNTGQLTWTRLPQGFKNSPTLFNEALHRDLAPFRALNPQVVLLQYVDDLLVAAPTYRDCKEGTQKLLQELSKLGYRVSAKKAQLCQKEVTYLGYLLKEGKRWLTPARKATVMKIPPPTTPRQVREFLGKAGFCRLFIPGFASLAAPLYPLTKPSIPFIWTEEHQKAFDRIKEALLSAPALALPDLTKPFTLYVDERAGVARGVLTQTLGPWRRPVAYLSKKLDPVASGWPTCLKAVAAVALLLKDADKLTLGQNVTVIASHSLESIVRQPPDRWMTNARMTHYQSLLLNERVSFAPPAVLNPATLLPVESEATPVHRCSEILAEETGTRRDLKDQPLPGVPAWYTDGSSFIAEGKRRAGAAIVDGKRTVWASSLPEGTSAQKAELVALTQALRLAEGKDINIYTDSRYAFATAHIHGAIYKQRGWLTSAGKDIKNKEEILALLEAIHLPKRVAIIHCPGHQKGNDPVATGNRRADEAAKQAALSTRVLAETTKPAGKRTADGSEFEKRTADGSEFESPKKKAKVE

SEQ ID NO: 942 - protein, 2091 aa, synthetic construct
MPAAKRVKLDGGDKKYSIGLDIGTNSVGWAVITDEYKVPSKKFKVLGNTDRHSIKKNLIGALLFDSGETAEATRLKRTARRRYTRRKNRICYLQEIFSNEMAKVDDSFFHRLEESFLVEEDKKHERHPIFGNIVDEVAYHEKYPTIYHLRKKLVDSTDKADLRLIYLALAHMIKFRGHFLIEGDLNPDNSDVDKLFIQLVQTYNQLFEENPINASGVDAKAILSARLSKSRRLENLIAQLPGEKKNGLFGNLIALSLGLTPNFKSNFDLAEDAKLQLSKDTYDDDLDNLLAQIGDQYADLFLAAKNLSDAILLSDILRVNTEITKAPLSASMIKRYDEHHQDLTLLKALVRQQLPEKYKEIFFDQSKNGYAGYIDGGASQEEFYKFIKPILEKMDGTEELLVKLNREDLLRKQRTFDNGSIPHQIHLGELHAILRRQEDFYPFLKDNREKIEKILTFRIPYYVGPLARGNSRFAWMTRKSEETITPWNFEEVVDKGASAQSFIERMTNFDKNLPNEKVLPKHSLLYEYFTVYNELTKVKYVTEGMRKPAFLSGEQKKAIVDLLFKTNRKVTVKQLKEDYFKKIECFDSVEISGVEDRFNASLGTYHDLLKIIKDKDFLDNEENEDILEDIVLTLTLFEDREMIEERLKTYAHLFDDKVMKQLKRRRYTGWGRLSRKLINGIRDKQSGKTILDFLKSDGFANRNFMQLIHDDSLTFKEDIQKAQVSGQGDSLHEHIANLAGSPAIKKGILQTVKVVDELVKVMGRHKPENIVIEMARENQTTQKGQKNSRERMKRIEEGIKELGSQILKEHPVENTQLQNEKLYLYYLQNGRDMYVDQELDINRLSDYDVDHIVPQSFLKDDSIDNKVLTRSDKARGKSDNVPSEEVVKKMKNYWRQLLNAKLITQRKFDNLTKAERGGLSELDKAGFIKRQLVETRQITKHVAQILDSRMNTKYDENDKLIREVKVITLKSKLVSDFRKDFQFYKVREINNYHHAHDAYLNAVVGTALIKKYPKLESEFVYGDYKVYDVRKMIAKSEQEIGKATAKYFFYSNIMNFFKTEITLANGEIRKRPLIETNGETGEIVWDKGRDFATVRKVLSMPQVNIVKKTEVQTGGFSKESILPKRNSDKLIARKKDWDPKKYGGFDSPTVAYSVLVVAKVEKGKSKKLKSVKELLGITIMERSSFEKNPIDFLEAKGYKEVKKDLIIKLPKYSLFELENGRKRMLASAGELQKGNELALPSKYVNFLYLASHYEKLKGSPEDNEQKQLFVEQHKHYLDEIIEQISEFSKRVILADANLDKVLSAYNKHRDKPIREQAENIIHLFTLTNLGAPAAFKYFDTTIDRKRYTSTKEVLDATLIHQSITGLYETRIDLSQLGGDGGEAAAKGSSGGVLNLEEEYRLHEKPVPSSIDPSWLQLFPTVWAERAGMGLANQVPPVVVELRSGASPVAVRQYPMSKEAREGIRPHIQRFLDLGVLVPCQSPWNTPLLPVKKPGTNDYRPVQDLREINKRVQDIHPTVPNPYNLLSSLPPSHTWYSVLDLKDAFFCLKLHPNSQPLFAFEWRDPEKGNTGQLTWTRLPQGFKNSPTLFNEALHRDLAPFRALNPQVVLLQYVDDLLVAAPTYRDCKEGTQKLLQELSKLGYRVSAKKAQLCQKEVTYLGYLLKEGKRWLTPARKATVMKIPPPTTPRQVREFLGKAGFCRLFIPGFASLAAPLYPLTKPSIPFIWTEEHQKAFDRIKEALLSAPALALPDLTKPFTLYVDERAGVARGVLTQTLGPWRRPVAYLSKKLDPVASGWPTCLKAVAAVALLLKDADKLTLGQNVTVIASHSLESIVRQPPDRWMTNARMTHYQSLLLNERVSFAPPAVLNPATLLPVESEATPVHRCSEILAEETGTRRDLKDQPLPGVPAWYTDGSSFIAEGKRRAGAAIVDGKRTVWASSLPEGTSAQKAELVALTQALRLAEGKDINIYTDSRYAFATAHIHGAIYKQRGWLTSAGKDIKNKEEILALLEAIHLPKRVAIIHCPGHQKGNDPVATGNRRADEAAKQAALSTRVLAETTKPAGKRTADGSEFEKRTADGSEFESPKKKAKVE

SEQ ID NO: 943 - protein, 2089 aa, synthetic construct
MPAAKRVKLDGGDKKYSIGLDIGTNSVGWAVITDEYKVPSKKFKVLGNTDRHSIKKNLIGALLFDSGETAEATRLKRTARRRYTRRKNRICYLQEIFSNEMAKVDDSFFHRLEESFLVEEDKKHERHPIFGNIVDEVAYHEKYPTIYHLRKKLVDSTDKADLRLIYLALAHMIKFRGHFLIEGDLNPDNSDVDKLFIQLVQTYNQLFEENPINASGVDAKAILSARLSKSRRLENLIAQLPGEKKNGLFGNLIALSLGLTPNFKSNFDLAEDAKLQLSKDTYDDDLDNLLAQIGDQYADLFLAAKNLSDAILLSDILRVNTEITKAPLSASMIKRYDEHHQDLTLLKALVRQQLPEKYKEIFFDQSKNGYAGYIDGGASQEEFYKFIKPILEKMDGTEELLVKLNREDLLRKQRTFDNGSIPHQIHLGELHAILRRQEDFYPFLKDNREKIEKILTFRIPYYVGPLARGNSRFAWMTRKSEETITPWNFEEVVDKGASAQSFIERMTNFDKNLPNEKVLPKHSLLYEYFTVYNELTKVKYVTEGMRKPAFLSGEQKKAIVDLLFKTNRKVTVKQLKEDYFKKIECFDSVEISGVEDRFNASLGTYHDLLKIIKDKDFLDNEENEDILEDIVLTLTLFEDREMIEERLKTYAHLFDDKVMKQLKRRRYTGWGRLSRKLINGIRDKQSGKTILDFLKSDGFANRNFMQLIHDDSLTFKEDIQKAQVSGQGDSLHEHIANLAGSPAIKKGILQTVKVVDELVKVMGRHKPENIVIEMARENQTTQKGQKNSRERMKRIEEGIKELGSQILKEHPVENTQLQNEKLYLYYLQNGRDMYVDQELDINRLSDYDVDHIVPQSFLKDDSIDNKVLTRSDKARGKSDNVPSEEVVKKMKNYWRQLLNAKLITQRKFDNLTKAERGGLSELDKAGFIKRQLVETRQITKHVAQILDSRMNTKYDENDKLIREVKVITLKSKLVSDFRKDFQFYKVREINNYHHAHDAYLNAVVGTALIKKYPKLESEFVYGDYKVYDVRKMIAKSEQEIGKATAKYFFYSNIMNFFKTEITLANGEIRKRPLIETNGETGEIVWDKGRDFATVRKVLSMPQVNIVKKTEVQTGGFSKESILPKRNSDKLIARKKDWDPKKYGGFDSPTVAYSVLVVAKVEKGKSKKLKSVKELLGITIMERSSFEKNPIDFLEAKGYKEVKKDLIIKLPKYSLFELENGRKRMLASAGELQKGNELALPSKYVNFLYLASHYEKLKGSPEDNEQKQLFVEQHKHYLDEIIEQISEFSKRVILADANLDKVLSAYNKHRDKPIREQAENIIHLFTLTNLGAPAAFKYFDTTIDRKRYTSTKEVLDATLIHQSITGLYETRIDLSQLGGDGGPAPGGSGGVLNLEEEYRLHEKPVPSSIDPSWLQLFPTVWAERAGMGLANQVPPVVVELRSGASPVAVRQYPMSKEAREGIRPHIQRFLDLGVLVPCQSPWNTPLLPVKKPGTNDYRPVQDLREINKRVQDIHPTVPNPYNLLSSLPPSHTWYSVLDLKDAFFCLKLHPNSQPLFAFEWRDPEKGNTGQLTWTRLPQGFKNSPTLFNEALHRDLAPFRALNPQVVLLQYVDDLLVAAPTYRDCKEGTQKLLQELSKLGYRVSAKKAQLCQKEVTYLGYLLKEGKRWLTPARKATVMKIPPPTTPRQVREFLGKAGFCRLFIPGFASLAAPLYPLTKPSIPFIWTEEHQKAFDRIKEALLSAPALALPDLTKPFTLYVDERAGVARGVLTQTLGPWRRPVAYLSKKLDPVASGWPTCLKAVAAVALLLKDADKLTLGQNVTVIASHSLESIVRQPPDRWMTNARMTHYQSLLLNERVSFAPPAVLNPATLLPVESEATPVHRCSEILAEETGTRRDLKDQPLPGVPAWYTDGSSFIAEGKRRAGAAIVDGKRTVWASSLPEGTSAQKAELVALTQALRLAEGKDINIYTDSRYAFATAHIHGAIYKQRGWLTSAGKDIKNKEEILALLEAIHLPKRVAIIHCPGHQKGNDPVATGNRRADEAAKQAALSTRVLAETTKPAGKRTADGSEFEKRTADGSEFESPKKKAKVE

SEQ ID NO: 944 - protein, 2094 aa, synthetic construct
MPAAKRVKLDGGDKKYSIGLDIGTNSVGWAVITDEYKVPSKKFKVLGNTDRHSIKKNLIGALLFDSGETAEATRLKRTARRRYTRRKNRICYLQEIFSNEMAKVDDSFFHRLEESFLVEEDKKHERHPIFGNIVDEVAYHEKYPTIYHLRKKLVDSTDKADLRLIYLALAHMIKFRGHFLIEGDLNPDNSDVDKLFIQLVQTYNQLFEENPINASGVDAKAILSARLSKSRRLENLIAQLPGEKKNGLFGNLIALSLGLTPNFKSNFDLAEDAKLQLSKDTYDDDLDNLLAQIGDQYADLFLAAKNLSDAILLSDILRVNTEITKAPLSASMIKRYDEHHQDLTLLKALVRQQLPEKYKEIFFDQSKNGYAGYIDGGASQEEFYKFIKPILEKMDGTEELLVKLNREDLLRKQRTFDNGSIPHQIHLGELHAILRRQEDFYPFLKDNREKIEKILTFRIPYYVGPLARGNSRFAWMTRKSEETITPWNFEEVVDKGASAQSFIERMTNFDKNLPNEKVLPKHSLLYEYFTVYNELTKVKYVTEGMRKPAFLSGEQKKAIVDLLFKTNRKVTVKQLKEDYFKKIECFDSVEISGVEDRFNASLGTYHDLLKIIKDKDFLDNEENEDILEDIVLTLTLFEDREMIEERLKTYAHLFDDKVMKQLKRRRYTGWGRLSRKLINGIRDKQSGKTILDFLKSDGFANRNFMQLIHDDSLTFKEDIQKAQVSGQGDSLHEHIANLAGSPAIKKGILQTVKVVDELVKVMGRHKPENIVIEMARENQTTQKGQKNSRERMKRIEEGIKELGSQILKEHPVENTQLQNEKLYLYYLQNGRDMYVDQELDINRLSDYDVDHIVPQSFLKDDSIDNKVLTRSDKARGKSDNVPSEEVVKKMKNYWRQLLNAKLITQRKFDNLTKAERGGLSELDKAGFIKRQLVETRQITKHVAQILDSRMNTKYDENDKLIREVKVITLKSKLVSDFRKDFQFYKVREINNYHHAHDAYLNAVVGTALIKKYPKLESEFVYGDYKVYDVRKMIAKSEQEIGKATAKYFFYSNIMNFFKTEITLANGEIRKRPLIETNGETGEIVWDKGRDFATVRKVLSMPQVNIVKKTEVQTGGFSKESILPKRNSDKLIARKKDWDPKKYGGFDSPTVAYSVLVVAKVEKGKSKKLKSVKELLGITIMERSSFEKNPIDFLEAKGYKEVKKDLIIKLPKYSLFELENGRKRMLASAGELQKGNELALPSKYVNFLYLASHYEKLKGSPEDNEQKQLFVEQHKHYLDEIIEQISEFSKRVILADANLDKVLSAYNKHRDKPIREQAENIIHLFTLTNLGAPAAFKYFDTTIDRKRYTSTKEVLDATLIHQSITGLYETRIDLSQLGGDGGGSSPAPEAAAKGGVLNLEEEYRLHEKPVPSSIDPSWLQLFPTVWAERAGMGLANQVPPVVVELRSGASPVAVRQYPMSKEAREGIRPHIQRFLDLGVLVPCQSPWNTPLLPVKKPGTNDYRPVQDLREINKRVQDIHPTVPNPYNLLSSLPPSHTWYSVLDLKDAFFCLKLHPNSQPLFAFEWRDPEKGNTGQLTWTRLPQGFKNSPTLFNEALHRDLAPFRALNPQVVLLQYVDDLLVAAPTYRDCKEGTQKLLQELSKLGYRVSAKKAQLCQKEVTYLGYLLKEGKRWLTPARKATVMKIPPPTTPRQVREFLGKAGFCRLFIPGFASLAAPLYPLTKPSIPFIWTEEHQKAFDRIKEALLSAPALALPDLTKPFTLYVDERAGVARGVLTQTLGPWRRPVAYLSKKLDPVASGWPTCLKAVAAVALLLKDADKLTLGQNVTVIASHSLESIVRQPPDRWMTNARMTHYQSLLLNERVSFAPPAVLNPATLLPVESEATPVHRCSEILAEETGTRRDLKDQPLPGVPAWYTDGSSFIAEGKRRAGAAIVDGKRTVWASSLPEGTSAQKAELVALTQALRLAEGKDINIYTDSRYAFATAHIHGAIYKQRGWLTSAGKDIKNKEEILALLEAIHLPKRVAIIHCPGHQKGNDPVATGNRRADEAAKQAALSTRVLAETTKPAGKRTADGSEFEKRTADGSEFESPKKKAKVE

SEQ ID NO: 945 - protein, 2093 aa, synthetic construct
MPAAKRVKLDGGDKKYSIGLDIGTNSVGWAVITDEYKVPSKKFKVLGNTDRHSIKKNLIGALLFDSGETAEATRLKRTARRRYTRRKNRICYLQEIFSNEMAKVDDSFFHRLEESFLVEEDKKHERHPIFGNIVDEVAYHEKYPTIYHLRKKLVDSTDKADLRLIYLALAHMIKFRGHFLIEGDLNPDNSDVDKLFIQLVQTYNQLFEENPINASGVDAKAILSARLSKSRRLENLIAQLPGEKKNGLFGNLIALSLGLTPNFKSNFDLAEDAKLQLSKDTYDDDLDNLLAQIGDQYADLFLAAKNLSDAILLSDILRVNTEITKAPLSASMIKRYDEHHQDLTLLKALVRQQLPEKYKEIFFDQSKNGYAGYIDGGASQEEFYKFIKPILEKMDGTEELLVKLNREDLLRKQRTFDNGSIPHQIHLGELHAILRRQEDFYPFLKDNREKIEKILTFRIPYYVGPLARGNSRFAWMTRKSEETITPWNFEEVVDKGASAQSFIERMTNFDKNLPNEKVLPKHSLLYEYFTVYNELTKVKYVTEGMRKPAFLSGEQKKAIVDLLFKTNRKVTVKQLKEDYFKKIECFDSVEISGVEDRFNASLGTYHDLLKIIKDKDFLDNEENEDILEDIVLTLTLFEDREMIEERLKTYAHLFDDKVMKQLKRRRYTGWGRLSRKLINGIRDKQSGKTILDFLKSDGFANRNFMQLIHDDSLTFKEDIQKAQVSGQGDSLHEHIANLAGSPAIKKGILQTVKVVDELVKVMGRHKPENIVIEMARENQTTQKGQKNSRERMKRIEEGIKELGSQILKEHPVENTQLQNEKLYLYYLQNGRDMYVDQELDINRLSDYDVDHIVPQSFLKDDSIDNKVLTRSDKARGKSDNVPSEEVVKKMKNYWRQLLNAKLITQRKFDNLTKAERGGLSELDKAGFIKRQLVETRQITKHVAQILDSRMNTKYDENDKLIREVKVITLKSKLVSDFRKDFQFYKVREINNYHHAHDAYLNAVVGTALIKKYPKLESEFVYGDYKVYDVRKMIAKSEQEIGKATAKYFFYSNIMNFFKTEITLANGEIRKRPLIETNGETGEIVWDKGRDFATVRKVLSMPQVNIVKKTEVQTGGFSKESILPKRNSDKLIARKKDWDPKKYGGFDSPTVAYSVLVVAKVEKGKSKKLKSVKELLGITIMERSSFEKNPIDFLEAKGYKEVKKDLIIKLPKYSLFELENGRKRMLASAGELQKGNELALPSKYVNFLYLASHYEKLKGSPEDNEQKQLFVEQHKHYLDEIIEQISEFSKRVILADANLDKVLSAYNKHRDKPIREQAENIIHLFTLTNLGAPAAFKYFDTTIDRKRYTSTKEVLDATLIHQSITGLYETRIDLSQLGGDGGGGGGSGGGGSGGVLNLEEEYRLHEKPVPSSIDPSWLQLFPTVWAERAGMGLANQVPPVVVELRSGASPVAVRQYPMSKEAREGIRPHIQRFLDLGVLVPCQSPWNTPLLPVKKPGTNDYRPVQDLREINKRVQDIHPTVPNPYNLLSSLPPSHTWYSVLDLKDAFFCLKLHPNSQPLFAFEWRDPEKGNTGQLTWTRLPQGFKNSPTLFNEALHRDLAPFRALNPQVVLLQYVDDLLVAAPTYRDCKEGTQKLLQELSKLGYRVSAKKAQLCQKEVTYLGYLLKEGKRWLTPARKATVMKIPPPTTPRQVREFLGKAGFCRLFIPGFASLAAPLYPLTKPSIPFIWTEEHQKAFDRIKEALLSAPALALPDLTKPFTLYVDERAGVARGVLTQTLGPWRRPVAYLSKKLDPVASGWPTCLKAVAAVALLLKDADKLTLGQNVTVIASHSLESIVRQPPDRWMTNARMTHYQSLLLNERVSFAPPAVLNPATLLPVESEATPVHRCSEILAEETGTRRDLKDQPLPGVPAWYTDGSSFIAEGKRRAGAAIVDGKRTVWASSLPEGTSAQKAELVALTQALRLAEGKDINIYTDSRYAFATAHIHGAIYKQRGWLTSAGKDIKNKEEILALLEAIHLPKRVAIIHCPGHQKGNDPVATGNRRADEAAKQAALSTRVLAETTKPAGKRTADGSEFEKRTADGSEFESPKKKAKVE

SEQ ID NO: 946 - protein, 2092 aa, synthetic construct
MPAAKRVKLDGGDKKYSIGLDIGTNSVGWAVITDEYKVPSKKFKVLGNTDRHSIKKNLIGALLFDSGETAEATRLKRTARRRYTRRKNRICYLQEIFSNEMAKVDDSFFHRLEESFLVEEDKKHERHPIFGNIVDEVAYHEKYPTIYHLRKKLVDSTDKADLRLIYLALAHMIKFRGHFLIEGDLNPDNSDVDKLFIQLVQTYNQLFEENPINASGVDAKAILSARLSKSRRLENLIAQLPGEKKNGLFGNLIALSLGLTPNFKSNFDLAEDAKLQLSKDTYDDDLDNLLAQIGDQYADLFLAAKNLSDAILLSDILRVNTEITKAPLSASMIKRYDEHHQDLTLLKALVRQQLPEKYKEIFFDQSKNGYAGYIDGGASQEEFYKFIKPILEKMDGTEELLVKLNREDLLRKQRTFDNGSIPHQIHLGELHAILRRQEDFYPFLKDNREKIEKILTFRIPYYVGPLARGNSRFAWMTRKSEETITPWNFEEVVDKGASAQSFIERMTNFDKNLPNEKVLPKHSLLYEYFTVYNELTKVKYVTEGMRKPAFLSGEQKKAIVDLLFKTNRKVTVKQLKEDYFKKIECFDSVEISGVEDRFNASLGTYHDLLKIIKDKDFLDNEENEDILEDIVLTLTLFEDREMIEERLKTYAHLFDDKVMKQLKRRRYTGWGRLSRKLINGIRDKQSGKTILDFLKSDGFANRNFMQLIHDDSLTFKEDIQKAQVSGQGDSLHEHIANLAGSPAIKKGILQTVKVVDELVKVMGRHKPENIVIEMARENQTTQKGQKNSRERMKRIEEGIKELGSQILKEHPVENTQLQNEKLYLYYLQNGRDMYVDQELDINRLSDYDVDHIVPQSFLKDDSIDNKVLTRSDKARGKSDNVPSEEVVKKMKNYWRQLLNAKLITQRKFDNLTKAERGGLSELDKAGFIKRQLVETRQITKHVAQILDSRMNTKYDENDKLIREVKVITLKSKLVSDFRKDFQFYKVREINNYHHAHDAYLNAVVGTALIKKYPKLESEFVYGDYKVYDVRKMIAKSEQEIGKATAKYFFYSNIMNFFKTEITLANGEIRKRPLIETNGETGEIVWDKGRDFATVRKVLSMPQVNIVKKTEVQTGGFSKESILPKRNSDKLIARKKDWDPKKYGGFDSPTVAYSVLVVAKVEKGKSKKLKSVKELLGITIMERSSFEKNPIDFLEAKGYKEVKKDLIIKLPKYSLFELENGRKRMLASAGELQKGNELALPSKYVNFLYLASHYEKLKGSPEDNEQKQLFVEQHKHYLDEIIEQISEFSKRVILADANLDKVLSAYNKHRDKPIREQAENIIHLFTLTNLGAPAAFKYFDTTIDRKRYTSTKEVLDATLIHQSITGLYETRIDLSQLGGDGGGGGGSSGGSGGVLNLEEEYRLHEKPVPSSIDPSWLQLFPTVWAERAGMGLANQVPPVVVELRSGASPVAVRQYPMSKEAREGIRPHIQRFLDLGVLVPCQSPWNTPLLPVKKPGTNDYRPVQDLREINKRVQDIHPTVPNPYNLLSSLPPSHTWYSVLDLKDAFFCLKLHPNSQPLFAFEWRDPEKGNTGQLTWTRLPQGFKNSPTLFNEALHRDLAPFRALNPQVVLLQYVDDLLVAAPTYRDCKEGTQKLLQELSKLGYRVSAKKAQLCQKEVTYLGYLLKEGKRWLTPARKATVMKIPPPTTPRQVREFLGKAGFCRLFIPGFASLAAPLYPLTKPSIPFIWTEEHQKAFDRIKEALLSAPALALPDLTKPFTLYVDERAGVARGVLTQTLGPWRRPVAYLSKKLDPVASGWPTCLKAVAAVALLLKDADKLTLGQNVTVIASHSLESIVRQPPDRWMTNARMTHYQSLLLNERVSFAPPAVLNPATLLPVESEATPVHRCSEILAEETGTRRDLKDQPLPGVPAWYTDGSSFIAEGKRRAGAAIVDGKRTVWASSLPEGTSAQKAELVALTQALRLAEGKDINIYTDSRYAFATAHIHGAIYKQRGWLTSAGKDIKNKEEILALLEAIHLPKRVAIIHCPGHQKGNDPVATGNRRADEAAKQAALSTRVLAETTKPAGKRTADGSEFEKRTADGSEFESPKKKAKVE

SEQ ID NO: 947 - protein, 2091 aa, synthetic construct
MPAAKRVKLDGGDKKYSIGLDIGTNSVGWAVITDEYKVPSKKFKVLGNTDRHSIKKNLIGALLFDSGETAEATRLKRTARRRYTRRKNRICYLQEIFSNEMAKVDDSFFHRLEESFLVEEDKKHERHPIFGNIVDEVAYHEKYPTIYHLRKKLVDSTDKADLRLIYLALAHMIKFRGHFLIEGDLNPDNSDVDKLFIQLVQTYNQLFEENPINASGVDAKAILSARLSKSRRLENLIAQLPGEKKNGLFGNLIALSLGLTPNFKSNFDLAEDAKLQLSKDTYDDDLDNLLAQIGDQYADLFLAAKNLSDAILLSDILRVNTEITKAPLSASMIKRYDEHHQDLTLLKALVRQQLPEKYKEIFFDQSKNGYAGYIDGGASQEEFYKFIKPILEKMDGTEELLVKLNREDLLRKQRTFDNGSIPHQIHLGELHAILRRQEDFYPFLKDNREKIEKILTFRIPYYVGPLARGNSRFAWMTRKSEETITPWNFEEVVDKGASAQSFIERMTNFDKNLPNEKVLPKHSLLYEYFTVYNELTKVKYVTEGMRKPAFLSGEQKKAIVDLLFKTNRKVTVKQLKEDYFKKIECFDSVEISGVEDRFNASLGTYHDLLKIIKDKDFLDNEENEDILEDIVLTLTLFEDREMIEERLKTYAHLFDDKVMKQLKRRRYTGWGRLSRKLINGIRDKQSGKTILDFLKSDGFANRNFMQLIHDDSLTFKEDIQKAQVSGQGDSLHEHIANLAGSPAIKKGILQTVKVVDELVKVMGRHKPENIVIEMARENQTTQKGQKNSRERMKRIEEGIKELGSQILKEHPVENTQLQNEKLYLYYLQNGRDMYVDQELDINRLSDYDVDHIVPQSFLKDDSIDNKVLTRSDKARGKSDNVPSEEVVKKMKNYWRQLLNAKLITQRKFDNLTKAERGGLSELDKAGFIKRQLVETRQITKHVAQILDSRMNTKYDENDKLIREVKVITLKSKLVSDFRKDFQFYKVREINNYHHAHDAYLNAVVGTALIKKYPKLESEFVYGDYKVYDVRKMIAKSEQEIGKATAKYFFYSNIMNFFKTEITLANGEIRKRPLIETNGETGEIVWDKGRDFATVRKVLSMPQVNIVKKTEVQTGGFSKESILPKRNSDKLIARKKDWDPKKYGGFDSPTVAYSVLVVAKVEKGKSKKLKSVKELLGITIMERSSFEKNPIDFLEAKGYKEVKKDLIIKLPKYSLFELENGRKRMLASAGELQKGNELALPSKYVNFLYLASHYEKLKGSPEDNEQKQLFVEQHKHYLDEIIEQISEFSKRVILADANLDKVLSAYNKHRDKPIREQAENIIHLFTLTNLGAPAAFKYFDTTIDRKRYTSTKEVLDATLIHQSITGLYETRIDLSQLGGDGGPAPEAAAKGGVLNLEEEYRLHEKPVPSSIDPSWLQLFPTVWAERAGMGLANQVPPVVVELRSGASPVAVRQYPMSKEAREGIRPHIQRFLDLGVLVPCQSPWNTPLLPVKKPGTNDYRPVQDLREINKRVQDIHPTVPNPYNLLSSLPPSHTWYSVLDLKDAFFCLKLHPNSQPLFAFEWRDPEKGNTGQLTWTRLPQGFKNSPTLFNEALHRDLAPFRALNPQVVLLQYVDDLLVAAPTYRDCKEGTQKLLQELSKLGYRVSAKKAQLCQKEVTYLGYLLKEGKRWLTPARKATVMKIPPPTTPRQVREFLGKAGFCRLFIPGFASLAAPLYPLTKPSIPFIWTEEHQKAFDRIKEALLSAPALALPDLTKPFTLYVDERAGVARGVLTQTLGPWRRPVAYLSKKLDPVASGWPTCLKAVAAVALLLKDADKLTLGQNVTVIASHSLESIVRQPPDRWMTNARMTHYQSLLLNERVSFAPPAVLNPATLLPVESEATPVHRCSEILAEETGTRRDLKDQPLPGVPAWYTDGSSFIAEGKRRAGAAIVDGKRTVWASSLPEGTSAQKAELVALTQALRLAEGKDINIYTDSRYAFATAHIHGAIYKQRGWLTSAGKDIKNKEEILALLEAIHLPKRVAIIHCPGHQKGNDPVATGNRRADEAAKQAALSTRVLAETTKPAGKRTADGSEFEKRTADGSEFESPKKKAKVE

SEQ ID NO: 948 - protein, 2094 aa, synthetic construct
MPAAKRVKLDGGDKKYSIGLDIGTNSVGWAVITDEYKVPSKKFKVLGNTDRHSIKKNLIGALLFDSGETAEATRLKRTARRRYTRRKNRICYLQEIFSNEMAKVDDSFFHRLEESFLVEEDKKHERHPIFGNIVDEVAYHEKYPTIYHLRKKLVDSTDKADLRLIYLALAHMIKFRGHFLIEGDLNPDNSDVDKLFIQLVQTYNQLFEENPINASGVDAKAILSARLSKSRRLENLIAQLPGEKKNGLFGNLIALSLGLTPNFKSNFDLAEDAKLQLSKDTYDDDLDNLLAQIGDQYADLFLAAKNLSDAILLSDILRVNTEITKAPLSASMIKRYDEHHQDLTLLKALVRQQLPEKYKEIFFDQSKNGYAGYIDGGASQEEFYKFIKPILEKMDGTEELLVKLNREDLLRKQRTFDNGSIPHQIHLGELHAILRRQEDFYPFLKDNREKIEKILTFRIPYYVGPLARGNSRFAWMTRKSEETITPWNFEEVVDKGASAQSFIERMTNFDKNLPNEKVLPKHSLLYEYFTVYNELTKVKYVTEGMRKPAFLSGEQKKAIVDLLFKTNRKVTVKQLKEDYFKKIECFDSVEISGVEDRFNASLGTYHDLLKIIKDKDFLDNEENEDILEDIVLTLTLFEDREMIEERLKTYAHLFDDKVMKQLKRRRYTGWGRLSRKLINGIRDKQSGKTILDFLKSDGFANRNFMQLIHDDSLTFKEDIQKAQVSGQGDSLHEHIANLAGSPAIKKGILQTVKVVDELVKVMGRHKPENIVIEMARENQTTQKGQKNSRERMKRIEEGIKELGSQILKEHPVENTQLQNEKLYLYYLQNGRDMYVDQELDINRLSDYDVDHIVPQSFLKDDSIDNKVLTRSDKARGKSDNVPSEEVVKKMKNYWRQLLNAKLITQRKFDNLTKAERGGLSELDKAGFIKRQLVETRQITKHVAQILDSRMNTKYDENDKLIREVKVITLKSKLVSDFRKDFQFYKVREINNYHHAHDAYLNAVVGTALIKKYPKLESEFVYGDYKVYDVRKMIAKSEQEIGKATAKYFFYSNIMNFFKTEITLANGEIRKRPLIETNGETGEIVWDKGRDFATVRKVLSMPQVNIVKKTEVQTGGFSKESILPKRNSDKLIARKKDWDPKKYGGFDSPTVAYSVLVVAKVEKGKSKKLKSVKELLGITIMERSSFEKNPIDFLEAKGYKEVKKDLIIKLPKYSLFELENGRKRMLASAGELQKGNELALPSKYVNFLYLASHYEKLKGSPEDNEQKQLFVEQHKHYLDEIIEQISEFSKRVILADANLDKVLSAYNKHRDKPIREQAENIIHLFTLTNLGAPAAFKYFDTTIDRKRYTSTKEVLDATLIHQSITGLYETRIDLSQLGGDGGEAAAKGSSGGSGGVLNLEEEYRLHEKPVPSSIDPSWLQLFPTVWAERAGMGLANQVPPVVVELRSGASPVAVRQYPMSKEAREGIRPHIQRFLDLGVLVPCQSPWNTPLLPVKKPGTNDYRPVQDLREINKRVQDIHPTVPNPYNLLSSLPPSHTWYSVLDLKDAFFCLKLHPNSQPLFAFEWRDPEKGNTGQLTWTRLPQGFKNSPTLFNEALHRDLAPFRALNPQVVLLQYVDDLLVAAPTYRDCKEGTQKLLQELSKLGYRVSAKKAQLCQKEVTYLGYLLKEGKRWLTPARKATVMKIPPPTTPRQVREFLGKAGFCRLFIPGFASLAAPLYPLTKPSIPFIWTEEHQKAFDRIKEALLSAPALALPDLTKPFTLYVDERAGVARGVLTQTLGPWRRPVAYLSKKLDPVASGWPTCLKAVAAVALLLKDADKLTLGQNVTVIASHSLESIVRQPPDRWMTNARMTHYQSLLLNERVSFAPPAVLNPATLLPVESEATPVHRCSEILAEETGTRRDLKDQPLPGVPAWYTDGSSFIAEGKRRAGAAIVDGKRTVWASSLPEGTSAQKAELVALTQALRLAEGKDINIYTDSRYAFATAHIHGAIYKQRGWLTSAGKDIKNKEEILALLEAIHLPKRVAIIHCPGHQKGNDPVATGNRRADEAAKQAALSTRVLAETTKPAGKRTADGSEFEKRTADGSEFESPKKKAKVE

SEQ ID NO: 949 - protein, 2090 aa, synthetic construct
MPAAKRVKLDGGDKKYSIGLDIGTNSVGWAVITDEYKVPSKKFKVLGNTDRHSIKKNLIGALLFDSGETAEATRLKRTARRRYTRRKNRICYLQEIFSNEMAKVDDSFFHRLEESFLVEEDKKHERHPIFGNIVDEVAYHEKYPTIYHLRKKLVDSTDKADLRLIYLALAHMIKFRGHFLIEGDLNPDNSDVDKLFIQLVQTYNQLFEENPINASGVDAKAILSARLSKSRRLENLIAQLPGEKKNGLFGNLIALSLGLTPNFKSNFDLAEDAKLQLSKDTYDDDLDNLLAQIGDQYADLFLAAKNLSDAILLSDILRVNTEITKAPLSASMIKRYDEHHQDLTLLKALVRQQLPEKYKEIFFDQSKNGYAGYIDGGASQEEFYKFIKPILEKMDGTEELLVKLNREDLLRKQRTFDNGSIPHQIHLGELHAILRRQEDFYPFLKDNREKIEKILTFRIPYYVGPLARGNSRFAWMTRKSEETITPWNFEEVVDKGASAQSFIERMTNFDKNLPNEKVLPKHSLLYEYFTVYNELTKVKYVTEGMRKPAFLSGEQKKAIVDLLFKTNRKVTVKQLKEDYFKKIECFDSVEISGVEDRFNASLGTYHDLLKIIKDKDFLDNEENEDILEDIVLTLTLFEDREMIEERLKTYAHLFDDKVMKQLKRRRYTGWGRLSRKLINGIRDKQSGKTILDFLKSDGFANRNFMQLIHDDSLTFKEDIQKAQVSGQGDSLHEHIANLAGSPAIKKGILQTVKVVDELVKVMGRHKPENIVIEMARENQTTQKGQKNSRERMKRIEEGIKELGSQILKEHPVENTQLQNEKLYLYYLQNGRDMYVDQELDINRLSDYDVDHIVPQSFLKDDSIDNKVLTRSDKARGKSDNVPSEEVVKKMKNYWRQLLNAKLITQRKFDNLTKAERGGLSELDKAGFIKRQLVETRQITKHVAQILDSRMNTKYDENDKLIREVKVITLKSKLVSDFRKDFQFYKVREINNYHHAHDAYLNAVVGTALIKKYPKLESEFVYGDYKVYDVRKMIAKSEQEIGKATAKYFFYSNIMNFFKTEITLANGEIRKRPLIETNGETGEIVWDKGRDFATVRKVLSMPQVNIVKKTEVQTGGFSKESILPKRNSDKLIARKKDWDPKKYGGFDSPTVAYSVLVVAKVEKGKSKKLKSVKELLGITIMERSSFEKNPIDFLEAKGYKEVKKDLIIKLPKYSLFELENGRKRMLASAGELQKGNELALPSKYVNFLYLASHYEKLKGSPEDNEQKQLFVEQHKHYLDEIIEQISEFSKRVILADANLDKVLSAYNKHRDKPIREQAENIIHLFTLTNLGAPAAFKYFDTTIDRKRYTSTKEVLDATLIHQSITGLYETRIDLSQLGGDGGPAPAPAPGGVLNLEEEYRLHEKPVPSSIDPSWLQLFPTVWAERAGMGLANQVPPVVVELRSGASPVAVRQYPMSKEAREGIRPHIQRFLDLGVLVPCQSPWNTPLLPVKKPGTNDYRPVQDLREINKRVQDIHPTVPNPYNLLSSLPPSHTWYSVLDLKDAFFCLKLHPNSQPLFAFEWRDPEKGNTGQLTWTRLPQGFKNSPTLFNEALHRDLAPFRALNPQVVLLQYVDDLLVAAPTYRDCKEGTQKLLQELSKLGYRVSAKKAQLCQKEVTYLGYLLKEGKRWLTPARKATVMKIPPPTTPRQVREFLGKAGFCRLFIPGFASLAAPLYPLTKPSIPFIWTEEHQKAFDRIKEALLSAPALALPDLTKPFTLYVDERAGVARGVLTQTLGPWRRPVAYLSKKLDPVASGWPTCLKAVAAVALLLKDADKLTLGQNVTVIASHSLESIVRQPPDRWMTNARMTHYQSLLLNERVSFAPPAVLNPATLLPVESEATPVHRCSEILAEETGTRRDLKDQPLPGVPAWYTDGSSFIAEGKRRAGAAIVDGKRTVWASSLPEGTSAQKAELVALTQALRLAEGKDINIYTDSRYAFATAHIHGAIYKQRGWLTSAGKDIKNKEEILALLEAIHLPKRVAIIHCPGHQKGNDPVATGNRRADEAAKQAALSTRVLAETTKPAGKRTADGSEFEKRTADGSEFESPKKKAKVE

SEQ ID NO: 950 - protein, 2089 aa, synthetic construct
MPAAKRVKLDGGDKKYSIGLDIGTNSVGWAVITDEYKVPSKKFKVLGNTDRHSIKKNLIGALLFDSGETAEATRLKRTARRRYTRRKNRICYLQEIFSNEMAKVDDSFFHRLEESFLVEEDKKHERHPIFGNIVDEVAYHEKYPTIYHLRKKLVDSTDKADLRLIYLALAHMIKFRGHFLIEGDLNPDNSDVDKLFIQLVQTYNQLFEENPINASGVDAKAILSARLSKSRRLENLIAQLPGEKKNGLFGNLIALSLGLTPNFKSNFDLAEDAKLQLSKDTYDDDLDNLLAQIGDQYADLFLAAKNLSDAILLSDILRVNTEITKAPLSASMIKRYDEHHQDLTLLKALVRQQLPEKYKEIFFDQSKNGYAGYIDGGASQEEFYKFIKPILEKMDGTEELLVKLNREDLLRKQRTFDNGSIPHQIHLGELHAILRRQEDFYPFLKDNREKIEKILTFRIPYYVGPLARGNSRFAWMTRKSEETITPWNFEEVVDKGASAQSFIERMTNFDKNLPNEKVLPKHSLLYEYFTVYNELTKVKYVTEGMRKPAFLSGEQKKAIVDLLFKTNRKVTVKQLKEDYFKKIECFDSVEISGVEDRFNASLGTYHDLLKIIKDKDFLDNEENEDILEDIVLTLTLFEDREMIEERLKTYAHLFDDKVMKQLKRRRYTGWGRLSRKLINGIRDKQSGKTILDFLKSDGFANRNFMQLIHDDSLTFKEDIQKAQVSGQGDSLHEHIANLAGSPAIKKGILQTVKVVDELVKVMGRHKPENIVIEMARENQTTQKGQKNSRERMKRIEEGIKELGSQILKEHPVENTQLQNEKLYLYYLQNGRDMYVDQELDINRLSDYDVDHIVPQSFLKDDSIDNKVLTRSDKARGKSDNVPSEEVVKKMKNYWRQLLNAKLITQRKFDNLTKAERGGLSELDKAGFIKRQLVETRQITKHVAQILDSRMNTKYDENDKLIREVKVITLKSKLVSDFRKDFQFYKVREINNYHHAHDAYLNAVVGTALIKKYPKLESEFVYGDYKVYDVRKMIAKSEQEIGKATAKYFFYSNIMNFFKTEITLANGEIRKRPLIETNGETGEIVWDKGRDFATVRKVLSMPQVNIVKKTEVQTGGFSKESILPKRNSDKLIARKKDWDPKKYGGFDSPTVAYSVLVVAKVEKGKSKKLKSVKELLGITIMERSSFEKNPIDFLEAKGYKEVKKDLIIKLPKYSLFELENGRKRMLASAGELQKGNELALPSKYVNFLYLASHYEKLKGSPEDNEQKQLFVEQHKHYLDEIIEQISEFSKRVILADANLDKVLSAYNKHRDKPIREQAENIIHLFTLTNLGAPAAFKYFDTTIDRKRYTSTKEVLDATLIHQSITGLYETRIDLSQLGGDGGGSSGGSGGVLNLEEEYRLHEKPVPSSIDPSWLQLFPTVWAERAGMGLANQVPPVVVELRSGASPVAVRQYPMSKEAREGIRPHIQRFLDLGVLVPCQSPWNTPLLPVKKPGTNDYRPVQDLREINKRVQDIHPTVPNPYNLLSSLPPSHTWYSVLDLKDAFFCLKLHPNSQPLFAFEWRDPEKGNTGQLTWTRLPQGFKNSPTLFNEALHRDLAPFRALNPQVVLLQYVDDLLVAAPTYRDCKEGTQKLLQELSKLGYRVSAKKAQLCQKEVTYLGYLLKEGKRWLTPARKATVMKIPPPTTPRQVREFLGKAGFCRLFIPGFASLAAPLYPLTKPSIPFIWTEEHQKAFDRIKEALLSAPALALPDLTKPFTLYVDERAGVARGVLTQTLGPWRRPVAYLSKKLDPVASGWPTCLKAVAAVALLLKDADKLTLGQNVTVIASHSLESIVRQPPDRWMTNARMTHYQSLLLNERVSFAPPAVLNPATLLPVESEATPVHRCSEILAEETGTRRDLKDQPLPGVPAWYTDGSSFIAEGKRRAGAAIVDGKRTVWASSLPEGTSAQKAELVALTQALRLAEGKDINIYTDSRYAFATAHIHGAIYKQRGWLTSAGKDIKNKEEILALLEAIHLPKRVAIIHCPGHQKGNDPVATGNRRADEAAKQAALSTRVLAETTKPAGKRTADGSEFEKRTADGSEFESPKKKAKVE

SEQ ID NO: 951 - protein, 2131 aa, synthetic construct
MPAAKRVKLDGGDKKYSIGLDIGTNSVGWAVITDEYKVPSKKFKVLGNTDRHSIKKNLIGALLFDSGETAEATRLKRTARRRYTRRKNRICYLQEIFSNEMAKVDDSFFHRLEESFLVEEDKKHERHPIFGNIVDEVAYHEKYPTIYHLRKKLVDSTDKADLRLIYLALAHMIKFRGHFLIEGDLNPDNSDVDKLFIQLVQTYNQLFEENPINASGVDAKAILSARLSKSRRLENLIAQLPGEKKNGLFGNLIALSLGLTPNFKSNFDLAEDAKLQLSKDTYDDDLDNLLAQIGDQYADLFLAAKNLSDAILLSDILRVNTEITKAPLSASMIKRYDEHHQDLTLLKALVRQQLPEKYKEIFFDQSKNGYAGYIDGGASQEEFYKFIKPILEKMDGTEELLVKLNREDLLRKQRTFDNGSIPHQIHLGELHAILRRQEDFYPFLKDNREKIEKILTFRIPYYVGPLARGNSRFAWMTRKSEETITPWNFEEVVDKGASAQSFIERMTNFDKNLPNEKVLPKHSLLYEYFTVYNELTKVKYVTEGMRKPAFLSGEQKKAIVDLLFKTNRKVTVKQLKEDYFKKIECFDSVEISGVEDRFNASLGTYHDLLKIIKDKDFLDNEENEDILEDIVLTLTLFEDREMIEERLKTYAHLFDDKVMKQLKRRRYTGWGRLSRKLINGIRDKQSGKTILDFLKSDGFANRNFMQLIHDDSLTFKEDIQKAQVSGQGDSLHEHIANLAGSPAIKKGILQTVKVVDELVKVMGRHKPENIVIEMARENQTTQKGQKNSRERMKRIEEGIKELGSQILKEHPVENTQLQNEKLYLYYLQNGRDMYVDQELDINRLSDYDVDHIVPQSFLKDDSIDNKVLTRSDKARGKSDNVPSEEVVKKMKNYWRQLLNAKLITQRKFDNLTKAERGGLSELDKAGFIKRQLVETRQITKHVAQILDSRMNTKYDENDKLIREVKVITLKSKLVSDFRKDFQFYKVREINNYHHAHDAYLNAVVGTALIKKYPKLESEFVYGDYKVYDVRKMIAKSEQEIGKATAKYFFYSNIMNFFKTEITLANGEIRKRPLIETNGETGEIVWDKGRDFATVRKVLSMPQVNIVKKTEVQTGGFSKESILPKRNSDKLIARKKDWDPKKYGGFDSPTVAYSVLVVAKVEKGKSKKLKSVKELLGITIMERSSFEKNPIDFLEAKGYKEVKKDLIIKLPKYSLFELENGRKRMLASAGELQKGNELALPSKYVNFLYLASHYEKLKGSPEDNEQKQLFVEQHKHYLDEIIEQISEFSKRVILADANLDKVLSAYNKHRDKPIREQAENIIHLFTLTNLGAPAAFKYFDTTIDRKRYTSTKEVLDATLIHQSITGLYETRIDLSQLGGDGGAEAAAKEAAAKEAAAKEAAAKALEAEAAAKEAAAKEAAAKEAAAKAGGTLNIEDEYRLHETSKEPDVPLGSTWLSDFPQAWAETGGMGLAVRQAPLIIPLKATSTPVSIKQYPMSQEARLGIKPHIQRLLDQGILVPCQSPWNTPLLPVKKPGTNDYRPVQDLREVNKRVEDIHPTVPNPYNLLSGLPPSHQWYTVLDLKDAFFCLRLHPTSQPLFAFEWRDPEMGISGQLTWTRLPQGFKNSPTLFDEALHRDLADFRIQHPDLILLQYVDDLLLAATSEQDCQRGTRALLQTLGNLGYRASAKKAQICQKQVKYLGYLLKEGQRWLTEARKETVMGQPTPKTPRQLREFLGTAGFCRLWIPGFAEMAAPLYPLTKTGTLFNWGPDQQKAYQEIKQALLTAPALGLPDLTKPFELFVDEKQGYAKGVLTQKLGPWRRPVAYLSKKLDPVAAGWPPCLRMVAAIAVLTKDAGKLTMGQPLVILAPHAVEALVKQPPDRWLSNARMTHYQAMLLDTDRVQFGPVVALNPATLLPLPEKEAPHDCLEILAETHGTRPDLTDQPIPDADYTWYTDGSSFLQEGQRRAGAAVTTETEVIWARALPAGTSAQRAELIALTQALKMAEGKKLNVYTDSRYAFATAHVHGEIYRRRGLLTSEGREIKNKNEILALLKALFLPKRLSIIHCPGHQKGNSAEARGNRMADQAAREAAMKAVLETSTLLAGKRTADGSEFEKRTADGSEFESPKKKAKVE

SEQ ID NO: 952 - protein, 2118 aa, synthetic construct
MPAAKRVKLDGGDKKYSIGLDIGTNSVGWAVITDEYKVPSKKFKVLGNTDRHSIKKNLIGALLFDSGETAEATRLKRTARRRYTRRKNRICYLQEIFSNEMAKVDDSFFHRLEESFLVEEDKKHERHPIFGNIVDEVAYHEKYPTIYHLRKKLVDSTDKADLRLIYLALAHMIKFRGHFLIEGDLNPDNSDVDKLFIQLVQTYNQLFEENPINASGVDAKAILSARLSKSRRLENLIAQLPGEKKNGLFGNLIALSLGLTPNFKSNFDLAEDAKLQLSKDTYDDDLDNLLAQIGDQYADLFLAAKNLSDAILLSDILRVNTEITKAPLSASMIKRYDEHHQDLTLLKALVRQQLPEKYKEIFFDQSKNGYAGYIDGGASQEEFYKFIKPILEKMDGTEELLVKLNREDLLRKQRTFDNGSIPHQIHLGELHAILRRQEDFYPFLKDNREKIEKILTFRIPYYVGPLARGNSRFAWMTRKSEETITPWNFEEVVDKGASAQSFIERMTNFDKNLPNEKVLPKHSLLYEYFTVYNELTKVKYVTEGMRKPAFLSGEQKKAIVDLLFKTNRKVTVKQLKEDYFKKIECFDSVEISGVEDRFNASLGTYHDLLKIIKDKDFLDNEENEDILEDIVLTLTLFEDREMIEERLKTYAHLFDDKVMKQLKRRRYTGWGRLSRKLINGIRDKQSGKTILDFLKSDGFANRNFMQLIHDDSLTFKEDIQKAQVSGQGDSLHEHIANLAGSPAIKKGILQTVKVVDELVKVMGRHKPENIVIEMARENQTTQKGQKNSRERMKRIEEGIKELGSQILKEHPVENTQLQNEKLYLYYLQNGRDMYVDQELDINRLSDYDVDHIVPQSFLKDDSIDNKVLTRSDKARGKSDNVPSEEVVKKMKNYWRQLLNAKLITQRKFDNLTKAERGGLSELDKAGFIKRQLVETRQITKHVAQILDSRMNTKYDENDKLIREVKVITLKSKLVSDFRKDFQFYKVREINNYHHAHDAYLNAVVGTALIKKYPKLESEFVYGDYKVYDVRKMIAKSEQEIGKATAKYFFYSNIMNFFKTEITLANGEIRKRPLIETNGETGEIVWDKGRDFATVRKVLSMPQVNIVKKTEVQTGGFSKESILPKRNSDKLIARKKDWDPKKYGGFDSPTVAYSVLVVAKVEKGKSKKLKSVKELLGITIMERSSFEKNPIDFLEAKGYKEVKKDLIIKLPKYSLFELENGRKRMLASAGELQKGNELALPSKYVNFLYLASHYEKLKGSPEDNEQKQLFVEQHKHYLDEIIEQISEFSKRVILADANLDKVLSAYNKHRDKPIREQAENIIHLFTLTNLGAPAAFKYFDTTIDRKRYTSTKEVLDATLIHQSITGLYETRIDLSQLGGDGGSGGSSGGSSGSETPGTSESATPESSGGSSGGSSGGTLNIEDEYRLHETSKEPDVPLGSTWLSDFPQAWAETGGMGLAVRQAPLIIPLKATSTPVSIKQYPMSQEARLGIKPHIQRLLDQGILVPCQSPWNTPLLPVKKPGTNDYRPVQDLREVNKRVEDIHPTVPNPYNLLSGLPPSHQWYTVLDLKDAFFCLRLHPTSQPLFAFEWRDPEMGISGQLTWTRLPQGFKNSPTLFDEALHRDLADFRIQHPDLILLQYVDDLLLAATSEQDCQRGTRALLQTLGNLGYRASAKKAQICQKQVKYLGYLLKEGQRWLTEARKETVMGQPTPKTPRQLREFLGTAGFCRLWIPGFAEMAAPLYPLTKTGTLFNWGPDQQKAYQEIKQALLTAPALGLPDLTKPFELFVDEKQGYAKGVLTQKLGPWRRPVAYLSKKLDPVAAGWPPCLRMVAAIAVLTKDAGKLTMGQPLVILAPHAVEALVKQPPDRWLSNARMTHYQAMLLDTDRVQFGPVVALNPATLLPLPEKEAPHDCLEILAETHGTRPDLTDQPIPDADYTWYTDGSSFLQEGQRRAGAAVTTETEVIWARALPAGTSAQRAELIALTQALKMAEGKKLNVYTDSRYAFATAHVHGEIYRRRGLLTSEGREIKNKNEILALLKALFLPKRLSIIHCPGHQKGNSAEARGNRMADQAAREAAMKAVLETSTLLAGKRTADGSEFEKRTADGSEFESPKKKAKVE

SEQ ID NO: 953 - protein, 2105 aa, synthetic construct
MPAAKRVKLDGGDKKYSIGLDIGTNSVGWAVITDEYKVPSKKFKVLGNTDRHSIKKNLIGALLFDSGETAEATRLKRTARRRYTRRKNRICYLQEIFSNEMAKVDDSFFHRLEESFLVEEDKKHERHPIFGNIVDEVAYHEKYPTIYHLRKKLVDSTDKADLRLIYLALAHMIKFRGHFLIEGDLNPDNSDVDKLFIQLVQTYNQLFEENPINASGVDAKAILSARLSKSRRLENLIAQLPGEKKNGLFGNLIALSLGLTPNFKSNFDLAEDAKLQLSKDTYDDDLDNLLAQIGDQYADLFLAAKNLSDAILLSDILRVNTEITKAPLSASMIKRYDEHHQDLTLLKALVRQQLPEKYKEIFFDQSKNGYAGYIDGGASQEEFYKFIKPILEKMDGTEELLVKLNREDLLRKQRTFDNGSIPHQIHLGELHAILRRQEDFYPFLKDNREKIEKILTFRIPYYVGPLARGNSRFAWMTRKSEETITPWNFEEVVDKGASAQSFIERMTNFDKNLPNEKVLPKHSLLYEYFTVYNELTKVKYVTEGMRKPAFLSGEQKKAIVDLLFKTNRKVTVKQLKEDYFKKIECFDSVEISGVEDRFNASLGTYHDLLKIIKDKDFLDNEENEDILEDIVLTLTLFEDREMIEERLKTYAHLFDDKVMKQLKRRRYTGWGRLSRKLINGIRDKQSGKTILDFLKSDGFANRNFMQLIHDDSLTFKEDIQKAQVSGQGDSLHEHIANLAGSPAIKKGILQTVKVVDELVKVMGRHKPENIVIEMARENQTTQKGQKNSRERMKRIEEGIKELGSQILKEHPVENTQLQNEKLYLYYLQNGRDMYVDQELDINRLSDYDVDHIVPQSFLKDDSIDNKVLTRSDKARGKSDNVPSEEVVKKMKNYWRQLLNAKLITQRKFDNLTKAERGGLSELDKAGFIKRQLVETRQITKHVAQILDSRMNTKYDENDKLIREVKVITLKSKLVSDFRKDFQFYKVREINNYHHAHDAYLNAVVGTALIKKYPKLESEFVYGDYKVYDVRKMIAKSEQEIGKATAKYFFYSNIMNFFKTEITLANGEIRKRPLIETNGETGEIVWDKGRDFATVRKVLSMPQVNIVKKTEVQTGGFSKESILPKRNSDKLIARKKDWDPKKYGGFDSPTVAYSVLVVAKVEKGKSKKLKSVKELLGITIMERSSFEKNPIDFLEAKGYKEVKKDLIIKLPKYSLFELENGRKRMLASAGELQKGNELALPSKYVNFLYLASHYEKLKGSPEDNEQKQLFVEQHKHYLDEIIEQISEFSKRVILADANLDKVLSAYNKHRDKPIREQAENIIHLFTLTNLGAPAAFKYFDTTIDRKRYTSTKEVLDATLIHQSITGLYETRIDLSQLGGDGGGGGGSGGGGSGGGGSGGGGSGGTLNIEDEYRLHETSKEPDVPLGSTWLSDFPQAWAETGGMGLAVRQAPLIIPLKATSTPVSIKQYPMSQEARLGIKPHIQRLLDQGILVPCQSPWNTPLLPVKKPGTNDYRPVQDLREVNKRVEDIHPTVPNPYNLLSGLPPSHQWYTVLDLKDAFFCLRLHPTSQPLFAFEWRDPEMGISGQLTWTRLPQGFKNSPTLFDEALHRDLADFRIQHPDLILLQYVDDLLLAATSEQDCQRGTRALLQTLGNLGYRASAKKAQICQKQVKYLGYLLKEGQRWLTEARKETVMGQPTPKTPRQLREFLGTAGFCRLWIPGFAEMAAPLYPLTKTGTLFNWGPDQQKAYQEIKQALLTAPALGLPDLTKPFELFVDEKQGYAKGVLTQKLGPWRRPVAYLSKKLDPVAAGWPPCLRMVAAIAVLTKDAGKLTMGQPLVILAPHAVEALVKQPPDRWLSNARMTHYQAMLLDTDRVQFGPVVALNPATLLPLPEKEAPHDCLEILAETHGTRPDLTDQPIPDADYTWYTDGSSFLQEGQRRAGAAVTTETEVIWARALPAGTSAQRAELIALTQALKMAEGKKLNVYTDSRYAFATAHVHGEIYRRRGLLTSEGREIKNKNEILALLKALFLPKRLSIIHCPGHQKGNSAEARGNRMADQAAREAAMKAVLETSTLLAGKRTADGSEFEKRTADGSEFESPKKKAKVE

SEQ ID NO: 954 - protein, 2093 aa, synthetic construct
MPAAKRVKLDGGDKKYSIGLDIGTNSVGWAVITDEYKVPSKKFKVLGNTDRHSIKKNLIGALLFDSGETAEATRLKRTARRRYTRRKNRICYLQEIFSNEMAKVDDSFFHRLEESFLVEEDKKHERHPIFGNIVDEVAYHEKYPTIYHLRKKLVDSTDKADLRLIYLALAHMIKFRGHFLIEGDLNPDNSDVDKLFIQLVQTYNQLFEENPINASGVDAKAILSARLSKSRRLENLIAQLPGEKKNGLFGNLIALSLGLTPNFKSNFDLAEDAKLQLSKDTYDDDLDNLLAQIGDQYADLFLAAKNLSDAILLSDILRVNTEITKAPLSASMIKRYDEHHQDLTLLKALVRQQLPEKYKEIFFDQSKNGYAGYIDGGASQEEFYKFIKPILEKMDGTEELLVKLNREDLLRKQRTFDNGSIPHQIHLGELHAILRRQEDFYPFLKDNREKIEKILTFRIPYYVGPLARGNSRFAWMTRKSEETITPWNFEEVVDKGASAQSFIERMTNFDKNLPNEKVLPKHSLLYEYFTVYNELTKVKYVTEGMRKPAFLSGEQKKAIVDLLFKTNRKVTVKQLKEDYFKKIECFDSVEISGVEDRFNASLGTYHDLLKIIKDKDFLDNEENEDILEDIVLTLTLFEDREMIEERLKTYAHLFDDKVMKQLKRRRYTGWGRLSRKLINGIRDKQSGKTILDFLKSDGFANRNFMQLIHDDSLTFKEDIQKAQVSGQGDSLHEHIANLAGSPAIKKGILQTVKVVDELVKVMGRHKPENIVIEMARENQTTQKGQKNSRERMKRIEEGIKELGSQILKEHPVENTQLQNEKLYLYYLQNGRDMYVDQELDINRLSDYDVDHIVPQSFLKDDSIDNKVLTRSDKARGKSDNVPSEEVVKKMKNYWRQLLNAKLITQRKFDNLTKAERGGLSELDKAGFIKRQLVETRQITKHVAQILDSRMNTKYDENDKLIREVKVITLKSKLVSDFRKDFQFYKVREINNYHHAHDAYLNAVVGTALIKKYPKLESEFVYGDYKVYDVRKMIAKSEQEIGKATAKYFFYSNIMNFFKTEITLANGEIRKRPLIETNGETGEIVWDKGRDFATVRKVLSMPQVNIVKKTEVQTGGFSKESILPKRNSDKLIARKKDWDPKKYGGFDSPTVAYSVLVVAKVEKGKSKKLKSVKELLGITIMERSSFEKNPIDFLEAKGYKEVKKDLIIKLPKYSLFELENGRKRMLASAGELQKGNELALPSKYVNFLYLASHYEKLKGSPEDNEQKQLFVEQHKHYLDEIIEQISEFSKRVILADANLDKVLSAYNKHRDKPIREQAENIIHLFTLTNLGAPAAFKYFDTTIDRKRYTSTKEVLDATLIHQSITGLYETRIDLSQLGGDGGGSSEAAAKGGTLNIEDEYRLHETSKEPDVPLGSTWLSDFPQAWAETGGMGLAVRQAPLIIPLKATSTPVSIKQYPMSQEARLGIKPHIQRLLDQGILVPCQSPWNTPLLPVKKPGTNDYRPVQDLREVNKRVEDIHPTVPNPYNLLSGLPPSHQWYTVLDLKDAFFCLRLHPTSQPLFAFEWRDPEMGISGQLTWTRLPQGFKNSPTLFDEALHRDLADFRIQHPDLILLQYVDDLLLAATSEQDCQRGTRALLQTLGNLGYRASAKKAQICQKQVKYLGYLLKEGQRWLTEARKETVMGQPTPKTPRQLREFLGTAGFCRLWIPGFAEMAAPLYPLTKTGTLFNWGPDQQKAYQEIKQALLTAPALGLPDLTKPFELFVDEKQGYAKGVLTQKLGPWRRPVAYLSKKLDPVAAGWPPCLRMVAAIAVLTKDAGKLTMGQPLVILAPHAVEALVKQPPDRWLSNARMTHYQAMLLDTDRVQFGPVVALNPATLLPLPEKEAPHDCLEILAETHGTRPDLTDQPIPDADYTWYTDGSSFLQEGQRRAGAAVTTETEVIWARALPAGTSAQRAELIALTQALKMAEGKKLNVYTDSRYAFATAHVHGEIYRRRGLLTSEGREIKNKNEILALLKALFLPKRLSIIHCPGHQKGNSAEARGNRMADQAAREAAMKAVLETSTLLAGKRTADGSEFEKRTADGSEFESPKKKAKVE

SEQ ID NO: 955 - protein, 2096 aa, synthetic construct
MPAAKRVKLDGGDKKYSIGLDIGTNSVGWAVITDEYKVPSKKFKVLGNTDRHSIKKNLIGALLFDSGETAEATRLKRTARRRYTRRKNRICYLQEIFSNEMAKVDDSFFHRLEESFLVEEDKKHERHPIFGNIVDEVAYHEKYPTIYHLRKKLVDSTDKADLRLIYLALAHMIKFRGHFLIEGDLNPDNSDVDKLFIQLVQTYNQLFEENPINASGVDAKAILSARLSKSRRLENLIAQLPGEKKNGLFGNLIALSLGLTPNFKSNFDLAEDAKLQLSKDTYDDDLDNLLAQIGDQYADLFLAAKNLSDAILLSDILRVNTEITKAPLSASMIKRYDEHHQDLTLLKALVRQQLPEKYKEIFFDQSKNGYAGYIDGGASQEEFYKFIKPILEKMDGTEELLVKLNREDLLRKQRTFDNGSIPHQIHLGELHAILRRQEDFYPFLKDNREKIEKILTFRIPYYVGPLARGNSRFAWMTRKSEETITPWNFEEVVDKGASAQSFIERMTNFDKNLPNEKVLPKHSLLYEYFTVYNELTKVKYVTEGMRKPAFLSGEQKKAIVDLLFKTNRKVTVKQLKEDYFKKIECFDSVEISGVEDRFNASLGTYHDLLKIIKDKDFLDNEENEDILEDIVLTLTLFEDREMIEERLKTYAHLFDDKVMKQLKRRRYTGWGRLSRKLINGIRDKQSGKTILDFLKSDGFANRNFMQLIHDDSLTFKEDIQKAQVSGQGDSLHEHIANLAGSPAIKKGILQTVKVVDELVKVMGRHKPENIVIEMARENQTTQKGQKNSRERMKRIEEGIKELGSQILKEHPVENTQLQNEKLYLYYLQNGRDMYVDQELDINRLSDYDVDHIVPQSFLKDDSIDNKVLTRSDKARGKSDNVPSEEVVKKMKNYWRQLLNAKLITQRKFDNLTKAERGGLSELDKAGFIKRQLVETRQITKHVAQILDSRMNTKYDENDKLIREVKVITLKSKLVSDFRKDFQFYKVREINNYHHAHDAYLNAVVGTALIKKYPKLESEFVYGDYKVYDVRKMIAKSEQEIGKATAKYFFYSNIMNFFKTEITLANGEIRKRPLIETNGETGEIVWDKGRDFATVRKVLSMPQVNIVKKTEVQTGGFSKESILPKRNSDKLIARKKDWDPKKYGGFDSPTVAYSVLVVAKVEKGKSKKLKSVKELLGITIMERSSFEKNPIDFLEAKGYKEVKKDLIIKLPKYSLFELENGRKRMLASAGELQKGNELALPSKYVNFLYLASHYEKLKGSPEDNEQKQLFVEQHKHYLDEIIEQISEFSKRVILADANLDKVLSAYNKHRDKPIREQAENIIHLFTLTNLGAPAAFKYFDTTIDRKRYTSTKEVLDATLIHQSITGLYETRIDLSQLGGDGGEAAAKGGGGSSGGTLNIEDEYRLHETSKEPDVPLGSTWLSDFPQAWAETGGMGLAVRQAPLIIPLKATSTPVSIKQYPMSQEARLGIKPHIQRLLDQGILVPCQSPWNTPLLPVKKPGTNDYRPVQDLREVNKRVEDIHPTVPNPYNLLSGLPPSHQWYTVLDLKDAFFCLRLHPTSQPLFAFEWRDPEMGISGQLTWTRLPQGFKNSPTLFDEALHRDLADFRIQHPDLILLQYVDDLLLAATSEQDCQRGTRALLQTLGNLGYRASAKKAQICQKQVKYLGYLLKEGQRWLTEARKETVMGQPTPKTPRQLREFLGTAGFCRLWIPGFAEMAAPLYPLTKTGTLFNWGPDQQKAYQEIKQALLTAPALGLPDLTKPFELFVDEKQGYAKGVLTQKLGPWRRPVAYLSKKLDPVAAGWPPCLRMVAAIAVLTKDAGKLTMGQPLVILAPHAVEALVKQPPDRWLSNARMTHYQAMLLDTDRVQFGPVVALNPATLLPLPEKEAPHDCLEILAETHGTRPDLTDQPIPDADYTWYTDGSSFLQEGQRRAGAAVTTETEVIWARALPAGTSAQRAELIALTQALKMAEGKKLNVYTDSRYAFATAHVHGEIYRRRGLLTSEGREIKNKNEILALLKALFLPKRLSIIHCPGHQKGNSAEARGNRMADQAAREAAMKAVLETSTLLAGKRTADGSEFEKRTADGSEFESPKKKAKVE

SEQ ID NO: 956 - protein, 2092 aa, synthetic construct
MPAAKRVKLDGGDKKYSIGLDIGTNSVGWAVITDEYKVPSKKFKVLGNTDRHSIKKNLIGALLFDSGETAEATRLKRTARRRYTRRKNRICYLQEIFSNEMAKVDDSFFHRLEESFLVEEDKKHERHPIFGNIVDEVAYHEKYPTIYHLRKKLVDSTDKADLRLIYLALAHMIKFRGHFLIEGDLNPDNSDVDKLFIQLVQTYNQLFEENPINASGVDAKAILSARLSKSRRLENLIAQLPGEKKNGLFGNLIALSLGLTPNFKSNFDLAEDAKLQLSKDTYDDDLDNLLAQIGDQYADLFLAAKNLSDAILLSDILRVNTEITKAPLSASMIKRYDEHHQDLTLLKALVRQQLPEKYKEIFFDQSKNGYAGYIDGGASQEEFYKFIKPILEKMDGTEELLVKLNREDLLRKQRTFDNGSIPHQIHLGELHAILRRQEDFYPFLKDNREKIEKILTFRIPYYVGPLARGNSRFAWMTRKSEETITPWNFEEVVDKGASAQSFIERMTNFDKNLPNEKVLPKHSLLYEYFTVYNELTKVKYVTEGMRKPAFLSGEQKKAIVDLLFKTNRKVTVKQLKEDYFKKIECFDSVEISGVEDRFNASLGTYHDLLKIIKDKDFLDNEENEDILEDIVLTLTLFEDREMIEERLKTYAHLFDDKVMKQLKRRRYTGWGRLSRKLINGIRDKQSGKTILDFLKSDGFANRNFMQLIHDDSLTFKEDIQKAQVSGQGDSLHEHIANLAGSPAIKKGILQTVKVVDELVKVMGRHKPENIVIEMARENQTTQKGQKNSRERMKRIEEGIKELGSQILKEHPVENTQLQNEKLYLYYLQNGRDMYVDQELDINRLSDYDVDHIVPQSFLKDDSIDNKVLTRSDKARGKSDNVPSEEVVKKMKNYWRQLLNAKLITQRKFDNLTKAERGGLSELDKAGFIKRQLVETRQITKHVAQILDSRMNTKYDENDKLIREVKVITLKSKLVSDFRKDFQFYKVREINNYHHAHDAYLNAVVGTALIKKYPKLESEFVYGDYKVYDVRKMIAKSEQEIGKATAKYFFYSNIMNFFKTEITLANGEIRKRPLIETNGETGEIVWDKGRDFATVRKVLSMPQVNIVKKTEVQTGGFSKESILPKRNSDKLIARKKDWDPKKYGGFDSPTVAYSVLVVAKVEKGKSKKLKSVKELLGITIMERSSFEKNPIDFLEAKGYKEVKKDLIIKLPKYSLFELENGRKRMLASAGELQKGNELALPSKYVNFLYLASHYEKLKGSPEDNEQKQLFVEQHKHYLDEIIEQISEFSKRVILADANLDKVLSAYNKHRDKPIREQAENIIHLFTLTNLGAPAAFKYFDTTIDRKRYTSTKEVLDATLIHQSITGLYETRIDLSQLGGDGGGGGGGGGGGTLNIEDEYRLHETSKEPDVPLGSTWLSDFPQAWAETGGMGLAVRQAPLIIPLKATSTPVSIKQYPMSQEARLGIKPHIQRLLDQGILVPCQSPWNTPLLPVKKPGTNDYRPVQDLREVNKRVEDIHPTVPNPYNLLSGLPPSHQWYTVLDLKDAFFCLRLHPTSQPLFAFEWRDPEMGISGQLTWTRLPQGFKNSPTLFDEALHRDLADFRIQHPDLILLQYVDDLLLAATSEQDCQRGTRALLQTLGNLGYRASAKKAQICQKQVKYLGYLLKEGQRWLTEARKETVMGQPTPKTPRQLREFLGTAGFCRLWIPGFAEMAAPLYPLTKTGTLFNWGPDQQKAYQEIKQALLTAPALGLPDLTKPFELFVDEKQGYAKGVLTQKLGPWRRPVAYLSKKLDPVAAGWPPCLRMVAAIAVLTKDAGKLTMGQPLVILAPHAVEALVKQPPDRWLSNARMTHYQAMLLDTDRVQFGPVVALNPATLLPLPEKEAPHDCLEILAETHGTRPDLTDQPIPDADYTWYTDGSSFLQEGQRRAGAAVTTETEVIWARALPAGTSAQRAELIALTQALKMAEGKKLNVYTDSRYAFATAHVHGEIYRRRGLLTSEGREIKNKNEILALLKALFLPKRLSIIHCPGHQKGNSAEARGNRMADQAAREAAMKAVLETSTLLAGKRTADGSEFEKRTADGSEFESPKKKAKVE

SEQ ID NO: 957 - protein, 2094 aa, synthetic construct
MPAAKRVKLDGGDKKYSIGLDIGTNSVGWAVITDEYKVPSKKFKVLGNTDRHSIKKNLIGALLFDSGETAEATRLKRTARRRYTRRKNRICYLQEIFSNEMAKVDDSFFHRLEESFLVEEDKKHERHPIFGNIVDEVAYHEKYPTIYHLRKKLVDSTDKADLRLIYLALAHMIKFRGHFLIEGDLNPDNSDVDKLFIQLVQTYNQLFEENPINASGVDAKAILSARLSKSRRLENLIAQLPGEKKNGLFGNLIALSLGLTPNFKSNFDLAEDAKLQLSKDTYDDDLDNLLAQIGDQYADLFLAAKNLSDAILLSDILRVNTEITKAPLSASMIKRYDEHHQDLTLLKALVRQQLPEKYKEIFFDQSKNGYAGYIDGGASQEEFYKFIKPILEKMDGTEELLVKLNREDLLRKQRTFDNGSIPHQIHLGELHAILRRQEDFYPFLKDNREKIEKILTFRIPYYVGPLARGNSRFAWMTRKSEETITPWNFEEVVDKGASAQSFIERMTNFDKNLPNEKVLPKHSLLYEYFTVYNELTKVKYVTEGMRKPAFLSGEQKKAIVDLLFKTNRKVTVKQLKEDYFKKIECFDSVEISGVEDRFNASLGTYHDLLKIIKDKDFLDNEENEDILEDIVLTLTLFEDREMIEERLKTYAHLFDDKVMKQLKRRRYTGWGRLSRKLINGIRDKQSGKTILDFLKSDGFANRNFMQLIHDDSLTFKEDIQKAQVSGQGDSLHEHIANLAGSPAIKKGILQTVKVVDELVKVMGRHKPENIVIEMARENQTTQKGQKNSRERMKRIEEGIKELGSQILKEHPVENTQLQNEKLYLYYLQNGRDMYVDQELDINRLSDYDVDHIVPQSFLKDDSIDNKVLTRSDKARGKSDNVPSEEVVKKMKNYWRQLLNAKLITQRKFDNLTKAERGGLSELDKAGFIKRQLVETRQITKHVAQILDSRMNTKYDENDKLIREVKVITLKSKLVSDFRKDFQFYKVREINNYHHAHDAYLNAVVGTALIKKYPKLESEFVYGDYKVYDVRKMIAKSEQEIGKATAKYFFYSNIMNFFKTEITLANGEIRKRPLIETNGETGEIVWDKGRDFATVRKVLSMPQVNIVKKTEVQTGGFSKESILPKRNSDKLIARKKDWDPKKYGGFDSPTVAYSVLVVAKVEKGKSKKLKSVKELLGITIMERSSFEKNPIDFLEAKGYKEVKKDLIIKLPKYSLFELENGRKRMLASAGELQKGNELALPSKYVNFLYLASHYEKLKGSPEDNEQKQLFVEQHKHYLDEIIEQISEFSKRVILADANLDKVLSAYNKHRDKPIREQAENIIHLFTLTNLGAPAAFKYFDTTIDRKRYTSTKEVLDATLIHQSITGLYETRIDLSQLGGDGGGSSGGSGGGGGTLNIEDEYRLHETSKEPDVPLGSTWLSDFPQAWAETGGMGLAVRQAPLIIPLKATSTPVSIKQYPMSQEARLGIKPHIQRLLDQGILVPCQSPWNTPLLPVKKPGTNDYRPVQDLREVNKRVEDIHPTVPNPYNLLSGLPPSHQWYTVLDLKDAFFCLRLHPTSQPLFAFEWRDPEMGISGQLTWTRLPQGFKNSPTLFDEALHRDLADFRIQHPDLILLQYVDDLLLAATSEQDCQRGTRALLQTLGNLGYRASAKKAQICQKQVKYLGYLLKEGQRWLTEARKETVMGQPTPKTPRQLREFLGTAGFCRLWIPGFAEMAAPLYPLTKTGTLFNWGPDQQKAYQEIKQALLTAPALGLPDLTKPFELFVDEKQGYAKGVLTQKLGPWRRPVAYLSKKLDPVAAGWPPCLRMVAAIAVLTKDAGKLTMGQPLVILAPHAVEALVKQPPDRWLSNARMTHYQAMLLDTDRVQFGPVVALNPATLLPLPEKEAPHDCLEILAETHGTRPDLTDQPIPDADYTWYTDGSSFLQEGQRRAGAAVTTETEVIWARALPAGTSAQRAELIALTQALKMAEGKKLNVYTDSRYAFATAHVHGEIYRRRGLLTSEGREIKNKNEILALLKALFLPKRLSIIHCPGHQKGNSAEARGNRMADQAAREAAMKAVLETSTLLAGKRTADGSEFEKRTADGSEFESPKKKAKVE

SEQ ID NO: 958 - protein, 2103 aa, synthetic construct
MPAAKRVKLDGGDKKYSIGLDIGTNSVGWAVITDEYKVPSKKFKVLGNTDRHSIKKNLIGALLFDSGETAEATRLKRTARRRYTRRKNRICYLQEIFSNEMAKVDDSFFHRLEESFLVEEDKKHERHPIFGNIVDEVAYHEKYPTIYHLRKKLVDSTDKADLRLIYLALAHMIKFRGHFLIEGDLNPDNSDVDKLFIQLVQTYNQLFEENPINASGVDAKAILSARLSKSRRLENLIAQLPGEKKNGLFGNLIALSLGLTPNFKSNFDLAEDAKLQLSKDTYDDDLDNLLAQIGDQYADLFLAAKNLSDAILLSDILRVNTEITKAPLSASMIKRYDEHHQDLTLLKALVRQQLPEKYKEIFFDQSKNGYAGYIDGGASQEEFYKFIKPILEKMDGTEELLVKLNREDLLRKQRTFDNGSIPHQIHLGELHAILRRQEDFYPFLKDNREKIEKILTFRIPYYVGPLARGNSRFAWMTRKSEETITPWNFEEVVDKGASAQSFIERMTNFDKNLPNEKVLPKHSLLYEYFTVYNELTKVKYVTEGMRKPAFLSGEQKKAIVDLLFKTNRKVTVKQLKEDYFKKIECFDSVEISGVEDRFNASLGTYHDLLKIIKDKDFLDNEENEDILEDIVLTLTLFEDREMIEERLKTYAHLFDDKVMKQLKRRRYTGWGRLSRKLINGIRDKQSGKTILDFLKSDGFANRNFMQLIHDDSLTFKEDIQKAQVSGQGDSLHEHIANLAGSPAIKKGILQTVKVVDELVKVMGRHKPENIVIEMARENQTTQKGQKNSRERMKRIEEGIKELGSQILKEHPVENTQLQNEKLYLYYLQNGRDMYVDQELDINRLSDYDVDHIVPQSFLKDDSIDNKVLTRSDKARGKSDNVPSEEVVKKMKNYWRQLLNAKLITQRKFDNLTKAERGGLSELDKAGFIKRQLVETRQITKHVAQILDSRMNTKYDENDKLIREVKVITLKSKLVSDFRKDFQFYKVREINNYHHAHDAYLNAVVGTALIKKYPKLESEFVYGDYKVYDVRKMIAKSEQEIGKATAKYFFYSNIMNFFKTEITLANGEIRKRPLIETNGETGEIVWDKGRDFATVRKVLSMPQVNIVKKTEVQTGGFSKESILPKRNSDKLIARKKDWDPKKYGGFDSPTVAYSVLVVAKVEKGKSKKLKSVKELLGITIMERSSFEKNPIDFLEAKGYKEVKKDLIIKLPKYSLFELENGRKRMLASAGELQKGNELALPSKYVNFLYLASHYEKLKGSPEDNEQKQLFVEQHKHYLDEIIEQISEFSKRVILADANLDKVLSAYNKHRDKPIREQAENIIHLFTLTNLGAPAAFKYFDTTIDRKRYTSTKEVLDATLIHQSITGLYETRIDLSQLGGDGGGGSGGSGGSGGSGGSGGSGGTLNIEDEYRLHETSKEPDVPLGSTWLSDFPQAWAETGGMGLAVRQAPLIIPLKATSTPVSIKQYPMSQEARLGIKPHIQRLLDQGILVPCQSPWNTPLLPVKKPGTNDYRPVQDLREVNKRVEDIHPTVPNPYNLLSGLPPSHQWYTVLDLKDAFFCLRLHPTSQPLFAFEWRDPEMGISGQLTWTRLPQGFKNSPTLFNEALHRDLADFRIQHPDLILLQYVDDLLLAATSEQDCQRGTRALLQTLGNLGYRASAKKAQICQKQVKYLGYLLKEGQRWLTEARKETVMGQPTPKTPRQLREFLGTAGFCRLWIPGFAEMAAPLYPLTKPGTLFNWGPDQQKAYQEIKQALLTAPALGLPDLTKPFELFVDEKQGYAKGVLTQKLGPWRRPVAYLSKKLDPVAAGWPPCLRMVAAIAVLTKDAGKLTMGQPLVILAPHAVEALVKQPPDRWLSNARMTHYQAMLLDTDRVQFGPVVALNPATLLPLPEKEAPHDCLEILAETHGTRPDLTDQPIPDADYTWYTDGSSFLQEGQRRAGAAVTTETEVIWARALPAGTSAQRAELIALTQALKMAEGKKLNVYTDSRYAFATAHVHGEIYRRRGWLTSEGREIKNKNEILALLKALFLPKRLSIIHCPGHQKGNSAEARGNRMADQAAREAAMKAVLETSTLLAGKRTADGSEFEKRTADGSEFESPKKKAKVE

SEQ ID NO: 959 - protein, 2094 aa, synthetic construct
MPAAKRVKLDGGDKKYSIGLDIGTNSVGWAVITDEYKVPSKKFKVLGNTDRHSIKKNLIGALLFDSGETAEATRLKRTARRRYTRRKNRICYLQEIFSNEMAKVDDSFFHRLEESFLVEEDKKHERHPIFGNIVDEVAYHEKYPTIYHLRKKLVDSTDKADLRLIYLALAHMIKFRGHFLIEGDLNPDNSDVDKLFIQLVQTYNQLFEENPINASGVDAKAILSARLSKSRRLENLIAQLPGEKKNGLFGNLIALSLGLTPNFKSNFDLAEDAKLQLSKDTYDDDLDNLLAQIGDQYADLFLAAKNLSDAILLSDILRVNTEITKAPLSASMIKRYDEHHQDLTLLKALVRQQLPEKYKEIFFDQSKNGYAGYIDGGASQEEFYKFIKPILEKMDGTEELLVKLNREDLLRKQRTFDNGSIPHQIHLGELHAILRRQEDFYPFLKDNREKIEKILTFRIPYYVGPLARGNSRFAWMTRKSEETITPWNFEEVVDKGASAQSFIERMTNFDKNLPNEKVLPKHSLLYEYFTVYNELTKVKYVTEGMRKPAFLSGEQKKAIVDLLFKTNRKVTVKQLKEDYFKKIECFDSVEISGVEDRFNASLGTYHDLLKIIKDKDFLDNEENEDILEDIVLTLTLFEDREMIEERLKTYAHLFDDKVMKQLKRRRYTGWGRLSRKLINGIRDKQSGKTILDFLKSDGFANRNFMQLIHDDSLTFKEDIQKAQVSGQGDSLHEHIANLAGSPAIKKGILQTVKVVDELVKVMGRHKPENIVIEMARENQTTQKGQKNSRERMKRIEEGIKELGSQILKEHPVENTQLQNEKLYLYYLQNGRDMYVDQELDINRLSDYDVDHIVPQSFLKDDSIDNKVLTRSDKARGKSDNVPSEEVVKKMKNYWRQLLNAKLITQRKFDNLTKAERGGLSELDKAGFIKRQLVETRQITKHVAQILDSRMNTKYDENDKLIREVKVITLKSKLVSDFRKDFQFYKVREINNYHHAHDAYLNAVVGTALIKKYPKLESEFVYGDYKVYDVRKMIAKSEQEIGKATAKYFFYSNIMNFFKTEITLANGEIRKRPLIETNGETGEIVWDKGRDFATVRKVLSMPQVNIVKKTEVQTGGFSKESILPKRNSDKLIARKKDWDPKKYGGFDSPTVAYSVLVVAKVEKGKSKKLKSVKELLGITIMERSSFEKNPIDFLEAKGYKEVKKDLIIKLPKYSLFELENGRKRMLASAGELQKGNELALPSKYVNFLYLASHYEKLKGSPEDNEQKQLFVEQHKHYLDEIIEQISEFSKRVILADANLDKVLSAYNKHRDKPIREQAENIIHLFTLTNLGAPAAFKYFDTTIDRKRYTSTKEVLDATLIHQSITGLYETRIDLSQLGGDGGGSSGSSGSSGGTLNIEDEYRLHETSKEPDVPLGSTWLSDFPQAWAETGGMGLAVRQAPLIIPLKATSTPVSIKQYPMSQEARLGIKPHIQRLLDQGILVPCQSPWNTPLLPVKKPGTNDYRPVQDLREVNKRVEDIHPTVPNPYNLLSGLPPSHQWYTVLDLKDAFFCLRLHPTSQPLFAFEWRDPEMGISGQLTWTRLPQGFKNSPTLFNEALHRDLADFRIQHPDLILLQYVDDLLLAATSEQDCQRGTRALLQTLGNLGYRASAKKAQICQKQVKYLGYLLKEGQRWLTEARKETVMGQPTPKTPRQLREFLGTAGFCRLWIPGFAEMAAPLYPLTKPGTLFNWGPDQQKAYQEIKQALLTAPALGLPDLTKPFELFVDEKQGYAKGVLTQKLGPWRRPVAYLSKKLDPVAAGWPPCLRMVAAIAVLTKDAGKLTMGQPLVILAPHAVEALVKQPPDRWLSNARMTHYQAMLLDTDRVQFGPVVALNPATLLPLPEKEAPHDCLEILAETHGTRPDLTDQPIPDADYTWYTDGSSFLQEGQRRAGAAVTTETEVIWARALPAGTSAQRAELIALTQALKMAEGKKLNVYTDSRYAFATAHVHGEIYRRRGWLTSEGREIKNKNEILALLKALFLPKRLSIIHCPGHQKGNSAEARGNRMADQAAREAAMKAVLETSTLLAGKRTADGSEFEKRTADGSEFESPKKKAKVE

SEQ ID NO: 960 - protein, 2096 aa, synthetic construct
MPAAKRVKLDGGDKKYSIGLDIGTNSVGWAVITDEYKVPSKKFKVLGNTDRHSIKKNLIGALLFDSGETAEATRLKRTARRRYTRRKNRICYLQEIFSNEMAKVDDSFFHRLEESFLVEEDKKHERHPIFGNIVDEVAYHEKYPTIYHLRKKLVDSTDKADLRLIYLALAHMIKFRGHFLIEGDLNPDNSDVDKLFIQLVQTYNQLFEENPINASGVDAKAILSARLSKSRRLENLIAQLPGEKKNGLFGNLIALSLGLTPNFKSNFDLAEDAKLQLSKDTYDDDLDNLLAQIGDQYADLFLAAKNLSDAILLSDILRVNTEITKAPLSASMIKRYDEHHQDLTLLKALVRQQLPEKYKEIFFDQSKNGYAGYIDGGASQEEFYKFIKPILEKMDGTEELLVKLNREDLLRKQRTFDNGSIPHQIHLGELHAILRRQEDFYPFLKDNREKIEKILTFRIPYYVGPLARGNSRFAWMTRKSEETITPWNFEEVVDKGASAQSFIERMTNFDKNLPNEKVLPKHSLLYEYFTVYNELTKVKYVTEGMRKPAFLSGEQKKAIVDLLFKTNRKVTVKQLKEDYFKKIECFDSVEISGVEDRFNASLGTYHDLLKIIKDKDFLDNEENEDILEDIVLTLTLFEDREMIEERLKTYAHLFDDKVMKQLKRRRYTGWGRLSRKLINGIRDKQSGKTILDFLKSDGFANRNFMQLIHDDSLTFKEDIQKAQVSGQGDSLHEHIANLAGSPAIKKGILQTVKVVDELVKVMGRHKPENIVIEMARENQTTQKGQKNSRERMKRIEEGIKELGSQILKEHPVENTQLQNEKLYLYYLQNGRDMYVDQELDINRLSDYDVDHIVPQSFLKDDSIDNKVLTRSDKARGKSDNVPSEEVVKKMKNYWRQLLNAKLITQRKFDNLTKAERGGLSELDKAGFIKRQLVETRQITKHVAQILDSRMNTKYDENDKLIREVKVITLKSKLVSDFRKDFQFYKVREINNYHHAHDAYLNAVVGTALIKKYPKLESEFVYGDYKVYDVRKMIAKSEQEIGKATAKYFFYSNIMNFFKTEITLANGEIRKRPLIETNGETGEIVWDKGRDFATVRKVLSMPQVNIVKKTEVQTGGFSKESILPKRNSDKLIARKKDWDPKKYGGFDSPTVAYSVLVVAKVEKGKSKKLKSVKELLGITIMERSSFEKNPIDFLEAKGYKEVKKDLIIKLPKYSLFELENGRKRMLASAGELQKGNELALPSKYVNFLYLASHYEKLKGSPEDNEQKQLFVEQHKHYLDEIIEQISEFSKRVILADANLDKVLSAYNKHRDKPIREQAENIIHLFTLTNLGAPAAFKYFDTTIDRKRYTSTKEVLDATLIHQSITGLYETRIDLSQLGGDGGEAAAKGSSPAPGGTLNIEDEYRLHETSKEPDVPLGSTWLSDFPQAWAETGGMGLAVRQAPLIIPLKATSTPVSIKQYPMSQEARLGIKPHIQRLLDQGILVPCQSPWNTPLLPVKKPGTNDYRPVQDLREVNKRVEDIHPTVPNPYNLLSGLPPSHQWYTVLDLKDAFFCLRLHPTSQPLFAFEWRDPEMGISGQLTWTRLPQGFKNSPTLFNEALHRDLADFRIQHPDLILLQYVDDLLLAATSEQDCQRGTRALLQTLGNLGYRASAKKAQICQKQVKYLGYLLKEGQRWLTEARKETVMGQPTPKTPRQLREFLGTAGFCRLWIPGFAEMAAPLYPLTKPGTLFNWGPDQQKAYQEIKQALLTAPALGLPDLTKPFELFVDEKQGYAKGVLTQKLGPWRRPVAYLSKKLDPVAAGWPPCLRMVAAIAVLTKDAGKLTMGQPLVILAPHAVEALVKQPPDRWLSNARMTHYQAMLLDTDRVQFGPVVALNPATLLPLPEKEAPHDCLEILAETHGTRPDLTDQPIPDADYTWYTDGSSFLQEGQRRAGAAVTTETEVIWARALPAGTSAQRAELIALTQALKMAEGKKLNVYTDSRYAFATAHVHGEIYRRRGWLTSEGREIKNKNEILALLKALFLPKRLSIIHCPGHQKGNSAEARGNRMADQAAREAAMKAVLETSTLLAGKRTADGSEFEKRTADGSEFESPKKKAKVE

SEQ ID NO: 961 - protein, 2096 aa, synthetic construct
MPAAKRVKLDGGDKKYSIGLDIGTNSVGWAVITDEYKVPSKKFKVLGNTDRHSIKKNLIGALLFDSGETAEATRLKRTARRRYTRRKNRICYLQEIFSNEMAKVDDSFFHRLEESFLVEEDKKHERHPIFGNIVDEVAYHEKYPTIYHLRKKLVDSTDKADLRLIYLALAHMIKFRGHFLIEGDLNPDNSDVDKLFIQLVQTYNQLFEENPINASGVDAKAILSARLSKSRRLENLIAQLPGEKKNGLFGNLIALSLGLTPNFKSNFDLAEDAKLQLSKDTYDDDLDNLLAQIGDQYADLFLAAKNLSDAILLSDILRVNTEITKAPLSASMIKRYDEHHQDLTLLKALVRQQLPEKYKEIFFDQSKNGYAGYIDGGASQEEFYKFIKPILEKMDGTEELLVKLNREDLLRKQRTFDNGSIPHQIHLGELHAILRRQEDFYPFLKDNREKIEKILTFRIPYYVGPLARGNSRFAWMTRKSEETITPWNFEEVVDKGASAQSFIERMTNFDKNLPNEKVLPKHSLLYEYFTVYNELTKVKYVTEGMRKPAFLSGEQKKAIVDLLFKTNRKVTVKQLKEDYFKKIECFDSVEISGVEDRFNASLGTYHDLLKIIKDKDFLDNEENEDILEDIVLTLTLFEDREMIEERLKTYAHLFDDKVMKQLKRRRYTGWGRLSRKLINGIRDKQSGKTILDFLKSDGFANRNFMQLIHDDSLTFKEDIQKAQVSGQGDSLHEHIANLAGSPAIKKGILQTVKVVDELVKVMGRHKPENIVIEMARENQTTQKGQKNSRERMKRIEEGIKELGSQILKEHPVENTQLQNEKLYLYYLQNGRDMYVDQELDINRLSDYDVDHIVPQSFLKDDSIDNKVLTRSDKARGKSDNVPSEEVVKKMKNYWRQLLNAKLITQRKFDNLTKAERGGLSELDKAGFIKRQLVETRQITKHVAQILDSRMNTKYDENDKLIREVKVITLKSKLVSDFRKDFQFYKVREINNYHHAHDAYLNAVVGTALIKKYPKLESEFVYGDYKVYDVRKMIAKSEQEIGKATAKYFFYSNIMNFFKTEITLANGEIRKRPLIETNGETGEIVWDKGRDFATVRKVLSMPQVNIVKKTEVQTGGFSKESILPKRNSDKLIARKKDWDPKKYGGFDSPTVAYSVLVVAKVEKGKSKKLKSVKELLGITIMERSSFEKNPIDFLEAKGYKEVKKDLIIKLPKYSLFELENGRKRMLASAGELQKGNELALPSKYVNFLYLASHYEKLKGSPEDNEQKQLFVEQHKHYLDEIIEQISEFSKRVILADANLDKVLSAYNKHRDKPIREQAENIIHLFTLTNLGAPAAFKYFDTTIDRKRYTSTKEVLDATLIHQSITGLYETRIDLSQLGGDGGEAAAKPAPGGSGGTLNIEDEYRLHETSKEPDVPLGSTWLSDFPQAWAETGGMGLAVRQAPLIIPLKATSTPVSIKQYPMSQEARLGIKPHIQRLLDQGILVPCQSPWNTPLLPVKKPGTNDYRPVQDLREVNKRVEDIHPTVPNPYNLLSGLPPSHQWYTVLDLKDAFFCLRLHPTSQPLFAFEWRDPEMGISGQLTWTRLPQGFKNSPTLFNEALHRDLADFRIQHPDLILLQYVDDLLLAATSEQDCQRGTRALLQTLGNLGYRASAKKAQICQKQVKYLGYLLKEGQRWLTEARKETVMGQPTPKTPRQLREFLGTAGFCRLWIPGFAEMAAPLYPLTKPGTLFNWGPDQQKAYQEIKQALLTAPALGLPDLTKPFELFVDEKQGYAKGVLTQKLGPWRRPVAYLSKKLDPVAAGWPPCLRMVAAIAVLTKDAGKLTMGQPLVILAPHAVEALVKQPPDRWLSNARMTHYQAMLLDTDRVQFGPVVALNPATLLPLPEKEAPHDCLEILAETHGTRPDLTDQPIPDADYTWYTDGSSFLQEGQRRAGAAVTTETEVIWARALPAGTSAQRAELIALTQALKMAEGKKLNVYTDSRYAFATAHVHGEIYRRRGWLTSEGREIKNKNEILALLKALFLPKRLSIIHCPGHQKGNSAEARGNRMADQAAREAAMKAVLETSTLLAGKRTADGSEFEKRTADGSEFESPKKKAKVE

SEQ ID NO: 962 - protein, 2131 aa, synthetic construct
MPAAKRVKLDGGDKKYSIGLDIGTNSVGWAVITDEYKVPSKKFKVLGNTDRHSIKKNLIGALLFDSGETAEATRLKRTARRRYTRRKNRICYLQEIFSNEMAKVDDSFFHRLEESFLVEEDKKHERHPIFGNIVDEVAYHEKYPTIYHLRKKLVDSTDKADLRLIYLALAHMIKFRGHFLIEGDLNPDNSDVDKLFIQLVQTYNQLFEENPINASGVDAKAILSARLSKSRRLENLIAQLPGEKKNGLFGNLIALSLGLTPNFKSNFDLAEDAKLQLSKDTYDDDLDNLLAQIGDQYADLFLAAKNLSDAILLSDILRVNTEITKAPLSASMIKRYDEHHQDLTLLKALVRQQLPEKYKEIFFDQSKNGYAGYIDGGASQEEFYKFIKPILEKMDGTEELLVKLNREDLLRKQRTFDNGSIPHQIHLGELHAILRRQEDFYPFLKDNREKIEKILTFRIPYYVGPLARGNSRFAWMTRKSEETITPWNFEEVVDKGASAQSFIERMTNFDKNLPNEKVLPKHSLLYEYFTVYNELTKVKYVTEGMRKPAFLSGEQKKAIVDLLFKTNRKVTVKQLKEDYFKKIECFDSVEISGVEDRFNASLGTYHDLLKIIKDKDFLDNEENEDILEDIVLTLTLFEDREMIEERLKTYAHLFDDKVMKQLKRRRYTGWGRLSRKLINGIRDKQSGKTILDFLKSDGFANRNFMQLIHDDSLTFKEDIQKAQVSGQGDSLHEHIANLAGSPAIKKGILQTVKVVDELVKVMGRHKPENIVIEMARENQTTQKGQKNSRERMKRIEEGIKELGSQILKEHPVENTQLQNEKLYLYYLQNGRDMYVDQELDINRLSDYDVDHIVPQSFLKDDSIDNKVLTRSDKARGKSDNVPSEEVVKKMKNYWRQLLNAKLITQRKFDNLTKAERGGLSELDKAGFIKRQLVETRQITKHVAQILDSRMNTKYDENDKLIREVKVITLKSKLVSDFRKDFQFYKVREINNYHHAHDAYLNAVVGTALIKKYPKLESEFVYGDYKVYDVRKMIAKSEQEIGKATAKYFFYSNIMNFFKTEITLANGEIRKRPLIETNGETGEIVWDKGRDFATVRKVLSMPQVNIVKKTEVQTGGFSKESILPKRNSDKLIARKKDWDPKKYGGFDSPTVAYSVLVVAKVEKGKSKKLKSVKELLGITIMERSSFEKNPIDFLEAKGYKEVKKDLIIKLPKYSLFELENGRKRMLASAGELQKGNELALPSKYVNFLYLASHYEKLKGSPEDNEQKQLFVEQHKHYLDEIIEQISEFSKRVILADANLDKVLSAYNKHRDKPIREQAENIIHLFTLTNLGAPAAFKYFDTTIDRKRYTSTKEVLDATLIHQSITGLYETRIDLSQLGGDGGAEAAAKEAAAKEAAAKEAAAKALEAEAAAKEAAAKEAAAKEAAAKAGGTLNIEDEYRLHETSKEPDVPLGSTWLSDFPQAWAETGGMGLAVRQAPLIIPLKATSTPVSIKQYPMSQEARLGIKPHIQRLLDQGILVPCQSPWNTPLLPVKKPGTNDYRPVQDLREVNKRVEDIHPTVPNPYNLLSGLPPSHQWYTVLDLKDAFFCLRLHPTSQPLFAFEWRDPEMGISGQLTWTRLPQGFKNSPTLFNEALHRDLADFRIQHPDLILLQYVDDLLLAATSEQDCQRGTRALLQTLGNLGYRASAKKAQICQKQVKYLGYLLKEGQRWLTEARKETVMGQPTPKTPRQLREFLGTAGFCRLWIPGFAEMAAPLYPLTKPGTLFNWGPDQQKAYQEIKQALLTAPALGLPDLTKPFELFVDEKQGYAKGVLTQKLGPWRRPVAYLSKKLDPVAAGWPPCLRMVAAIAVLTKDAGKLTMGQPLVILAPHAVEALVKQPPDRWLSNARMTHYQAMLLDTDRVQFGPVVALNPATLLPLPEKEAPHDCLEILAETHGTRPDLTDQPIPDADYTWYTDGSSFLQEGQRRAGAAVTTETEVIWARALPAGTSAQRAELIALTQALKMAEGKKLNVYTDSRYAFATAHVHGEIYRRRGWLTSEGREIKNKNEILALLKALFLPKRLSIIHCPGHQKGNSAEARGNRMADQAAREAAMKAVLETSTLLAGKRTADGSEFEKRTADGSEFESPKKKAKVE

SEQ ID NO: 963 - protein, 2096 aa, synthetic construct
MPAAKRVKLDGGDKKYSIGLDIGTNSVGWAVITDEYKVPSKKFKVLGNTDRHSIKKNLIGALLFDSGETAEATRLKRTARRRYTRRKNRICYLQEIFSNEMAKVDDSFFHRLEESFLVEEDKKHERHPIFGNIVDEVAYHEKYPTIYHLRKKLVDSTDKADLRLIYLALAHMIKFRGHFLIEGDLNPDNSDVDKLFIQLVQTYNQLFEENPINASGVDAKAILSARLSKSRRLENLIAQLPGEKKNGLFGNLIALSLGLTPNFKSNFDLAEDAKLQLSKDTYDDDLDNLLAQIGDQYADLFLAAKNLSDAILLSDILRVNTEITKAPLSASMIKRYDEHHQDLTLLKALVRQQLPEKYKEIFFDQSKNGYAGYIDGGASQEEFYKFIKPILEKMDGTEELLVKLNREDLLRKQRTFDNGSIPHQIHLGELHAILRRQEDFYPFLKDNREKIEKILTFRIPYYVGPLARGNSRFAWMTRKSEETITPWNFEEVVDKGASAQSFIERMTNFDKNLPNEKVLPKHSLLYEYFTVYNELTKVKYVTEGMRKPAFLSGEQKKAIVDLLFKTNRKVTVKQLKEDYFKKIECFDSVEISGVEDRFNASLGTYHDLLKIIKDKDFLDNEENEDILEDIVLTLTLFEDREMIEERLKTYAHLFDDKVMKQLKRRRYTGWGRLSRKLINGIRDKQSGKTILDFLKSDGFANRNFMQLIHDDSLTFKEDIQKAQVSGQGDSLHEHIANLAGSPAIKKGILQTVKVVDELVKVMGRHKPENIVIEMARENQTTQKGQKNSRERMKRIEEGIKELGSQILKEHPVENTQLQNEKLYLYYLQNGRDMYVDQELDINRLSDYDVDHIVPQSFLKDDSIDNKVLTRSDKARGKSDNVPSEEVVKKMKNYWRQLLNAKLITQRKFDNLTKAERGGLSELDKAGFIKRQLVETRQITKHVAQILDSRMNTKYDENDKLIREVKVITLKSKLVSDFRKDFQFYKVREINNYHHAHDAYLNAVVGTALIKKYPKLESEFVYGDYKVYDVRKMIAKSEQEIGKATAKYFFYSNIMNFFKTEITLANGEIRKRPLIETNGETGEIVWDKGRDFATVRKVLSMPQVNIVKKTEVQTGGFSKESILPKRNSDKLIARKKDWDPKKYGGFDSPTVAYSVLVVAKVEKGKSKKLKSVKELLGITIMERSSFEKNPIDFLEAKGYKEVKKDLIIKLPKYSLFELENGRKRMLASAGELQKGNELALPSKYVNFLYLASHYEKLKGSPEDNEQKQLFVEQHKHYLDEIIEQISEFSKRVILADANLDKVLSAYNKHRDKPIREQAENIIHLFTLTNLGAPAAFKYFDTTIDRKRYTSTKEVLDATLIHQSITGLYETRIDLSQLGGDGGEAAAKGGGPAPGGTLNIEDEYRLHETSKEPDVPLGSTWLSDFPQAWAETGGMGLAVRQAPLIIPLKATSTPVSIKQYPMSQEARLGIKPHIQRLLDQGILVPCQSPWNTPLLPVKKPGTNDYRPVQDLREVNKRVEDIHPTVPNPYNLLSGLPPSHQWYTVLDLKDAFFCLRLHPTSQPLFAFEWRDPEMGISGQLTWTRLPQGFKNSPTLFNEALHRDLADFRIQHPDLILLQYVDDLLLAATSEQDCQRGTRALLQTLGNLGYRASAKKAQICQKQVKYLGYLLKEGQRWLTEARKETVMGQPTPKTPRQLREFLGTAGFCRLWIPGFAEMAAPLYPLTKPGTLFNWGPDQQKAYQEIKQALLTAPALGLPDLTKPFELFVDEKQGYAKGVLTQKLGPWRRPVAYLSKKLDPVAAGWPPCLRMVAAIAVLTKDAGKLTMGQPLVILAPHAVEALVKQPPDRWLSNARMTHYQAMLLDTDRVQFGPVVALNPATLLPLPEKEAPHDCLEILAETHGTRPDLTDQPIPDADYTWYTDGSSFLQEGQRRAGAAVTTETEVIWARALPAGTSAQRAELIALTQALKMAEGKKLNVYTDSRYAFATAHVHGEIYRRRGWLTSEGREIKNKNEILALLKALFLPKRLSIIHCPGHQKGNSAEARGNRMADQAAREAAMKAVLETSTLLAGKRTADGSEFEKRTADGSEFESPKKKAKVE

SEQ ID NO: 964 - protein, 2100 aa, synthetic construct
MPAAKRVKLDGGDKKYSIGLDIGTNSVGWAVITDEYKVPSKKFKVLGNTDRHSIKKNLIGALLFDSGETAEATRLKRTARRRYTRRKNRICYLQEIFSNEMAKVDDSFFHRLEESFLVEEDKKHERHPIFGNIVDEVAYHEKYPTIYHLRKKLVDSTDKADLRLIYLALAHMIKFRGHFLIEGDLNPDNSDVDKLFIQLVQTYNQLFEENPINASGVDAKAILSARLSKSRRLENLIAQLPGEKKNGLFGNLIALSLGLTPNFKSNFDLAEDAKLQLSKDTYDDDLDNLLAQIGDQYADLFLAAKNLSDAILLSDILRVNTEITKAPLSASMIKRYDEHHQDLTLLKALVRQQLPEKYKEIFFDQSKNGYAGYIDGGASQEEFYKFIKPILEKMDGTEELLVKLNREDLLRKQRTFDNGSIPHQIHLGELHAILRRQEDFYPFLKDNREKIEKILTFRIPYYVGPLARGNSRFAWMTRKSEETITPWNFEEVVDKGASAQSFIERMTNFDKNLPNEKVLPKHSLLYEYFTVYNELTKVKYVTEGMRKPAFLSGEQKKAIVDLLFKTNRKVTVKQLKEDYFKKIECFDSVEISGVEDRFNASLGTYHDLLKIIKDKDFLDNEENEDILEDIVLTLTLFEDREMIEERLKTYAHLFDDKVMKQLKRRRYTGWGRLSRKLINGIRDKQSGKTILDFLKSDGFANRNFMQLIHDDSLTFKEDIQKAQVSGQGDSLHEHIANLAGSPAIKKGILQTVKVVDELVKVMGRHKPENIVIEMARENQTTQKGQKNSRERMKRIEEGIKELGSQILKEHPVENTQLQNEKLYLYYLQNGRDMYVDQELDINRLSDYDVDHIVPQSFLKDDSIDNKVLTRSDKARGKSDNVPSEEVVKKMKNYWRQLLNAKLITQRKFDNLTKAERGGLSELDKAGFIKRQLVETRQITKHVAQILDSRMNTKYDENDKLIREVKVITLKSKLVSDFRKDFQFYKVREINNYHHAHDAYLNAVVGTALIKKYPKLESEFVYGDYKVYDVRKMIAKSEQEIGKATAKYFFYSNIMNFFKTEITLANGEIRKRPLIETNGETGEIVWDKGRDFATVRKVLSMPQVNIVKKTEVQTGGFSKESILPKRNSDKLIARKKDWDPKKYGGFDSPTVAYSVLVVAKVEKGKSKKLKSVKELLGITIMERSSFEKNPIDFLEAKGYKEVKKDLIIKLPKYSLFELENGRKRMLASAGELQKGNELALPSKYVNFLYLASHYEKLKGSPEDNEQKQLFVEQHKHYLDEIIEQISEFSKRVILADANLDKVLSAYNKHRDKPIREQAENIIHLFTLTNLGAPAAFKYFDTTIDRKRYTSTKEVLDATLIHQSITGLYETRIDLSQLGGDGGGSSGSSGSSGSSGSSGGTLNIEDEYRLHETSKEPDVPLGSTWLSDFPQAWAETGGMGLAVRQAPLIIPLKATSTPVSIKQYPMSQEARLGIKPHIQRLLDQGILVPCQSPWNTPLLPVKKPGTNDYRPVQDLREVNKRVEDIHPTVPNPYNLLSGLPPSHQWYTVLDLKDAFFCLRLHPTSQPLFAFEWRDPEMGISGQLTWTRLPQGFKNSPTLFNEALHRDLADFRIQHPDLILLQYVDDLLLAATSEQDCQRGTRALLQTLGNLGYRASAKKAQICQKQVKYLGYLLKEGQRWLTEARKETVMGQPTPKTPRQLREFLGTAGFCRLWIPGFAEMAAPLYPLTKPGTLFNWGPDQQKAYQEIKQALLTAPALGLPDLTKPFELFVDEKQGYAKGVLTQKLGPWRRPVAYLSKKLDPVAAGWPPCLRMVAAIAVLTKDAGKLTMGQPLVILAPHAVEALVKQPPDRWLSNARMTHYQAMLLDTDRVQFGPVVALNPATLLPLPEKEAPHDCLEILAETHGTRPDLTDQPIPDADYTWYTDGSSFLQEGQRRAGAAVTTETEVIWARALPAGTSAQRAELIALTQALKMAEGKKLNVYTDSRYAFATAHVHGEIYRRRGWLTSEGREIKNKNEILALLKALFLPKRLSIIHCPGHQKGNSAEARGNRMADQAAREAAMKAVLETSTLLAGKRTADGSEFEKRTADGSEFESPKKKAKVE

SEQ ID NO: 965 - protein, 2105 aa, synthetic construct
MPAAKRVKLDGGDKKYSIGLDIGTNSVGWAVITDEYKVPSKKFKVLGNTDRHSIKKNLIGALLFDSGETAEATRLKRTARRRYTRRKNRICYLQEIFSNEMAKVDDSFFHRLEESFLVEEDKKHERHPIFGNIVDEVAYHEKYPTIYHLRKKLVDSTDKADLRLIYLALAHMIKFRGHFLIEGDLNPDNSDVDKLFIQLVQTYNQLFEENPINASGVDAKAILSARLSKSRRLENLIAQLPGEKKNGLFGNLIALSLGLTPNFKSNFDLAEDAKLQLSKDTYDDDLDNLLAQIGDQYADLFLAAKNLSDAILLSDILRVNTEITKAPLSASMIKRYDEHHQDLTLLKALVRQQLPEKYKEIFFDQSKNGYAGYIDGGASQEEFYKFIKPILEKMDGTEELLVKLNREDLLRKQRTFDNGSIPHQIHLGELHAILRRQEDFYPFLKDNREKIEKILTFRIPYYVGPLARGNSRFAWMTRKSEETITPWNFEEVVDKGASAQSFIERMTNFDKNLPNEKVLPKHSLLYEYFTVYNELTKVKYVTEGMRKPAFLSGEQKKAIVDLLFKTNRKVTVKQLKEDYFKKIECFDSVEISGVEDRFNASLGTYHDLLKIIKDKDFLDNEENEDILEDIVLTLTLFEDREMIEERLKTYAHLFDDKVMKQLKRRRYTGWGRLSRKLINGIRDKQSGKTILDFLKSDGFANRNFMQLIHDDSLTFKEDIQKAQVSGQGDSLHEHIANLAGSPAIKKGILQTVKVVDELVKVMGRHKPENIVIEMARENQTTQKGQKNSRERMKRIEEGIKELGSQILKEHPVENTQLQNEKLYLYYLQNGRDMYVDQELDINRLSDYDVDHIVPQSFLKDDSIDNKVLTRSDKARGKSDNVPSEEVVKKMKNYWRQLLNAKLITQRKFDNLTKAERGGLSELDKAGFIKRQLVETRQITKHVAQILDSRMNTKYDENDKLIREVKVITLKSKLVSDFRKDFQFYKVREINNYHHAHDAYLNAVVGTALIKKYPKLESEFVYGDYKVYDVRKMIAKSEQEIGKATAKYFFYSNIMNFFKTEITLANGEIRKRPLIETNGETGEIVWDKGRDFATVRKVLSMPQVNIVKKTEVQTGGFSKESILPKRNSDKLIARKKDWDPKKYGGFDSPTVAYSVLVVAKVEKGKSKKLKSVKELLGITIMERSSFEKNPIDFLEAKGYKEVKKDLIIKLPKYSLFELENGRKRMLASAGELQKGNELALPSKYVNFLYLASHYEKLKGSPEDNEQKQLFVEQHKHYLDEIIEQISEFSKRVILADANLDKVLSAYNKHRDKPIREQAENIIHLFTLTNLGAPAAFKYFDTTIDRKRYTSTKEVLDATLIHQSITGLYETRIDLSQLGGDGGEAAAKEAAAKEAAAKEAAAKGGTLNIEDEYRLHETSKEPDVPLGSTWLSDFPQAWAETGGMGLAVRQAPLIIPLKATSTPVSIKQYPMSQEARLGIKPHIQRLLDQGILVPCQSPWNTPLLPVKKPGTNDYRPVQDLREVNKRVEDIHPTVPNPYNLLSGLPPSHQWYTVLDLKDAFFCLRLHPTSQPLFAFEWRDPEMGISGQLTWTRLPQGFKNSPTLFNEALHRDLADFRIQHPDLILLQYVDDLLLAATSEQDCQRGTRALLQTLGNLGYRASAKKAQICQKQVKYLGYLLKEGQRWLTEARKETVMGQPTPKTPRQLREFLGTAGFCRLWIPGFAEMAAPLYPLTKPGTLFNWGPDQQKAYQEIKQALLTAPALGLPDLTKPFELFVDEKQGYAKGVLTQKLGPWRRPVAYLSKKLDPVAAGWPPCLRMVAAIAVLTKDAGKLTMGQPLVILAPHAVEALVKQPPDRWLSNARMTHYQAMLLDTDRVQFGPVVALNPATLLPLPEKEAPHDCLEILAETHGTRPDLTDQPIPDADYTWYTDGSSFLQEGQRRAGAAVTTETEVIWARALPAGTSAQRAELIALTQALKMAEGKKLNVYTDSRYAFATAHVHGEIYRRRGWLTSEGREIKNKNEILALLKALFLPKRLSIIHCPGHQKGNSAEARGNRMADQAAREAAMKAVLETSTLLAGKRTADGSEFEKRTADGSEFESPKKKAKVE

SEQ ID NO: 966 - protein, 2093 aa, synthetic construct
MPAAKRVKLDGGDKKYSIGLDIGTNSVGWAVITDEYKVPSKKFKVLGNTDRHSIKKNLIGALLFDSGETAEATRLKRTARRRYTRRKNRICYLQEIFSNEMAKVDDSFFHRLEESFLVEEDKKHERHPIFGNIVDEVAYHEKYPTIYHLRKKLVDSTDKADLRLIYLALAHMIKFRGHFLIEGDLNPDNSDVDKLFIQLVQTYNQLFEENPINASGVDAKAILSARLSKSRRLENLIAQLPGEKKNGLFGNLIALSLGLTPNFKSNFDLAEDAKLQLSKDTYDDDLDNLLAQIGDQYADLFLAAKNLSDAILLSDILRVNTEITKAPLSASMIKRYDEHHQDLTLLKALVRQQLPEKYKEIFFDQSKNGYAGYIDGGASQEEFYKFIKPILEKMDGTEELLVKLNREDLLRKQRTFDNGSIPHQIHLGELHAILRRQEDFYPFLKDNREKIEKILTFRIPYYVGPLARGNSRFAWMTRKSEETITPWNFEEVVDKGASAQSFIERMTNFDKNLPNEKVLPKHSLLYEYFTVYNELTKVKYVTEGMRKPAFLSGEQKKAIVDLLFKTNRKVTVKQLKEDYFKKIECFDSVEISGVEDRFNASLGTYHDLLKIIKDKDFLDNEENEDILEDIVLTLTLFEDREMIEERLKTYAHLFDDKVMKQLKRRRYTGWGRLSRKLINGIRDKQSGKTILDFLKSDGFANRNFMQLIHDDSLTFKEDIQKAQVSGQGDSLHEHIANLAGSPAIKKGILQTVKVVDELVKVMGRHKPENIVIEMARENQTTQKGQKNSRERMKRIEEGIKELGSQILKEHPVENTQLQNEKLYLYYLQNGRDMYVDQELDINRLSDYDVDHIVPQSFLKDDSIDNKVLTRSDKARGKSDNVPSEEVVKKMKNYWRQLLNAKLITQRKFDNLTKAERGGLSELDKAGFIKRQLVETRQITKHVAQILDSRMNTKYDENDKLIREVKVITLKSKLVSDFRKDFQFYKVREINNYHHAHDAYLNAVVGTALIKKYPKLESEFVYGDYKVYDVRKMIAKSEQEIGKATAKYFFYSNIMNFFKTEITLANGEIRKRPLIETNGETGEIVWDKGRDFATVRKVLSMPQVNIVKKTEVQTGGFSKESILPKRNSDKLIARKKDWDPKKYGGFDSPTVAYSVLVVAKVEKGKSKKLKSVKELLGITIMERSSFEKNPIDFLEAKGYKEVKKDLIIKLPKYSLFELENGRKRMLASAGELQKGNELALPSKYVNFLYLASHYEKLKGSPEDNEQKQLFVEQHKHYLDEIIEQISEFSKRVILADANLDKVLSAYNKHRDKPIREQAENIIHLFTLTNLGAPAAFKYFDTTIDRKRYTSTKEVLDATLIHQSITGLYETRIDLSQLGGDGGGSSEAAAKGGTLNIEDEYRLHETSKEPDVPLGSTWLSDFPQAWAETGGMGLAVRQAPLIIPLKATSTPVSIKQYPMSQEARLGIKPHIQRLLDQGILVPCQSPWNTPLLPVKKPGTNDYRPVQDLREVNKRVEDIHPTVPNPYNLLSGLPPSHQWYTVLDLKDAFFCLRLHPTSQPLFAFEWRDPEMGISGQLTWTRLPQGFKNSPTLFNEALHRDLADFRIQHPDLILLQYVDDLLLAATSEQDCQRGTRALLQTLGNLGYRASAKKAQICQKQVKYLGYLLKEGQRWLTEARKETVMGQPTPKTPRQLREFLGTAGFCRLWIPGFAEMAAPLYPLTKPGTLFNWGPDQQKAYQEIKQALLTAPALGLPDLTKPFELFVDEKQGYAKGVLTQKLGPWRRPVAYLSKKLDPVAAGWPPCLRMVAAIAVLTKDAGKLTMGQPLVILAPHAVEALVKQPPDRWLSNARMTHYQAMLLDTDRVQFGPVVALNPATLLPLPEKEAPHDCLEILAETHGTRPDLTDQPIPDADYTWYTDGSSFLQEGQRRAGAAVTTETEVIWARALPAGTSAQRAELIALTQALKMAEGKKLNVYTDSRYAFATAHVHGEIYRRRGWLTSEGREIKNKNEILALLKALFLPKRLSIIHCPGHQKGNSAEARGNRMADQAAREAAMKAVLETSTLLAGKRTADGSEFEKRTADGSEFESPKKKAKVE

SEQ ID NO: 967 - protein, 2096 aa, synthetic construct
MPAAKRVKLDGGDKKYSIGLDIGTNSVGWAVITDEYKVPSKKFKVLGNTDRHSIKKNLIGALLFDSGETAEATRLKRTARRRYTRRKNRICYLQEIFSNEMAKVDDSFFHRLEESFLVEEDKKHERHPIFGNIVDEVAYHEKYPTIYHLRKKLVDSTDKADLRLIYLALAHMIKFRGHFLIEGDLNPDNSDVDKLFIQLVQTYNQLFEENPINASGVDAKAILSARLSKSRRLENLIAQLPGEKKNGLFGNLIALSLGLTPNFKSNFDLAEDAKLQLSKDTYDDDLDNLLAQIGDQYADLFLAAKNLSDAILLSDILRVNTEITKAPLSASMIKRYDEHHQDLTLLKALVRQQLPEKYKEIFFDQSKNGYAGYIDGGASQEEFYKFIKPILEKMDGTEELLVKLNREDLLRKQRTFDNGSIPHQIHLGELHAILRRQEDFYPFLKDNREKIEKILTFRIPYYVGPLARGNSRFAWMTRKSEETITPWNFEEVVDKGASAQSFIERMTNFDKNLPNEKVLPKHSLLYEYFTVYNELTKVKYVTEGMRKPAFLSGEQKKAIVDLLFKTNRKVTVKQLKEDYFKKIECFDSVEISGVEDRFNASLGTYHDLLKIIKDKDFLDNEENEDILEDIVLTLTLFEDREMIEERLKTYAHLFDDKVMKQLKRRRYTGWGRLSRKLINGIRDKQSGKTILDFLKSDGFANRNFMQLIHDDSLTFKEDIQKAQVSGQGDSLHEHIANLAGSPAIKKGILQTVKVVDELVKVMGRHKPENIVIEMARENQTTQKGQKNSRERMKRIEEGIKELGSQILKEHPVENTQLQNEKLYLYYLQNGRDMYVDQELDINRLSDYDVDHIVPQSFLKDDSIDNKVLTRSDKARGKSDNVPSEEVVKKMKNYWRQLLNAKLITQRKFDNLTKAERGGLSELDKAGFIKRQLVETRQITKHVAQILDSRMNTKYDENDKLIREVKVITLKSKLVSDFRKDFQFYKVREINNYHHAHDAYLNAVVGTALIKKYPKLESEFVYGDYKVYDVRKMIAKSEQEIGKATAKYFFYSNIMNFFKTEITLANGEIRKRPLIETNGETGEIVWDKGRDFATVRKVLSMPQVNIVKKTEVQTGGFSKESILPKRNSDKLIARKKDWDPKKYGGFDSPTVAYSVLVVAKVEKGKSKKLKSVKELLGITIMERSSFEKNPIDFLEAKGYKEVKKDLIIKLPKYSLFELENGRKRMLASAGELQKGNELALPSKYVNFLYLASHYEKLKGSPEDNEQKQLFVEQHKHYLDEIIEQISEFSKRVILADANLDKVLSAYNKHRDKPIREQAENIIHLFTLTNLGAPAAFKYFDTTIDRKRYTSTKEVLDATLIHQSITGLYETRIDLSQLGGDGGPAPGSSEAAAKGGTLNIEDEYRLHETSKEPDVPLGSTWLSDFPQAWAETGGMGLAVRQAPLIIPLKATSTPVSIKQYPMSQEARLGIKPHIQRLLDQGILVPCQSPWNTPLLPVKKPGTNDYRPVQDLREVNKRVEDIHPTVPNPYNLLSGLPPSHQWYTVLDLKDAFFCLRLHPTSQPLFAFEWRDPEMGISGQLTWTRLPQGFKNSPTLFNEALHRDLADFRIQHPDLILLQYVDDLLLAATSEQDCQRGTRALLQTLGNLGYRASAKKAQICQKQVKYLGYLLKEGQRWLTEARKETVMGQPTPKTPRQLREFLGTAGFCRLWIPGFAEMAAPLYPLTKPGTLFNWGPDQQKAYQEIKQALLTAPALGLPDLTKPFELFVDEKQGYAKGVLTQKLGPWRRPVAYLSKKLDPVAAGWPPCLRMVAAIAVLTKDAGKLTMGQPLVILAPHAVEALVKQPPDRWLSNARMTHYQAMLLDTDRVQFGPVVALNPATLLPLPEKEAPHDCLEILAETHGTRPDLTDQPIPDADYTWYTDGSSFLQEGQRRAGAAVTTETEVIWARALPAGTSAQRAELIALTQALKMAEGKKLNVYTDSRYAFATAHVHGEIYRRRGWLTSEGREIKNKNEILALLKALFLPKRLSIIHCPGHQKGNSAEARGNRMADQAAREAAMKAVLETSTLLAGKRTADGSEFEKRTADGSEFESPKKKAKVE

SEQ ID NO: 968 - protein, 2096 aa, synthetic construct
MPAAKRVKLDGGDKKYSIGLDIGTNSVGWAVITDEYKVPSKKFKVLGNTDRHSIKKNLIGALLFDSGETAEATRLKRTARRRYTRRKNRICYLQEIFSNEMAKVDDSFFHRLEESFLVEEDKKHERHPIFGNIVDEVAYHEKYPTIYHLRKKLVDSTDKADLRLIYLALAHMIKFRGHFLIEGDLNPDNSDVDKLFIQLVQTYNQLFEENPINASGVDAKAILSARLSKSRRLENLIAQLPGEKKNGLFGNLIALSLGLTPNFKSNFDLAEDAKLQLSKDTYDDDLDNLLAQIGDQYADLFLAAKNLSDAILLSDILRVNTEITKAPLSASMIKRYDEHHQDLTLLKALVRQQLPEKYKEIFFDQSKNGYAGYIDGGASQEEFYKFIKPILEKMDGTEELLVKLNREDLLRKQRTFDNGSIPHQIHLGELHAILRRQEDFYPFLKDNREKIEKILTFRIPYYVGPLARGNSRFAWMTRKSEETITPWNFEEVVDKGASAQSFIERMTNFDKNLPNEKVLPKHSLLYEYFTVYNELTKVKYVTEGMRKPAFLSGEQKKAIVDLLFKTNRKVTVKQLKEDYFKKIECFDSVEISGVEDRFNASLGTYHDLLKIIKDKDFLDNEENEDILEDIVLTLTLFEDREMIEERLKTYAHLFDDKVMKQLKRRRYTGWGRLSRKLINGIRDKQSGKTILDFLKSDGFANRNFMQLIHDDSLTFKEDIQKAQVSGQGDSLHEHIANLAGSPAIKKGILQTVKVVDELVKVMGRHKPENIVIEMARENQTTQKGQKNSRERMKRIEEGIKELGSQILKEHPVENTQLQNEKLYLYYLQNGRDMYVDQELDINRLSDYDVDHIVPQSFLKDDSIDNKVLTRSDKARGKSDNVPSEEVVKKMKNYWRQLLNAKLITQRKFDNLTKAERGGLSELDKAGFIKRQLVETRQITKHVAQILDSRMNTKYDENDKLIREVKVITLKSKLVSDFRKDFQFYKVREINNYHHAHDAYLNAVVGTALIKKYPKLESEFVYGDYKVYDVRKMIAKSEQEIGKATAKYFFYSNIMNFFKTEITLANGEIRKRPLIETNGETGEIVWDKGRDFATVRKVLSMPQVNIVKKTEVQTGGFSKESILPKRNSDKLIARKKDWDPKKYGGFDSPTVAYSVLVVAKVEKGKSKKLKSVKELLGITIMERSSFEKNPIDFLEAKGYKEVKKDLIIKLPKYSLFELENGRKRMLASAGELQKGNELALPSKYVNFLYLASHYEKLKGSPEDNEQKQLFVEQHKHYLDEIIEQISEFSKRVILADANLDKVLSAYNKHRDKPIREQAENIIHLFTLTNLGAPAAFKYFDTTIDRKRYTSTKEVLDATLIHQSITGLYETRIDLSQLGGDGGGGSPAPEAAAKGGTLNIEDEYRLHETSKEPDVPLGSTWLSDFPQAWAETGGMGLAVRQAPLIIPLKATSTPVSIKQYPMSQEARLGIKPHIQRLLDQGILVPCQSPWNTPLLPVKKPGTNDYRPVQDLREVNKRVEDIHPTVPNPYNLLSGLPPSHQWYTVLDLKDAFFCLRLHPTSQPLFAFEWRDPEMGISGQLTWTRLPQGFKNSPTLFNEALHRDLADFRIQHPDLILLQYVDDLLLAATSEQDCQRGTRALLQTLGNLGYRASAKKAQICQKQVKYLGYLLKEGQRWLTEARKETVMGQPTPKTPRQLREFLGTAGFCRLWIPGFAEMAAPLYPLTKPGTLFNWGPDQQKAYQEIKQALLTAPALGLPDLTKPFELFVDEKQGYAKGVLTQKLGPWRRPVAYLSKKLDPVAAGWPPCLRMVAAIAVLTKDAGKLTMGQPLVILAPHAVEALVKQPPDRWLSNARMTHYQAMLLDTDRVQFGPVVALNPATLLPLPEKEAPHDCLEILAETHGTRPDLTDQPIPDADYTWYTDGSSFLQEGQRRAGAAVTTETEVIWARALPAGTSAQRAELIALTQALKMAEGKKLNVYTDSRYAFATAHVHGEIYRRRGWLTSEGREIKNKNEILALLKALFLPKRLSIIHCPGHQKGNSAEARGNRMADQAAREAAMKAVLETSTLLAGKRTADGSEFEKRTADGSEFESPKKKAKVE

SEQ ID NO: 969 - protein, 2094 aa, synthetic construct
MPAAKRVKLDGGDKKYSIGLDIGTNSVGWAVITDEYKVPSKKFKVLGNTDRHSIKKNLIGALLFDSGETAEATRLKRTARRRYTRRKNRICYLQEIFSNEMAKVDDSFFHRLEESFLVEEDKKHERHPIFGNIVDEVAYHEKYPTIYHLRKKLVDSTDKADLRLIYLALAHMIKFRGHFLIEGDLNPDNSDVDKLFIQLVQTYNQLFEENPINASGVDAKAILSARLSKSRRLENLIAQLPGEKKNGLFGNLIALSLGLTPNFKSNFDLAEDAKLQLSKDTYDDDLDNLLAQIGDQYADLFLAAKNLSDAILLSDILRVNTEITKAPLSASMIKRYDEHHQDLTLLKALVRQQLPEKYKEIFFDQSKNGYAGYIDGGASQEEFYKFIKPILEKMDGTEELLVKLNREDLLRKQRTFDNGSIPHQIHLGELHAILRRQEDFYPFLKDNREKIEKILTFRIPYYVGPLARGNSRFAWMTRKSEETITPWNFEEVVDKGASAQSFIERMTNFDKNLPNEKVLPKHSLLYEYFTVYNELTKVKYVTEGMRKPAFLSGEQKKAIVDLLFKTNRKVTVKQLKEDYFKKIECFDSVEISGVEDRFNASLGTYHDLLKIIKDKDFLDNEENEDILEDIVLTLTLFEDREMIEERLKTYAHLFDDKVMKQLKRRRYTGWGRLSRKLINGIRDKQSGKTILDFLKSDGFANRNFMQLIHDDSLTFKEDIQKAQVSGQGDSLHEHIANLAGSPAIKKGILQTVKVVDELVKVMGRHKPENIVIEMARENQTTQKGQKNSRERMKRIEEGIKELGSQILKEHPVENTQLQNEKLYLYYLQNGRDMYVDQELDINRLSDYDVDHIVPQSFLKDDSIDNKVLTRSDKARGKSDNVPSEEVVKKMKNYWRQLLNAKLITQRKFDNLTKAERGGLSELDKAGFIKRQLVETRQITKHVAQILDSRMNTKYDENDKLIREVKVITLKSKLVSDFRKDFQFYKVREINNYHHAHDAYLNAVVGTALIKKYPKLESEFVYGDYKVYDVRKMIAKSEQEIGKATAKYFFYSNIMNFFKTEITLANGEIRKRPLIETNGETGEIVWDKGRDFATVRKVLSMPQVNIVKKTEVQTGGFSKESILPKRNSDKLIARKKDWDPKKYGGFDSPTVAYSVLVVAKVEKGKSKKLKSVKELLGITIMERSSFEKNPIDFLEAKGYKEVKKDLIIKLPKYSLFELENGRKRMLASAGELQKGNELALPSKYVNFLYLASHYEKLKGSPEDNEQKQLFVEQHKHYLDEIIEQISEFSKRVILADANLDKVLSAYNKHRDKPIREQAENIIHLFTLTNLGAPAAFKYFDTTIDRKRYTSTKEVLDATLIHQSITGLYETRIDLSQLGGDGGGGGGSSPAPGGTLNIEDEYRLHETSKEPDVPLGSTWLSDFPQAWAETGGMGLAVRQAPLIIPLKATSTPVSIKQYPMSQEARLGIKPHIQRLLDQGILVPCQSPWNTPLLPVKKPGTNDYRPVQDLREVNKRVEDIHPTVPNPYNLLSGLPPSHQWYTVLDLKDAFFCLRLHPTSQPLFAFEWRDPEMGISGQLTWTRLPQGFKNSPTLFNEALHRDLADFRIQHPDLILLQYVDDLLLAATSEQDCQRGTRALLQTLGNLGYRASAKKAQICQKQVKYLGYLLKEGQRWLTEARKETVMGQPTPKTPRQLREFLGTAGFCRLWIPGFAEMAAPLYPLTKPGTLFNWGPDQQKAYQEIKQALLTAPALGLPDLTKPFELFVDEKQGYAKGVLTQKLGPWRRPVAYLSKKLDPVAAGWPPCLRMVAAIAVLTKDAGKLTMGQPLVILAPHAVEALVKQPPDRWLSNARMTHYQAMLLDTDRVQFGPVVALNPATLLPLPEKEAPHDCLEILAETHGTRPDLTDQPIPDADYTWYTDGSSFLQEGQRRAGAAVTTETEVIWARALPAGTSAQRAELIALTQALKMAEGKKLNVYTDSRYAFATAHVHGEIYRRRGWLTSEGREIKNKNEILALLKALFLPKRLSIIHCPGHQKGNSAEARGNRMADQAAREAAMKAVLETSTLLAGKRTADGSEFEKRTADGSEFESPKKKAKVE

SEQ ID NO: 970 - protein, 2094 aa, synthetic construct
MPAAKRVKLDGGDKKYSIGLDIGTNSVGWAVITDEYKVPSKKFKVLGNTDRHSIKKNLIGALLFDSGETAEATRLKRTARRRYTRRKNRICYLQEIFSNEMAKVDDSFFHRLEESFLVEEDKKHERHPIFGNIVDEVAYHEKYPTIYHLRKKLVDSTDKADLRLIYLALAHMIKFRGHFLIEGDLNPDNSDVDKLFIQLVQTYNQLFEENPINASGVDAKAILSARLSKSRRLENLIAQLPGEKKNGLFGNLIALSLGLTPNFKSNFDLAEDAKLQLSKDTYDDDLDNLLAQIGDQYADLFLAAKNLSDAILLSDILRVNTEITKAPLSASMIKRYDEHHQDLTLLKALVRQQLPEKYKEIFFDQSKNGYAGYIDGGASQEEFYKFIKPILEKMDGTEELLVKLNREDLLRKQRTFDNGSIPHQIHLGELHAILRRQEDFYPFLKDNREKIEKILTFRIPYYVGPLARGNSRFAWMTRKSEETITPWNFEEVVDKGASAQSFIERMTNFDKNLPNEKVLPKHSLLYEYFTVYNELTKVKYVTEGMRKPAFLSGEQKKAIVDLLFKTNRKVTVKQLKEDYFKKIECFDSVEISGVEDRFNASLGTYHDLLKIIKDKDFLDNEENEDILEDIVLTLTLFEDREMIEERLKTYAHLFDDKVMKQLKRRRYTGWGRLSRKLINGIRDKQSGKTILDFLKSDGFANRNFMQLIHDDSLTFKEDIQKAQVSGQGDSLHEHIANLAGSPAIKKGILQTVKVVDELVKVMGRHKPENIVIEMARENQTTQKGQKNSRERMKRIEEGIKELGSQILKEHPVENTQLQNEKLYLYYLQNGRDMYVDQELDINRLSDYDVDHIVPQSFLKDDSIDNKVLTRSDKARGKSDNVPSEEVVKKMKNYWRQLLNAKLITQRKFDNLTKAERGGLSELDKAGFIKRQLVETRQITKHVAQILDSRMNTKYDENDKLIREVKVITLKSKLVSDFRKDFQFYKVREINNYHHAHDAYLNAVVGTALIKKYPKLESEFVYGDYKVYDVRKMIAKSEQEIGKATAKYFFYSNIMNFFKTEITLANGEIRKRPLIETNGETGEIVWDKGRDFATVRKVLSMPQVNIVKKTEVQTGGFSKESILPKRNSDKLIARKKDWDPKKYGGFDSPTVAYSVLVVAKVEKGKSKKLKSVKELLGITIMERSSFEKNPIDFLEAKGYKEVKKDLIIKLPKYSLFELENGRKRMLASAGELQKGNELALPSKYVNFLYLASHYEKLKGSPEDNEQKQLFVEQHKHYLDEIIEQISEFSKRVILADANLDKVLSAYNKHRDKPIREQAENIIHLFTLTNLGAPAAFKYFDTTIDRKRYTSTKEVLDATLIHQSITGLYETRIDLSQLGGDGGPAPGSSGGSGGTLNIEDEYRLHETSKEPDVPLGSTWLSDFPQAWAETGGMGLAVRQAPLIIPLKATSTPVSIKQYPMSQEARLGIKPHIQRLLDQGILVPCQSPWNTPLLPVKKPGTNDYRPVQDLREVNKRVEDIHPTVPNPYNLLSGLPPSHQWYTVLDLKDAFFCLRLHPTSQPLFAFEWRDPEMGISGQLTWTRLPQGFKNSPTLFNEALHRDLADFRIQHPDLILLQYVDDLLLAATSEQDCQRGTRALLQTLGNLGYRASAKKAQICQKQVKYLGYLLKEGQRWLTEARKETVMGQPTPKTPRQLREFLGTAGFCRLWIPGFAEMAAPLYPLTKPGTLFNWGPDQQKAYQEIKQALLTAPALGLPDLTKPFELFVDEKQGYAKGVLTQKLGPWRRPVAYLSKKLDPVAAGWPPCLRMVAAIAVLTKDAGKLTMGQPLVILAPHAVEALVKQPPDRWLSNARMTHYQAMLLDTDRVQFGPVVALNPATLLPLPEKEAPHDCLEILAETHGTRPDLTDQPIPDADYTWYTDGSSFLQEGQRRAGAAVTTETEVIWARALPAGTSAQRAELIALTQALKMAEGKKLNVYTDSRYAFATAHVHGEIYRRRGWLTSEGREIKNKNEILALLKALFLPKRLSIIHCPGHQKGNSAEARGNRMADQAAREAAMKAVLETSTLLAGKRTADGSEFEKRTADGSEFESPKKKAKVE

SEQ ID NO: 971 - protein, 2096 aa, synthetic construct
MPAAKRVKLDGGDKKYSIGLDIGTNSVGWAVITDEYKVPSKKFKVLGNTDRHSIKKNLIGALLFDSGETAEATRLKRTARRRYTRRKNRICYLQEIFSNEMAKVDDSFFHRLEESFLVEEDKKHERHPIFGNIVDEVAYHEKYPTIYHLRKKLVDSTDKADLRLIYLALAHMIKFRGHFLIEGDLNPDNSDVDKLFIQLVQTYNQLFEENPINASGVDAKAILSARLSKSRRLENLIAQLPGEKKNGLFGNLIALSLGLTPNFKSNFDLAEDAKLQLSKDTYDDDLDNLLAQIGDQYADLFLAAKNLSDAILLSDILRVNTEITKAPLSASMIKRYDEHHQDLTLLKALVRQQLPEKYKEIFFDQSKNGYAGYIDGGASQEEFYKFIKPILEKMDGTEELLVKLNREDLLRKQRTFDNGSIPHQIHLGELHAILRRQEDFYPFLKDNREKIEKILTFRIPYYVGPLARGNSRFAWMTRKSEETITPWNFEEVVDKGASAQSFIERMTNFDKNLPNEKVLPKHSLLYEYFTVYNELTKVKYVTEGMRKPAFLSGEQKKAIVDLLFKTNRKVTVKQLKEDYFKKIECFDSVEISGVEDRFNASLGTYHDLLKIIKDKDFLDNEENEDILEDIVLTLTLFEDREMIEERLKTYAHLFDDKVMKQLKRRRYTGWGRLSRKLINGIRDKQSGKTILDFLKSDGFANRNFMQLIHDDSLTFKEDIQKAQVSGQGDSLHEHIANLAGSPAIKKGILQTVKVVDELVKVMGRHKPENIVIEMARENQTTQKGQKNSRERMKRIEEGIKELGSQILKEHPVENTQLQNEKLYLYYLQNGRDMYVDQELDINRLSDYDVDHIVPQSFLKDDSIDNKVLTRSDKARGKSDNVPSEEVVKKMKNYWRQLLNAKLITQRKFDNLTKAERGGLSELDKAGFIKRQLVETRQITKHVAQILDSRMNTKYDENDKLIREVKVITLKSKLVSDFRKDFQFYKVREINNYHHAHDAYLNAVVGTALIKKYPKLESEFVYGDYKVYDVRKMIAKSEQEIGKATAKYFFYSNIMNFFKTEITLANGEIRKRPLIETNGETGEIVWDKGRDFATVRKVLSMPQVNIVKKTEVQTGGFSKESILPKRNSDKLIARKKDWDPKKYGGFDSPTVAYSVLVVAKVEKGKSKKLKSVKELLGITIMERSSFEKNPIDFLEAKGYKEVKKDLIIKLPKYSLFELENGRKRMLASAGELQKGNELALPSKYVNFLYLASHYEKLKGSPEDNEQKQLFVEQHKHYLDEIIEQISEFSKRVILADANLDKVLSAYNKHRDKPIREQAENIIHLFTLTNLGAPAAFKYFDTTIDRKRYTSTKEVLDATLIHQSITGLYETRIDLSQLGGDGGGSSGGGEAAAKGGTLNIEDEYRLHETSKEPDVPLGSTWLSDFPQAWAETGGMGLAVRQAPLIIPLKATSTPVSIKQYPMSQEARLGIKPHIQRLLDQGILVPCQSPWNTPLLPVKKPGTNDYRPVQDLREVNKRVEDIHPTVPNPYNLLSGLPPSHQWYTVLDLKDAFFCLRLHPTSQPLFAFEWRDPEMGISGQLTWTRLPQGFKNSPTLFNEALHRDLADFRIQHPDLILLQYVDDLLLAATSEQDCQRGTRALLQTLGNLGYRASAKKAQICQKQVKYLGYLLKEGQRWLTEARKETVMGQPTPKTPRQLREFLGTAGFCRLWIPGFAEMAAPLYPLTKPGTLFNWGPDQQKAYQEIKQALLTAPALGLPDLTKPFELFVDEKQGYAKGVLTQKLGPWRRPVAYLSKKLDPVAAGWPPCLRMVAAIAVLTKDAGKLTMGQPLVILAPHAVEALVKQPPDRWLSNARMTHYQAMLLDTDRVQFGPVVALNPATLLPLPEKEAPHDCLEILAETHGTRPDLTDQPIPDADYTWYTDGSSFLQEGQRRAGAAVTTETEVIWARALPAGTSAQRAELIALTQALKMAEGKKLNVYTDSRYAFATAHVHGEIYRRRGWLTSEGREIKNKNEILALLKALFLPKRLSIIHCPGHQKGNSAEARGNRMADQAAREAAMKAVLETSTLLAGKRTADGSEFEKRTADGSEFESPKKKAKVE

SEQ ID NO: 972 - protein, 2100 aa, synthetic construct
MPAAKRVKLDGGDKKYSIGLDIGTNSVGWAVITDEYKVPSKKFKVLGNTDRHSIKKNLIGALLFDSGETAEATRLKRTARRRYTRRKNRICYLQEIFSNEMAKVDDSFFHRLEESFLVEEDKKHERHPIFGNIVDEVAYHEKYPTIYHLRKKLVDSTDKADLRLIYLALAHMIKFRGHFLIEGDLNPDNSDVDKLFIQLVQTYNQLFEENPINASGVDAKAILSARLSKSRRLENLIAQLPGEKKNGLFGNLIALSLGLTPNFKSNFDLAEDAKLQLSKDTYDDDLDNLLAQIGDQYADLFLAAKNLSDAILLSDILRVNTEITKAPLSASMIKRYDEHHQDLTLLKALVRQQLPEKYKEIFFDQSKNGYAGYIDGGASQEEFYKFIKPILEKMDGTEELLVKLNREDLLRKQRTFDNGSIPHQIHLGELHAILRRQEDFYPFLKDNREKIEKILTFRIPYYVGPLARGNSRFAWMTRKSEETITPWNFEEVVDKGASAQSFIERMTNFDKNLPNEKVLPKHSLLYEYFTVYNELTKVKYVTEGMRKPAFLSGEQKKAIVDLLFKTNRKVTVKQLKEDYFKKIECFDSVEISGVEDRFNASLGTYHDLLKIIKDKDFLDNEENEDILEDIVLTLTLFEDREMIEERLKTYAHLFDDKVMKQLKRRRYTGWGRLSRKLINGIRDKQSGKTILDFLKSDGFANRNFMQLIHDDSLTFKEDIQKAQVSGQGDSLHEHIANLAGSPAIKKGILQTVKVVDELVKVMGRHKPENIVIEMARENQTTQKGQKNSRERMKRIEEGIKELGSQILKEHPVENTQLQNEKLYLYYLQNGRDMYVDQELDINRLSDYDVDHIVPQSFLKDDSIDNKVLTRSDKARGKSDNVPSEEVVKKMKNYWRQLLNAKLITQRKFDNLTKAERGGLSELDKAGFIKRQLVETRQITKHVAQILDSRMNTKYDENDKLIREVKVITLKSKLVSDFRKDFQFYKVREINNYHHAHDAYLNAVVGTALIKKYPKLESEFVYGDYKVYDVRKMIAKSEQEIGKATAKYFFYSNIMNFFKTEITLANGEIRKRPLIETNGETGEIVWDKGRDFATVRKVLSMPQVNIVKKTEVQTGGFSKESILPKRNSDKLIARKKDWDPKKYGGFDSPTVAYSVLVVAKVEKGKSKKLKSVKELLGITIMERSSFEKNPIDFLEAKGYKEVKKDLIIKLPKYSLFELENGRKRMLASAGELQKGNELALPSKYVNFLYLASHYEKLKGSPEDNEQKQLFVEQHKHYLDEIIEQISEFSKRVILADANLDKVLSAYNKHRDKPIREQAENIIHLFTLTNLGAPAAFKYFDTTIDRKRYTSTKEVLDATLIHQSITGLYETRIDLSQLGGDGGGGGGSEAAAKGGGGSGGTLNIEDEYRLHETSKEPDVPLGSTWLSDFPQAWAETGGMGLAVRQAPLIIPLKATSTPVSIKQYPMSQEARLGIKPHIQRLLDQGILVPCQSPWNTPLLPVKKPGTNDYRPVQDLREVNKRVEDIHPTVPNPYNLLSGLPPSHQWYTVLDLKDAFFCLRLHPTSQPLFAFEWRDPEMGISGQLTWTRLPQGFKNSPTLFNEALHRDLADFRIQHPDLILLQYVDDLLLAATSEQDCQRGTRALLQTLGNLGYRASAKKAQICQKQVKYLGYLLKEGQRWLTEARKETVMGQPTPKTPRQLREFLGTAGFCRLWIPGFAEMAAPLYPLTKPGTLFNWGPDQQKAYQEIKQALLTAPALGLPDLTKPFELFVDEKQGYAKGVLTQKLGPWRRPVAYLSKKLDPVAAGWPPCLRMVAAIAVLTKDAGKLTMGQPLVILAPHAVEALVKQPPDRWLSNARMTHYQAMLLDTDRVQFGPVVALNPATLLPLPEKEAPHDCLEILAETHGTRPDLTDQPIPDADYTWYTDGSSFLQEGQRRAGAAVTTETEVIWARALPAGTSAQRAELIALTQALKMAEGKKLNVYTDSRYAFATAHVHGEIYRRRGWLTSEGREIKNKNEILALLKALFLPKRLSIIHCPGHQKGNSAEARGNRMADQAAREAAMKAVLETSTLLAGKRTADGSEFEKRTADGSEFESPKKKAKVE

SEQ ID NO: 973 - protein, 2096 aa, synthetic construct
MPAAKRVKLDGGDKKYSIGLDIGTNSVGWAVITDEYKVPSKKFKVLGNTDRHSIKKNLIGALLFDSGETAEATRLKRTARRRYTRRKNRICYLQEIFSNEMAKVDDSFFHRLEESFLVEEDKKHERHPIFGNIVDEVAYHEKYPTIYHLRKKLVDSTDKADLRLIYLALAHMIKFRGHFLIEGDLNPDNSDVDKLFIQLVQTYNQLFEENPINASGVDAKAILSARLSKSRRLENLIAQLPGEKKNGLFGNLIALSLGLTPNFKSNFDLAEDAKLQLSKDTYDDDLDNLLAQIGDQYADLFLAAKNLSDAILLSDILRVNTEITKAPLSASMIKRYDEHHQDLTLLKALVRQQLPEKYKEIFFDQSKNGYAGYIDGGASQEEFYKFIKPILEKMDGTEELLVKLNREDLLRKQRTFDNGSIPHQIHLGELHAILRRQEDFYPFLKDNREKIEKILTFRIPYYVGPLARGNSRFAWMTRKSEETITPWNFEEVVDKGASAQSFIERMTNFDKNLPNEKVLPKHSLLYEYFTVYNELTKVKYVTEGMRKPAFLSGEQKKAIVDLLFKTNRKVTVKQLKEDYFKKIECFDSVEISGVEDRFNASLGTYHDLLKIIKDKDFLDNEENEDILEDIVLTLTLFEDREMIEERLKTYAHLFDDKVMKQLKRRRYTGWGRLSRKLINGIRDKQSGKTILDFLKSDGFANRNFMQLIHDDSLTFKEDIQKAQVSGQGDSLHEHIANLAGSPAIKKGILQTVKVVDELVKVMGRHKPENIVIEMARENQTTQKGQKNSRERMKRIEEGIKELGSQILKEHPVENTQLQNEKLYLYYLQNGRDMYVDQELDINRLSDYDVDHIVPQSFLKDDSIDNKVLTRSDKARGKSDNVPSEEVVKKMKNYWRQLLNAKLITQRKFDNLTKAERGGLSELDKAGFIKRQLVETRQITKHVAQILDSRMNTKYDENDKLIREVKVITLKSKLVSDFRKDFQFYKVREINNYHHAHDAYLNAVVGTALIKKYPKLESEFVYGDYKVYDVRKMIAKSEQEIGKATAKYFFYSNIMNFFKTEITLANGEIRKRPLIETNGETGEIVWDKGRDFATVRKVLSMPQVNIVKKTEVQTGGFSKESILPKRNSDKLIARKKDWDPKKYGGFDSPTVAYSVLVVAKVEKGKSKKLKSVKELLGITIMERSSFEKNPIDFLEAKGYKEVKKDLIIKLPKYSLFELENGRKRMLASAGELQKGNELALPSKYVNFLYLASHYEKLKGSPEDNEQKQLFVEQHKHYLDEIIEQISEFSKRVILADANLDKVLSAYNKHRDKPIREQAENIIHLFTLTNLGAPAAFKYFDTTIDRKRYTSTKEVLDATLIHQSITGLYETRIDLSQLGGDGGGGGGGSEAAAKGGTLNIEDEYRLHETSKEPDVPLGSTWLSDFPQAWAETGGMGLAVRQAPLIIPLKATSTPVSIKQYPMSQEARLGIKPHIQRLLDQGILVPCQSPWNTPLLPVKKPGTNDYRPVQDLREVNKRVEDIHPTVPNPYNLLSGLPPSHQWYTVLDLKDAFFCLRLHPTSQPLFAFEWRDPEMGISGQLTWTRLPQGFKNSPTLFNEALHRDLADFRIQHPDLILLQYVDDLLLAATSEQDCQRGTRALLQTLGNLGYRASAKKAQICQKQVKYLGYLLKEGQRWLTEARKETVMGQPTPKTPRQLREFLGTAGFCRLWIPGFAEMAAPLYPLTKPGTLFNWGPDQQKAYQEIKQALLTAPALGLPDLTKPFELFVDEKQGYAKGVLTQKLGPWRRPVAYLSKKLDPVAAGWPPCLRMVAAIAVLTKDAGKLTMGQPLVILAPHAVEALVKQPPDRWLSNARMTHYQAMLLDTDRVQFGPVVALNPATLLPLPEKEAPHDCLEILAETHGTRPDLTDQPIPDADYTWYTDGSSFLQEGQRRAGAAVTTETEVIWARALPAGTSAQRAELIALTQALKMAEGKKLNVYTDSRYAFATAHVHGEIYRRRGWLTSEGREIKNKNEILALLKALFLPKRLSIIHCPGHQKGNSAEARGNRMADQAAREAAMKAVLETSTLLAGKRTADGSEFEKRTADGSEFESPKKKAKVE

SEQ ID NO: 974 - protein, 2091 aa, synthetic construct
MPAAKRVKLDGGDKKYSIGLDIGTNSVGWAVITDEYKVPSKKFKVLGNTDRHSIKKNLIGALLFDSGETAEATRLKRTARRRYTRRKNRICYLQEIFSNEMAKVDDSFFHRLEESFLVEEDKKHERHPIFGNIVDEVAYHEKYPTIYHLRKKLVDSTDKADLRLIYLALAHMIKFRGHFLIEGDLNPDNSDVDKLFIQLVQTYNQLFEENPINASGVDAKAILSARLSKSRRLENLIAQLPGEKKNGLFGNLIALSLGLTPNFKSNFDLAEDAKLQLSKDTYDDDLDNLLAQIGDQYADLFLAAKNLSDAILLSDILRVNTEITKAPLSASMIKRYDEHHQDLTLLKALVRQQLPEKYKEIFFDQSKNGYAGYIDGGASQEEFYKFIKPILEKMDGTEELLVKLNREDLLRKQRTFDNGSIPHQIHLGELHAILRRQEDFYPFLKDNREKIEKILTFRIPYYVGPLARGNSRFAWMTRKSEETITPWNFEEVVDKGASAQSFIERMTNFDKNLPNEKVLPKHSLLYEYFTVYNELTKVKYVTEGMRKPAFLSGEQKKAIVDLLFKTNRKVTVKQLKEDYFKKIECFDSVEISGVEDRFNASLGTYHDLLKIIKDKDFLDNEENEDILEDIVLTLTLFEDREMIEERLKTYAHLFDDKVMKQLKRRRYTGWGRLSRKLINGIRDKQSGKTILDFLKSDGFANRNFMQLIHDDSLTFKEDIQKAQVSGQGDSLHEHIANLAGSPAIKKGILQTVKVVDELVKVMGRHKPENIVIEMARENQTTQKGQKNSRERMKRIEEGIKELGSQILKEHPVENTQLQNEKLYLYYLQNGRDMYVDQELDINRLSDYDVDHIVPQSFLKDDSIDNKVLTRSDKARGKSDNVPSEEVVKKMKNYWRQLLNAKLITQRKFDNLTKAERGGLSELDKAGFIKRQLVETRQITKHVAQILDSRMNTKYDENDKLIREVKVITLKSKLVSDFRKDFQFYKVREINNYHHAHDAYLNAVVGTALIKKYPKLESEFVYGDYKVYDVRKMIAKSEQEIGKATAKYFFYSNIMNFFKTEITLANGEIRKRPLIETNGETGEIVWDKGRDFATVRKVLSMPQVNIVKKTEVQTGGFSKESILPKRNSDKLIARKKDWDPKKYGGFDSPTVAYSVLVVAKVEKGKSKKLKSVKELLGITIMERSSFEKNPIDFLEAKGYKEVKKDLIIKLPKYSLFELENGRKRMLASAGELQKGNELALPSKYVNFLYLASHYEKLKGSPEDNEQKQLFVEQHKHYLDEIIEQISEFSKRVILADANLDKVLSAYNKHRDKPIREQAENIIHLFTLTNLGAPAAFKYFDTTIDRKRYTSTKEVLDATLIHQSITGLYETRIDLSQLGGDGGGGGGGSGGTLNIEDEYRLHETSKEPDVPLGSTWLSDFPQAWAETGGMGLAVRQAPLIIPLKATSTPVSIKQYPMSQEARLGIKPHIQRLLDQGILVPCQSPWNTPLLPVKKPGTNDYRPVQDLREVNKRVEDIHPTVPNPYNLLSGLPPSHQWYTVLDLKDAFFCLRLHPTSQPLFAFEWRDPEMGISGQLTWTRLPQGFKNSPTLFNEALHRDLADFRIQHPDLILLQYVDDLLLAATSEQDCQRGTRALLQTLGNLGYRASAKKAQICQKQVKYLGYLLKEGQRWLTEARKETVMGQPTPKTPRQLREFLGTAGFCRLWIPGFAEMAAPLYPLTKPGTLFNWGPDQQKAYQEIKQALLTAPALGLPDLTKPFELFVDEKQGYAKGVLTQKLGPWRRPVAYLSKKLDPVAAGWPPCLRMVAAIAVLTKDAGKLTMGQPLVILAPHAVEALVKQPPDRWLSNARMTHYQAMLLDTDRVQFGPVVALNPATLLPLPEKEAPHDCLEILAETHGTRPDLTDQPIPDADYTWYTDGSSFLQEGQRRAGAAVTTETEVIWARALPAGTSAQRAELIALTQALKMAEGKKLNVYTDSRYAFATAHVHGEIYRRRGWLTSEGREIKNKNEILALLKALFLPKRLSIIHCPGHQKGNSAEARGNRMADQAAREAAMKAVLETSTLLAGKRTADGSEFEKRTADGSEFESPKKKAKVE

SEQ ID NO: 975 - protein, 2096 aa, synthetic construct
MPAAKRVKLDGGDKKYSIGLDIGTNSVGWAVITDEYKVPSKKFKVLGNTDRHSIKKNLIGALLFDSGETAEATRLKRTARRRYTRRKNRICYLQEIFSNEMAKVDDSFFHRLEESFLVEEDKKHERHPIFGNIVDEVAYHEKYPTIYHLRKKLVDSTDKADLRLIYLALAHMIKFRGHFLIEGDLNPDNSDVDKLFIQLVQTYNQLFEENPINASGVDAKAILSARLSKSRRLENLIAQLPGEKKNGLFGNLIALSLGLTPNFKSNFDLAEDAKLQLSKDTYDDDLDNLLAQIGDQYADLFLAAKNLSDAILLSDILRVNTEITKAPLSASMIKRYDEHHQDLTLLKALVRQQLPEKYKEIFFDQSKNGYAGYIDGGASQEEFYKFIKPILEKMDGTEELLVKLNREDLLRKQRTFDNGSIPHQIHLGELHAILRRQEDFYPFLKDNREKIEKILTFRIPYYVGPLARGNSRFAWMTRKSEETITPWNFEEVVDKGASAQSFIERMTNFDKNLPNEKVLPKHSLLYEYFTVYNELTKVKYVTEGMRKPAFLSGEQKKAIVDLLFKTNRKVTVKQLKEDYFKKIECFDSVEISGVEDRFNASLGTYHDLLKIIKDKDFLDNEENEDILEDIVLTLTLFEDREMIEERLKTYAHLFDDKVMKQLKRRRYTGWGRLSRKLINGIRDKQSGKTILDFLKSDGFANRNFMQLIHDDSLTFKEDIQKAQVSGQGDSLHEHIANLAGSPAIKKGILQTVKVVDELVKVMGRHKPENIVIEMARENQTTQKGQKNSRERMKRIEEGIKELGSQILKEHPVENTQLQNEKLYLYYLQNGRDMYVDQELDINRLSDYDVDHIVPQSFLKDDSIDNKVLTRSDKARGKSDNVPSEEVVKKMKNYWRQLLNAKLITQRKFDNLTKAERGGLSELDKAGFIKRQLVETRQITKHVAQILDSRMNTKYDENDKLIREVKVITLKSKLVSDFRKDFQFYKVREINNYHHAHDAYLNAVVGTALIKKYPKLESEFVYGDYKVYDVRKMIAKSEQEIGKATAKYFFYSNIMNFFKTEITLANGEIRKRPLIETNGETGEIVWDKGRDFATVRKVLSMPQVNIVKKTEVQTGGFSKESILPKRNSDKLIARKKDWDPKKYGGFDSPTVAYSVLVVAKVEKGKSKKLKSVKELLGITIMERSSFEKNPIDFLEAKGYKEVKKDLIIKLPKYSLFELENGRKRMLASAGELQKGNELALPSKYVNFLYLASHYEKLKGSPEDNEQKQLFVEQHKHYLDEIIEQISEFSKRVILADANLDKVLSAYNKHRDKPIREQAENIIHLFTLTNLGAPAAFKYFDTTIDRKRYTSTKEVLDATLIHQSITGLYETRIDLSQLGGDGGGSSGGSEAAAKGGTLNIEDEYRLHETSKEPDVPLGSTWLSDFPQAWAETGGMGLAVRQAPLIIPLKATSTPVSIKQYPMSQEARLGIKPHIQRLLDQGILVPCQSPWNTPLLPVKKPGTNDYRPVQDLREVNKRVEDIHPTVPNPYNLLSGLPPSHQWYTVLDLKDAFFCLRLHPTSQPLFAFEWRDPEMGISGQLTWTRLPQGFKNSPTLFNEALHRDLADFRIQHPDLILLQYVDDLLLAATSEQDCQRGTRALLQTLGNLGYRASAKKAQICQKQVKYLGYLLKEGQRWLTEARKETVMGQPTPKTPRQLREFLGTAGFCRLWIPGFAEMAAPLYPLTKPGTLFNWGPDQQKAYQEIKQALLTAPALGLPDLTKPFELFVDEKQGYAKGVLTQKLGPWRRPVAYLSKKLDPVAAGWPPCLRMVAAIAVLTKDAGKLTMGQPLVILAPHAVEALVKQPPDRWLSNARMTHYQAMLLDTDRVQFGPVVALNPATLLPLPEKEAPHDCLEILAETHGTRPDLTDQPIPDADYTWYTDGSSFLQEGQRRAGAAVTTETEVIWARALPAGTSAQRAELIALTQALKMAEGKKLNVYTDSRYAFATAHVHGEIYRRRGWLTSEGREIKNKNEILALLKALFLPKRLSIIHCPGHQKGNSAEARGNRMADQAAREAAMKAVLETSTLLAGKRTADGSEFEKRTADGSEFESPKKKAKVE

SEQ ID NO: 976 - protein, 2115 aa, synthetic construct
MPAAKRVKLDGGDKKYSIGLDIGTNSVGWAVITDEYKVPSKKFKVLGNTDRHSIKKNLIGALLFDSGETAEATRLKRTARRRYTRRKNRICYLQEIFSNEMAKVDDSFFHRLEESFLVEEDKKHERHPIFGNIVDEVAYHEKYPTIYHLRKKLVDSTDKADLRLIYLALAHMIKFRGHFLIEGDLNPDNSDVDKLFIQLVQTYNQLFEENPINASGVDAKAILSARLSKSRRLENLIAQLPGEKKNGLFGNLIALSLGLTPNFKSNFDLAEDAKLQLSKDTYDDDLDNLLAQIGDQYADLFLAAKNLSDAILLSDILRVNTEITKAPLSASMIKRYDEHHQDLTLLKALVRQQLPEKYKEIFFDQSKNGYAGYIDGGASQEEFYKFIKPILEKMDGTEELLVKLNREDLLRKQRTFDNGSIPHQIHLGELHAILRRQEDFYPFLKDNREKIEKILTFRIPYYVGPLARGNSRFAWMTRKSEETITPWNFEEVVDKGASAQSFIERMTNFDKNLPNEKVLPKHSLLYEYFTVYNELTKVKYVTEGMRKPAFLSGEQKKAIVDLLFKTNRKVTVKQLKEDYFKKIECFDSVEISGVEDRFNASLGTYHDLLKIIKDKDFLDNEENEDILEDIVLTLTLFEDREMIEERLKTYAHLFDDKVMKQLKRRRYTGWGRLSRKLINGIRDKQSGKTILDFLKSDGFANRNFMQLIHDDSLTFKEDIQKAQVSGQGDSLHEHIANLAGSPAIKKGILQTVKVVDELVKVMGRHKPENIVIEMARENQTTQKGQKNSRERMKRIEEGIKELGSQILKEHPVENTQLQNEKLYLYYLQNGRDMYVDQELDINRLSDYDVDHIVPQSFLKDDSIDNKVLTRSDKARGKSDNVPSEEVVKKMKNYWRQLLNAKLITQRKFDNLTKAERGGLSELDKAGFIKRQLVETRQITKHVAQILDSRMNTKYDENDKLIREVKVITLKSKLVSDFRKDFQFYKVREINNYHHAHDAYLNAVVGTALIKKYPKLESEFVYGDYKVYDVRKMIAKSEQEIGKATAKYFFYSNIMNFFKTEITLANGEIRKRPLIETNGETGEIVWDKGRDFATVRKVLSMPQVNIVKKTEVQTGGFSKESILPKRNSDKLIARKKDWDPKKYGGFDSPTVAYSVLVVAKVEKGKSKKLKSVKELLGITIMERSSFEKNPIDFLEAKGYKEVKKDLIIKLPKYSLFELENGRKRMLASAGELQKGNELALPSKYVNFLYLASHYEKLKGSPEDNEQKQLFVEQHKHYLDEIIEQISEFSKRVILADANLDKVLSAYNKHRDKPIREQAENIIHLFTLTNLGAPAAFKYFDTTIDRKRYTSTKEVLDATLIHQSITGLYETRIDLSQLGGDGGGGGGSGGGGSGGGGSGGGGSGGGGSGGGGSGGTLNIEDEYRLHETSKEPDVPLGSTWLSDFPQAWAETGGMGLAVRQAPLIIPLKATSTPVSIKQYPMSQEARLGIKPHIQRLLDQGILVPCQSPWNTPLLPVKKPGTNDYRPVQDLREVNKRVEDIHPTVPNPYNLLSGLPPSHQWYTVLDLKDAFFCLRLHPTSQPLFAFEWRDPEMGISGQLTWTRLPQGFKNSPTLFNEALHRDLADFRIQHPDLILLQYVDDLLLAATSEQDCQRGTRALLQTLGNLGYRASAKKAQICQKQVKYLGYLLKEGQRWLTEARKETVMGQPTPKTPRQLREFLGTAGFCRLWIPGFAEMAAPLYPLTKPGTLFNWGPDQQKAYQEIKQALLTAPALGLPDLTKPFELFVDEKQGYAKGVLTQKLGPWRRPVAYLSKKLDPVAAGWPPCLRMVAAIAVLTKDAGKLTMGQPLVILAPHAVEALVKQPPDRWLSNARMTHYQAMLLDTDRVQFGPVVALNPATLLPLPEKEAPHDCLEILAETHGTRPDLTDQPIPDADYTWYTDGSSFLQEGQRRAGAAVTTETEVIWARALPAGTSAQRAELIALTQALKMAEGKKLNVYTDSRYAFATAHVHGEIYRRRGWLTSEGREIKNKNEILALLKALFLPKRLSIIHCPGHQKGNSAEARGNRMADQAAREAAMKAVLETSTLLAGKRTADGSEFEKRTADGSEFESPKKKAKVE

SEQ ID NO: 977 - protein, 2105 aa, synthetic construct
MPAAKRVKLDGGDKKYSIGLDIGTNSVGWAVITDEYKVPSKKFKVLGNTDRHSIKKNLIGALLFDSGETAEATRLKRTARRRYTRRKNRICYLQEIFSNEMAKVDDSFFHRLEESFLVEEDKKHERHPIFGNIVDEVAYHEKYPTIYHLRKKLVDSTDKADLRLIYLALAHMIKFRGHFLIEGDLNPDNSDVDKLFIQLVQTYNQLFEENPINASGVDAKAILSARLSKSRRLENLIAQLPGEKKNGLFGNLIALSLGLTPNFKSNFDLAEDAKLQLSKDTYDDDLDNLLAQIGDQYADLFLAAKNLSDAILLSDILRVNTEITKAPLSASMIKRYDEHHQDLTLLKALVRQQLPEKYKEIFFDQSKNGYAGYIDGGASQEEFYKFIKPILEKMDGTEELLVKLNREDLLRKQRTFDNGSIPHQIHLGELHAILRRQEDFYPFLKDNREKIEKILTFRIPYYVGPLARGNSRFAWMTRKSEETITPWNFEEVVDKGASAQSFIERMTNFDKNLPNEKVLPKHSLLYEYFTVYNELTKVKYVTEGMRKPAFLSGEQKKAIVDLLFKTNRKVTVKQLKEDYFKKIECFDSVEISGVEDRFNASLGTYHDLLKIIKDKDFLDNEENEDILEDIVLTLTLFEDREMIEERLKTYAHLFDDKVMKQLKRRRYTGWGRLSRKLINGIRDKQSGKTILDFLKSDGFANRNFMQLIHDDSLTFKEDIQKAQVSGQGDSLHEHIANLAGSPAIKKGILQTVKVVDELVKVMGRHKPENIVIEMARENQTTQKGQKNSRERMKRIEEGIKELGSQILKEHPVENTQLQNEKLYLYYLQNGRDMYVDQELDINRLSDYDVDHIVPQSFLKDDSIDNKVLTRSDKARGKSDNVPSEEVVKKMKNYWRQLLNAKLITQRKFDNLTKAERGGLSELDKAGFIKRQLVETRQITKHVAQILDSRMNTKYDENDKLIREVKVITLKSKLVSDFRKDFQFYKVREINNYHHAHDAYLNAVVGTALIKKYPKLESEFVYGDYKVYDVRKMIAKSEQEIGKATAKYFFYSNIMNFFKTEITLANGEIRKRPLIETNGETGEIVWDKGRDFATVRKVLSMPQVNIVKKTEVQTGGFSKESILPKRNSDKLIARKKDWDPKKYGGFDSPTVAYSVLVVAKVEKGKSKKLKSVKELLGITIMERSSFEKNPIDFLEAKGYKEVKKDLIIKLPKYSLFELENGRKRMLASAGELQKGNELALPSKYVNFLYLASHYEKLKGSPEDNEQKQLFVEQHKHYLDEIIEQISEFSKRVILADANLDKVLSAYNKHRDKPIREQAENIIHLFTLTNLGAPAAFKYFDTTIDRKRYTSTKEVLDATLIHQSITGLYETRIDLSQLGGDGGGGGGSGGGGSGGGGSGGGGSGGTLNIEDEYRLHETSKEPDVPLGSTWLSDFPQAWAETGGMGLAVRQAPLIIPLKATSTPVSIKQYPMSQEARLGIKPHIQRLLDQGILVPCQSPWNTPLLPVKKPGTNDYRPVQDLREVNKRVEDIHPTVPNPYNLLSGLPPSHQWYTVLDLKDAFFCLRLHPTSQPLFAFEWRDPEMGISGQLTWTRLPQGFKNSPTLFNEALHRDLADFRIQHPDLILLQYVDDLLLAATSEQDCQRGTRALLQTLGNLGYRASAKKAQICQKQVKYLGYLLKEGQRWLTEARKETVMGQPTPKTPRQLREFLGTAGFCRLWIPGFAEMAAPLYPLTKPGTLFNWGPDQQKAYQEIKQALLTAPALGLPDLTKPFELFVDEKQGYAKGVLTQKLGPWRRPVAYLSKKLDPVAAGWPPCLRMVAAIAVLTKDAGKLTMGQPLVILAPHAVEALVKQPPDRWLSNARMTHYQAMLLDTDRVQFGPVVALNPATLLPLPEKEAPHDCLEILAETHGTRPDLTDQPIPDADYTWYTDGSSFLQEGQRRAGAAVTTETEVIWARALPAGTSAQRAELIALTQALKMAEGKKLNVYTDSRYAFATAHVHGEIYRRRGWLTSEGREIKNKNEILALLKALFLPKRLSIIHCPGHQKGNSAEARGNRMADQAAREAAMKAVLETSTLLAGKRTADGSEFEKRTADGSEFESPKKKAKVE

SEQ ID NO: 978 - protein, 2094 aa, synthetic construct
MPAAKRVKLDGGDKKYSIGLDIGTNSVGWAVITDEYKVPSKKFKVLGNTDRHSIKKNLIGALLFDSGETAEATRLKRTARRRYTRRKNRICYLQEIFSNEMAKVDDSFFHRLEESFLVEEDKKHERHPIFGNIVDEVAYHEKYPTIYHLRKKLVDSTDKADLRLIYLALAHMIKFRGHFLIEGDLNPDNSDVDKLFIQLVQTYNQLFEENPINASGVDAKAILSARLSKSRRLENLIAQLPGEKKNGLFGNLIALSLGLTPNFKSNFDLAEDAKLQLSKDTYDDDLDNLLAQIGDQYADLFLAAKNLSDAILLSDILRVNTEITKAPLSASMIKRYDEHHQDLTLLKALVRQQLPEKYKEIFFDQSKNGYAGYIDGGASQEEFYKFIKPILEKMDGTEELLVKLNREDLLRKQRTFDNGSIPHQIHLGELHAILRRQEDFYPFLKDNREKIEKILTFRIPYYVGPLARGNSRFAWMTRKSEETITPWNFEEVVDKGASAQSFIERMTNFDKNLPNEKVLPKHSLLYEYFTVYNELTKVKYVTEGMRKPAFLSGEQKKAIVDLLFKTNRKVTVKQLKEDYFKKIECFDSVEISGVEDRFNASLGTYHDLLKIIKDKDFLDNEENEDILEDIVLTLTLFEDREMIEERLKTYAHLFDDKVMKQLKRRRYTGWGRLSRKLINGIRDKQSGKTILDFLKSDGFANRNFMQLIHDDSLTFKEDIQKAQVSGQGDSLHEHIANLAGSPAIKKGILQTVKVVDELVKVMGRHKPENIVIEMARENQTTQKGQKNSRERMKRIEEGIKELGSQILKEHPVENTQLQNEKLYLYYLQNGRDMYVDQELDINRLSDYDVDHIVPQSFLKDDSIDNKVLTRSDKARGKSDNVPSEEVVKKMKNYWRQLLNAKLITQRKFDNLTKAERGGLSELDKAGFIKRQLVETRQITKHVAQILDSRMNTKYDENDKLIREVKVITLKSKLVSDFRKDFQFYKVREINNYHHAHDAYLNAVVGTALIKKYPKLESEFVYGDYKVYDVRKMIAKSEQEIGKATAKYFFYSNIMNFFKTEITLANGEIRKRPLIETNGETGEIVWDKGRDFATVRKVLSMPQVNIVKKTEVQTGGFSKESILPKRNSDKLIARKKDWDPKKYGGFDSPTVAYSVLVVAKVEKGKSKKLKSVKELLGITIMERSSFEKNPIDFLEAKGYKEVKKDLIIKLPKYSLFELENGRKRMLASAGELQKGNELALPSKYVNFLYLASHYEKLKGSPEDNEQKQLFVEQHKHYLDEIIEQISEFSKRVILADANLDKVLSAYNKHRDKPIREQAENIIHLFTLTNLGAPAAFKYFDTTIDRKRYTSTKEVLDATLIHQSITGLYETRIDLSQLGGDGGPAPAPAPAPGGTLNIEDEYRLHETSKEPDVPLGSTWLSDFPQAWAETGGMGLAVRQAPLIIPLKATSTPVSIKQYPMSQEARLGIKPHIQRLLDQGILVPCQSPWNTPLLPVKKPGTNDYRPVQDLREVNKRVEDIHPTVPNPYNLLSGLPPSHQWYTVLDLKDAFFCLRLHPTSQPLFAFEWRDPEMGISGQLTWTRLPQGFKNSPTLFNEALHRDLADFRIQHPDLILLQYVDDLLLAATSEQDCQRGTRALLQTLGNLGYRASAKKAQICQKQVKYLGYLLKEGQRWLTEARKETVMGQPTPKTPRQLREFLGTAGFCRLWIPGFAEMAAPLYPLTKPGTLFNWGPDQQKAYQEIKQALLTAPALGLPDLTKPFELFVDEKQGYAKGVLTQKLGPWRRPVAYLSKKLDPVAAGWPPCLRMVAAIAVLTKDAGKLTMGQPLVILAPHAVEALVKQPPDRWLSNARMTHYQAMLLDTDRVQFGPVVALNPATLLPLPEKEAPHDCLEILAETHGTRPDLTDQPIPDADYTWYTDGSSFLQEGQRRAGAAVTTETEVIWARALPAGTSAQRAELIALTQALKMAEGKKLNVYTDSRYAFATAHVHGEIYRRRGWLTSEGREIKNKNEILALLKALFLPKRLSIIHCPGHQKGNSAEARGNRMADQAAREAAMKAVLETSTLLAGKRTADGSEFEKRTADGSEFESPKKKAKVE

SEQ ID NO: 979 - protein, 2096 aa, synthetic construct
MPAAKRVKLDGGDKKYSIGLDIGTNSVGWAVITDEYKVPSKKFKVLGNTDRHSIKKNLIGALLFDSGETAEATRLKRTARRRYTRRKNRICYLQEIFSNEMAKVDDSFFHRLEESFLVEEDKKHERHPIFGNIVDEVAYHEKYPTIYHLRKKLVDSTDKADLRLIYLALAHMIKFRGHFLIEGDLNPDNSDVDKLFIQLVQTYNQLFEENPINASGVDAKAILSARLSKSRRLENLIAQLPGEKKNGLFGNLIALSLGLTPNFKSNFDLAEDAKLQLSKDTYDDDLDNLLAQIGDQYADLFLAAKNLSDAILLSDILRVNTEITKAPLSASMIKRYDEHHQDLTLLKALVRQQLPEKYKEIFFDQSKNGYAGYIDGGASQEEFYKFIKPILEKMDGTEELLVKLNREDLLRKQRTFDNGSIPHQIHLGELHAILRRQEDFYPFLKDNREKIEKILTFRIPYYVGPLARGNSRFAWMTRKSEETITPWNFEEVVDKGASAQSFIERMTNFDKNLPNEKVLPKHSLLYEYFTVYNELTKVKYVTEGMRKPAFLSGEQKKAIVDLLFKTNRKVTVKQLKEDYFKKIECFDSVEISGVEDRFNASLGTYHDLLKIIKDKDFLDNEENEDILEDIVLTLTLFEDREMIEERLKTYAHLFDDKVMKQLKRRRYTGWGRLSRKLINGIRDKQSGKTILDFLKSDGFANRNFMQLIHDDSLTFKEDIQKAQVSGQGDSLHEHIANLAGSPAIKKGILQTVKVVDELVKVMGRHKPENIVIEMARENQTTQKGQKNSRERMKRIEEGIKELGSQILKEHPVENTQLQNEKLYLYYLQNGRDMYVDQELDINRLSDYDVDHIVPQSFLKDDSIDNKVLTRSDKARGKSDNVPSEEVVKKMKNYWRQLLNAKLITQRKFDNLTKAERGGLSELDKAGFIKRQLVETRQITKHVAQILDSRMNTKYDENDKLIREVKVITLKSKLVSDFRKDFQFYKVREINNYHHAHDAYLNAVVGTALIKKYPKLESEFVYGDYKVYDVRKMIAKSEQEIGKATAKYFFYSNIMNFFKTEITLANGEIRKRPLIETNGETGEIVWDKGRDFATVRKVLSMPQVNIVKKTEVQTGGFSKESILPKRNSDKLIARKKDWDPKKYGGFDSPTVAYSVLVVAKVEKGKSKKLKSVKELLGITIMERSSFEKNPIDFLEAKGYKEVKKDLIIKLPKYSLFELENGRKRMLASAGELQKGNELALPSKYVNFLYLASHYEKLKGSPEDNEQKQLFVEQHKHYLDEIIEQISEFSKRVILADANLDKVLSAYNKHRDKPIREQAENIIHLFTLTNLGAPAAFKYFDTTIDRKRYTSTKEVLDATLIHQSITGLYETRIDLSQLGGDGGGGGEAAAKGGSGGTLNIEDEYRLHETSKEPDVPLGSTWLSDFPQAWAETGGMGLAVRQAPLIIPLKATSTPVSIKQYPMSQEARLGIKPHIQRLLDQGILVPCQSPWNTPLLPVKKPGTNDYRPVQDLREVNKRVEDIHPTVPNPYNLLSGLPPSHQWYTVLDLKDAFFCLRLHPTSQPLFAFEWRDPEMGISGQLTWTRLPQGFKNSPTLFNEALHRDLADFRIQHPDLILLQYVDDLLLAATSEQDCQRGTRALLQTLGNLGYRASAKKAQICQKQVKYLGYLLKEGQRWLTEARKETVMGQPTPKTPRQLREFLGTAGFCRLWIPGFAEMAAPLYPLTKPGTLFNWGPDQQKAYQEIKQALLTAPALGLPDLTKPFELFVDEKQGYAKGVLTQKLGPWRRPVAYLSKKLDPVAAGWPPCLRMVAAIAVLTKDAGKLTMGQPLVILAPHAVEALVKQPPDRWLSNARMTHYQAMLLDTDRVQFGPVVALNPATLLPLPEKEAPHDCLEILAETHGTRPDLTDQPIPDADYTWYTDGSSFLQEGQRRAGAAVTTETEVIWARALPAGTSAQRAELIALTQALKMAEGKKLNVYTDSRYAFATAHVHGEIYRRRGWLTSEGREIKNKNEILALLKALFLPKRLSIIHCPGHQKGNSAEARGNRMADQAAREAAMKAVLETSTLLAGKRTADGSEFEKRTADGSEFESPKKKAKVE

SEQ ID NO: 980 - protein, 2094 aa, synthetic construct
MPAAKRVKLDGGDKKYSIGLDIGTNSVGWAVITDEYKVPSKKFKVLGNTDRHSIKKNLIGALLFDSGETAEATRLKRTARRRYTRRKNRICYLQEIFSNEMAKVDDSFFHRLEESFLVEEDKKHERHPIFGNIVDEVAYHEKYPTIYHLRKKLVDSTDKADLRLIYLALAHMIKFRGHFLIEGDLNPDNSDVDKLFIQLVQTYNQLFEENPINASGVDAKAILSARLSKSRRLENLIAQLPGEKKNGLFGNLIALSLGLTPNFKSNFDLAEDAKLQLSKDTYDDDLDNLLAQIGDQYADLFLAAKNLSDAILLSDILRVNTEITKAPLSASMIKRYDEHHQDLTLLKALVRQQLPEKYKEIFFDQSKNGYAGYIDGGASQEEFYKFIKPILEKMDGTEELLVKLNREDLLRKQRTFDNGSIPHQIHLGELHAILRRQEDFYPFLKDNREKIEKILTFRIPYYVGPLARGNSRFAWMTRKSEETITPWNFEEVVDKGASAQSFIERMTNFDKNLPNEKVLPKHSLLYEYFTVYNELTKVKYVTEGMRKPAFLSGEQKKAIVDLLFKTNRKVTVKQLKEDYFKKIECFDSVEISGVEDRFNASLGTYHDLLKIIKDKDFLDNEENEDILEDIVLTLTLFEDREMIEERLKTYAHLFDDKVMKQLKRRRYTGWGRLSRKLINGIRDKQSGKTILDFLKSDGFANRNFMQLIHDDSLTFKEDIQKAQVSGQGDSLHEHIANLAGSPAIKKGILQTVKVVDELVKVMGRHKPENIVIEMARENQTTQKGQKNSRERMKRIEEGIKELGSQILKEHPVENTQLQNEKLYLYYLQNGRDMYVDQELDINRLSDYDVDHIVPQSFLKDDSIDNKVLTRSDKARGKSDNVPSEEVVKKMKNYWRQLLNAKLITQRKFDNLTKAERGGLSELDKAGFIKRQLVETRQITKHVAQILDSRMNTKYDENDKLIREVKVITLKSKLVSDFRKDFQFYKVREINNYHHAHDAYLNAVVGTALIKKYPKLESEFVYGDYKVYDVRKMIAKSEQEIGKATAKYFFYSNIMNFFKTEITLANGEIRKRPLIETNGETGEIVWDKGRDFATVRKVLSMPQVNIVKKTEVQTGGFSKESILPKRNSDKLIARKKDWDPKKYGGFDSPTVAYSVLVVAKVEKGKSKKLKSVKELLGITIMERSSFEKNPIDFLEAKGYKEVKKDLIIKLPKYSLFELENGRKRMLASAGELQKGNELALPSKYVNFLYLASHYEKLKGSPEDNEQKQLFVEQHKHYLDEIIEQISEFSKRVILADANLDKVLSAYNKHRDKPIREQAENIIHLFTLTNLGAPAAFKYFDTTIDRKRYTSTKEVLDATLIHQSITGLYETRIDLSQLGGDGGGGSGGSGGSGGTLNIEDEYRLHETSKEPDVPLGSTWLSDFPQAWAETGGMGLAVRQAPLIIPLKATSTPVSIKQYPMSQEARLGIKPHIQRLLDQGILVPCQSPWNTPLLPVKKPGTNDYRPVQDLREVNKRVEDIHPTVPNPYNLLSGLPPSHQWYTVLDLKDAFFCLRLHPTSQPLFAFEWRDPEMGISGQLTWTRLPQGFKNSPTLFNEALHRDLADFRIQHPDLILLQYVDDLLLAATSEQDCQRGTRALLQTLGNLGYRASAKKAQICQKQVKYLGYLLKEGQRWLTEARKETVMGQPTPKTPRQLREFLGTAGFCRLWIPGFAEMAAPLYPLTKPGTLFNWGPDQQKAYQEIKQALLTAPALGLPDLTKPFELFVDEKQGYAKGVLTQKLGPWRRPVAYLSKKLDPVAAGWPPCLRMVAAIAVLTKDAGKLTMGQPLVILAPHAVEALVKQPPDRWLSNARMTHYQAMLLDTDRVQFGPVVALNPATLLPLPEKEAPHDCLEILAETHGTRPDLTDQPIPDADYTWYTDGSSFLQEGQRRAGAAVTTETEVIWARALPAGTSAQRAELIALTQALKMAEGKKLNVYTDSRYAFATAHVHGEIYRRRGWLTSEGREIKNKNEILALLKALFLPKRLSIIHCPGHQKGNSAEARGNRMADQAAREAAMKAVLETSTLLAGKRTADGSEFEKRTADGSEFESPKKKAKVE

SEQ ID NO: 981 - protein, 2100 aa, synthetic construct
MPAAKRVKLDGGDKKYSIGLDIGTNSVGWAVITDEYKVPSKKFKVLGNTDRHSIKKNLIGALLFDSGETAEATRLKRTARRRYTRRKNRICYLQEIFSNEMAKVDDSFFHRLEESFLVEEDKKHERHPIFGNIVDEVAYHEKYPTIYHLRKKLVDSTDKADLRLIYLALAHMIKFRGHFLIEGDLNPDNSDVDKLFIQLVQTYNQLFEENPINASGVDAKAILSARLSKSRRLENLIAQLPGEKKNGLFGNLIALSLGLTPNFKSNFDLAEDAKLQLSKDTYDDDLDNLLAQIGDQYADLFLAAKNLSDAILLSDILRVNTEITKAPLSASMIKRYDEHHQDLTLLKALVRQQLPEKYKEIFFDQSKNGYAGYIDGGASQEEFYKFIKPILEKMDGTEELLVKLNREDLLRKQRTFDNGSIPHQIHLGELHAILRRQEDFYPFLKDNREKIEKILTFRIPYYVGPLARGNSRFAWMTRKSEETITPWNFEEVVDKGASAQSFIERMTNFDKNLPNEKVLPKHSLLYEYFTVYNELTKVKYVTEGMRKPAFLSGEQKKAIVDLLFKTNRKVTVKQLKEDYFKKIECFDSVEISGVEDRFNASLGTYHDLLKIIKDKDFLDNEENEDILEDIVLTLTLFEDREMIEERLKTYAHLFDDKVMKQLKRRRYTGWGRLSRKLINGIRDKQSGKTILDFLKSDGFANRNFMQLIHDDSLTFKEDIQKAQVSGQGDSLHEHIANLAGSPAIKKGILQTVKVVDELVKVMGRHKPENIVIEMARENQTTQKGQKNSRERMKRIEEGIKELGSQILKEHPVENTQLQNEKLYLYYLQNGRDMYVDQELDINRLSDYDVDHIVPQSFLKDDSIDNKVLTRSDKARGKSDNVPSEEVVKKMKNYWRQLLNAKLITQRKFDNLTKAERGGLSELDKAGFIKRQLVETRQITKHVAQILDSRMNTKYDENDKLIREVKVITLKSKLVSDFRKDFQFYKVREINNYHHAHDAYLNAVVGTALIKKYPKLESEFVYGDYKVYDVRKMIAKSEQEIGKATAKYFFYSNIMNFFKTEITLANGEIRKRPLIETNGETGEIVWDKGRDFATVRKVLSMPQVNIVKKTEVQTGGFSKESILPKRNSDKLIARKKDWDPKKYGGFDSPTVAYSVLVVAKVEKGKSKKLKSVKELLGITIMERSSFEKNPIDFLEAKGYKEVKKDLIIKLPKYSLFELENGRKRMLASAGELQKGNELALPSKYVNFLYLASHYEKLKGSPEDNEQKQLFVEQHKHYLDEIIEQISEFSKRVILADANLDKVLSAYNKHRDKPIREQAENIIHLFTLTNLGAPAAFKYFDTTIDRKRYTSTKEVLDATLIHQSITGLYETRIDLSQLGGDGGEAAAKGGGGSEAAAKGGTLNIEDEYRLHETSKEPDVPLGSTWLSDFPQAWAETGGMGLAVRQAPLIIPLKATSTPVSIKQYPMSQEARLGIKPHIQRLLDQGILVPCQSPWNTPLLPVKKPGTNDYRPVQDLREVNKRVEDIHPTVPNPYNLLSGLPPSHQWYTVLDLKDAFFCLRLHPTSQPLFAFEWRDPEMGISGQLTWTRLPQGFKNSPTLFNEALHRDLADFRIQHPDLILLQYVDDLLLAATSEQDCQRGTRALLQTLGNLGYRASAKKAQICQKQVKYLGYLLKEGQRWLTEARKETVMGQPTPKTPRQLREFLGTAGFCRLWIPGFAEMAAPLYPLTKPGTLFNWGPDQQKAYQEIKQALLTAPALGLPDLTKPFELFVDEKQGYAKGVLTQKLGPWRRPVAYLSKKLDPVAAGWPPCLRMVAAIAVLTKDAGKLTMGQPLVILAPHAVEALVKQPPDRWLSNARMTHYQAMLLDTDRVQFGPVVALNPATLLPLPEKEAPHDCLEILAETHGTRPDLTDQPIPDADYTWYTDGSSFLQEGQRRAGAAVTTETEVIWARALPAGTSAQRAELIALTQALKMAEGKKLNVYTDSRYAFATAHVHGEIYRRRGWLTSEGREIKNKNEILALLKALFLPKRLSIIHCPGHQKGNSAEARGNRMADQAAREAAMKAVLETSTLLAGKRTADGSEFEKRTADGSEFESPKKKAKVE

SEQ ID NO: 982 - protein, 2093 aa, synthetic construct
MPAAKRVKLDGGDKKYSIGLDIGTNSVGWAVITDEYKVPSKKFKVLGNTDRHSIKKNLIGALLFDSGETAEATRLKRTARRRYTRRKNRICYLQEIFSNEMAKVDDSFFHRLEESFLVEEDKKHERHPIFGNIVDEVAYHEKYPTIYHLRKKLVDSTDKADLRLIYLALAHMIKFRGHFLIEGDLNPDNSDVDKLFIQLVQTYNQLFEENPINASGVDAKAILSARLSKSRRLENLIAQLPGEKKNGLFGNLIALSLGLTPNFKSNFDLAEDAKLQLSKDTYDDDLDNLLAQIGDQYADLFLAAKNLSDAILLSDILRVNTEITKAPLSASMIKRYDEHHQDLTLLKALVRQQLPEKYKEIFFDQSKNGYAGYIDGGASQEEFYKFIKPILEKMDGTEELLVKLNREDLLRKQRTFDNGSIPHQIHLGELHAILRRQEDFYPFLKDNREKIEKILTFRIPYYVGPLARGNSRFAWMTRKSEETITPWNFEEVVDKGASAQSFIERMTNFDKNLPNEKVLPKHSLLYEYFTVYNELTKVKYVTEGMRKPAFLSGEQKKAIVDLLFKTNRKVTVKQLKEDYFKKIECFDSVEISGVEDRFNASLGTYHDLLKIIKDKDFLDNEENEDILEDIVLTLTLFEDREMIEERLKTYAHLFDDKVMKQLKRRRYTGWGRLSRKLINGIRDKQSGKTILDFLKSDGFANRNFMQLIHDDSLTFKEDIQKAQVSGQGDSLHEHIANLAGSPAIKKGILQTVKVVDELVKVMGRHKPENIVIEMARENQTTQKGQKNSRERMKRIEEGIKELGSQILKEHPVENTQLQNEKLYLYYLQNGRDMYVDQELDINRLSDYDVDHIVPQSFLKDDSIDNKVLTRSDKARGKSDNVPSEEVVKKMKNYWRQLLNAKLITQRKFDNLTKAERGGLSELDKAGFIKRQLVETRQITKHVAQILDSRMNTKYDENDKLIREVKVITLKSKLVSDFRKDFQFYKVREINNYHHAHDAYLNAVVGTALIKKYPKLESEFVYGDYKVYDVRKMIAKSEQEIGKATAKYFFYSNIMNFFKTEITLANGEIRKRPLIETNGETGEIVWDKGRDFATVRKVLSMPQVNIVKKTEVQTGGFSKESILPKRNSDKLIARKKDWDPKKYGGFDSPTVAYSVLVVAKVEKGKSKKLKSVKELLGITIMERSSFEKNPIDFLEAKGYKEVKKDLIIKLPKYSLFELENGRKRMLASAGELQKGNELALPSKYVNFLYLASHYEKLKGSPEDNEQKQLFVEQHKHYLDEIIEQISEFSKRVILADANLDKVLSAYNKHRDKPIREQAENIIHLFTLTNLGAPAAFKYFDTTIDRKRYTSTKEVLDATLIHQSITGLYETRIDLSQLGGDGGEAAAKPAPGGTLNIEDEYRLHETSKEPDVPLGSTWLSDFPQAWAETGGMGLAVRQAPLIIPLKATSTPVSIKQYPMSQEARLGIKPHIQRLLDQGILVPCQSPWNTPLLPVKKPGTNDYRPVQDLREVNKRVEDIHPTVPNPYNLLSGLPPSHQWYTVLDLKDAFFCLRLHPTSQPLFAFEWRDPEMGISGQLTWTRLPQGFKNSPTLFNEALHRDLADFRIQHPDLILLQYVDDLLLAATSEQDCQRGTRALLQTLGNLGYRASAKKAQICQKQVKYLGYLLKEGQRWLTEARKETVMGQPTPKTPRQLREFLGTAGFCRLWIPGFAEMAAPLYPLTKPGTLFNWGPDQQKAYQEIKQALLTAPALGLPDLTKPFELFVDEKQGYAKGVLTQKLGPWRRPVAYLSKKLDPVAAGWPPCLRMVAAIAVLTKDAGKLTMGQPLVILAPHAVEALVKQPPDRWLSNARMTHYQAMLLDTDRVQFGPVVALNPATLLPLPEKEAPHDCLEILAETHGTRPDLTDQPIPDADYTWYTDGSSFLQEGQRRAGAAVTTETEVIWARALPAGTSAQRAELIALTQALKMAEGKKLNVYTDSRYAFATAHVHGEIYRRRGWLTSEGREIKNKNEILALLKALFLPKRLSIIHCPGHQKGNSAEARGNRMADQAAREAAMKAVLETSTLLAGKRTADGSEFEKRTADGSEFESPKKKAKVE

SEQ ID NO: 983 - protein, 2090 aa, synthetic construct
MPAAKRVKLDGGDKKYSIGLDIGTNSVGWAVITDEYKVPSKKFKVLGNTDRHSIKKNLIGALLFDSGETAEATRLKRTARRRYTRRKNRICYLQEIFSNEMAKVDDSFFHRLEESFLVEEDKKHERHPIFGNIVDEVAYHEKYPTIYHLRKKLVDSTDKADLRLIYLALAHMIKFRGHFLIEGDLNPDNSDVDKLFIQLVQTYNQLFEENPINASGVDAKAILSARLSKSRRLENLIAQLPGEKKNGLFGNLIALSLGLTPNFKSNFDLAEDAKLQLSKDTYDDDLDNLLAQIGDQYADLFLAAKNLSDAILLSDILRVNTEITKAPLSASMIKRYDEHHQDLTLLKALVRQQLPEKYKEIFFDQSKNGYAGYIDGGASQEEFYKFIKPILEKMDGTEELLVKLNREDLLRKQRTFDNGSIPHQIHLGELHAILRRQEDFYPFLKDNREKIEKILTFRIPYYVGPLARGNSRFAWMTRKSEETITPWNFEEVVDKGASAQSFIERMTNFDKNLPNEKVLPKHSLLYEYFTVYNELTKVKYVTEGMRKPAFLSGEQKKAIVDLLFKTNRKVTVKQLKEDYFKKIECFDSVEISGVEDRFNASLGTYHDLLKIIKDKDFLDNEENEDILEDIVLTLTLFEDREMIEERLKTYAHLFDDKVMKQLKRRRYTGWGRLSRKLINGIRDKQSGKTILDFLKSDGFANRNFMQLIHDDSLTFKEDIQKAQVSGQGDSLHEHIANLAGSPAIKKGILQTVKVVDELVKVMGRHKPENIVIEMARENQTTQKGQKNSRERMKRIEEGIKELGSQILKEHPVENTQLQNEKLYLYYLQNGRDMYVDQELDINRLSDYDVDHIVPQSFLKDDSIDNKVLTRSDKARGKSDNVPSEEVVKKMKNYWRQLLNAKLITQRKFDNLTKAERGGLSELDKAGFIKRQLVETRQITKHVAQILDSRMNTKYDENDKLIREVKVITLKSKLVSDFRKDFQFYKVREINNYHHAHDAYLNAVVGTALIKKYPKLESEFVYGDYKVYDVRKMIAKSEQEIGKATAKYFFYSNIMNFFKTEITLANGEIRKRPLIETNGETGEIVWDKGRDFATVRKVLSMPQVNIVKKTEVQTGGFSKESILPKRNSDKLIARKKDWDPKKYGGFDSPTVAYSVLVVAKVEKGKSKKLKSVKELLGITIMERSSFEKNPIDFLEAKGYKEVKKDLIIKLPKYSLFELENGRKRMLASAGELQKGNELALPSKYVNFLYLASHYEKLKGSPEDNEQKQLFVEQHKHYLDEIIEQISEFSKRVILADANLDKVLSAYNKHRDKPIREQAENIIHLFTLTNLGAPAAFKYFDTTIDRKRYTSTKEVLDATLIHQSITGLYETRIDLSQLGGDGGPAPAPGGTLNIEDEYRLHETSKEPDVPLGSTWLSDFPQAWAETGGMGLAVRQAPLIIPLKATSTPVSIKQYPMSQEARLGIKPHIQRLLDQGILVPCQSPWNTPLLPVKKPGTNDYRPVQDLREVNKRVEDIHPTVPNPYNLLSGLPPSHQWYTVLDLKDAFFCLRLHPTSQPLFAFEWRDPEMGISGQLTWTRLPQGFKNSPTLFNEALHRDLADFRIQHPDLILLQYVDDLLLAATSEQDCQRGTRALLQTLGNLGYRASAKKAQICQKQVKYLGYLLKEGQRWLTEARKETVMGQPTPKTPRQLREFLGTAGFCRLWIPGFAEMAAPLYPLTKPGTLFNWGPDQQKAYQEIKQALLTAPALGLPDLTKPFELFVDEKQGYAKGVLTQKLGPWRRPVAYLSKKLDPVAAGWPPCLRMVAAIAVLTKDAGKLTMGQPLVILAPHAVEALVKQPPDRWLSNARMTHYQAMLLDTDRVQFGPVVALNPATLLPLPEKEAPHDCLEILAETHGTRPDLTDQPIPDADYTWYTDGSSFLQEGQRRAGAAVTTETEVIWARALPAGTSAQRAELIALTQALKMAEGKKLNVYTDSRYAFATAHVHGEIYRRRGWLTSEGREIKNKNEILALLKALFLPKRLSIIHCPGHQKGNSAEARGNRMADQAAREAAMKAVLETSTLLAGKRTADGSEFEKRTADGSEFESPKKKAKVE

SEQ ID NO: 984 - protein, 2094 aa, synthetic construct
MPAAKRVKLDGGDKKYSIGLDIGTNSVGWAVITDEYKVPSKKFKVLGNTDRHSIKKNLIGALLFDSGETAEATRLKRTARRRYTRRKNRICYLQEIFSNEMAKVDDSFFHRLEESFLVEEDKKHERHPIFGNIVDEVAYHEKYPTIYHLRKKLVDSTDKADLRLIYLALAHMIKFRGHFLIEGDLNPDNSDVDKLFIQLVQTYNQLFEENPINASGVDAKAILSARLSKSRRLENLIAQLPGEKKNGLFGNLIALSLGLTPNFKSNFDLAEDAKLQLSKDTYDDDLDNLLAQIGDQYADLFLAAKNLSDAILLSDILRVNTEITKAPLSASMIKRYDEHHQDLTLLKALVRQQLPEKYKEIFFDQSKNGYAGYIDGGASQEEFYKFIKPILEKMDGTEELLVKLNREDLLRKQRTFDNGSIPHQIHLGELHAILRRQEDFYPFLKDNREKIEKILTFRIPYYVGPLARGNSRFAWMTRKSEETITPWNFEEVVDKGASAQSFIERMTNFDKNLPNEKVLPKHSLLYEYFTVYNELTKVKYVTEGMRKPAFLSGEQKKAIVDLLFKTNRKVTVKQLKEDYFKKIECFDSVEISGVEDRFNASLGTYHDLLKIIKDKDFLDNEENEDILEDIVLTLTLFEDREMIEERLKTYAHLFDDKVMKQLKRRRYTGWGRLSRKLINGIRDKQSGKTILDFLKSDGFANRNFMQLIHDDSLTFKEDIQKAQVSGQGDSLHEHIANLAGSPAIKKGILQTVKVVDELVKVMGRHKPENIVIEMARENQTTQKGQKNSRERMKRIEEGIKELGSQILKEHPVENTQLQNEKLYLYYLQNGRDMYVDQELDINRLSDYDVDHIVPQSFLKDDSIDNKVLTRSDKARGKSDNVPSEEVVKKMKNYWRQLLNAKLITQRKFDNLTKAERGGLSELDKAGFIKRQLVETRQITKHVAQILDSRMNTKYDENDKLIREVKVITLKSKLVSDFRKDFQFYKVREINNYHHAHDAYLNAVVGTALIKKYPKLESEFVYGDYKVYDVRKMIAKSEQEIGKATAKYFFYSNIMNFFKTEITLANGEIRKRPLIETNGETGEIVWDKGRDFATVRKVLSMPQVNIVKKTEVQTGGFSKESILPKRNSDKLIARKKDWDPKKYGGFDSPTVAYSVLVVAKVEKGKSKKLKSVKELLGITIMERSSFEKNPIDFLEAKGYKEVKKDLIIKLPKYSLFELENGRKRMLASAGELQKGNELALPSKYVNFLYLASHYEKLKGSPEDNEQKQLFVEQHKHYLDEIIEQISEFSKRVILADANLDKVLSAYNKHRDKPIREQAENIIHLFTLTNLGAPAAFKYFDTTIDRKRYTSTKEVLDATLIHQSITGLYETRIDLSQLGGDGGGGGPAPGGSGGTLNIEDEYRLHETSKEPDVPLGSTWLSDFPQAWAETGGMGLAVRQAPLIIPLKATSTPVSIKQYPMSQEARLGIKPHIQRLLDQGILVPCQSPWNTPLLPVKKPGTNDYRPVQDLREVNKRVEDIHPTVPNPYNLLSGLPPSHQWYTVLDLKDAFFCLRLHPTSQPLFAFEWRDPEMGISGQLTWTRLPQGFKNSPTLFNEALHRDLADFRIQHPDLILLQYVDDLLLAATSEQDCQRGTRALLQTLGNLGYRASAKKAQICQKQVKYLGYLLKEGQRWLTEARKETVMGQPTPKTPRQLREFLGTAGFCRLWIPGFAEMAAPLYPLTKPGTLFNWGPDQQKAYQEIKQALLTAPALGLPDLTKPFELFVDEKQGYAKGVLTQKLGPWRRPVAYLSKKLDPVAAGWPPCLRMVAAIAVLTKDAGKLTMGQPLVILAPHAVEALVKQPPDRWLSNARMTHYQAMLLDTDRVQFGPVVALNPATLLPLPEKEAPHDCLEILAETHGTRPDLTDQPIPDADYTWYTDGSSFLQEGQRRAGAAVTTETEVIWARALPAGTSAQRAELIALTQALKMAEGKKLNVYTDSRYAFATAHVHGEIYRRRGWLTSEGREIKNKNEILALLKALFLPKRLSIIHCPGHQKGNSAEARGNRMADQAAREAAMKAVLETSTLLAGKRTADGSEFEKRTADGSEFESPKKKAKVE

SEQ ID NO: 985 - protein, 2096 aa, synthetic construct
MPAAKRVKLDGGDKKYSIGLDIGTNSVGWAVITDEYKVPSKKFKVLGNTDRHSIKKNLIGALLFDSGETAEATRLKRTARRRYTRRKNRICYLQEIFSNEMAKVDDSFFHRLEESFLVEEDKKHERHPIFGNIVDEVAYHEKYPTIYHLRKKLVDSTDKADLRLIYLALAHMIKFRGHFLIEGDLNPDNSDVDKLFIQLVQTYNQLFEENPINASGVDAKAILSARLSKSRRLENLIAQLPGEKKNGLFGNLIALSLGLTPNFKSNFDLAEDAKLQLSKDTYDDDLDNLLAQIGDQYADLFLAAKNLSDAILLSDILRVNTEITKAPLSASMIKRYDEHHQDLTLLKALVRQQLPEKYKEIFFDQSKNGYAGYIDGGASQEEFYKFIKPILEKMDGTEELLVKLNREDLLRKQRTFDNGSIPHQIHLGELHAILRRQEDFYPFLKDNREKIEKILTFRIPYYVGPLARGNSRFAWMTRKSEETITPWNFEEVVDKGASAQSFIERMTNFDKNLPNEKVLPKHSLLYEYFTVYNELTKVKYVTEGMRKPAFLSGEQKKAIVDLLFKTNRKVTVKQLKEDYFKKIECFDSVEISGVEDRFNASLGTYHDLLKIIKDKDFLDNEENEDILEDIVLTLTLFEDREMIEERLKTYAHLFDDKVMKQLKRRRYTGWGRLSRKLINGIRDKQSGKTILDFLKSDGFANRNFMQLIHDDSLTFKEDIQKAQVSGQGDSLHEHIANLAGSPAIKKGILQTVKVVDELVKVMGRHKPENIVIEMARENQTTQKGQKNSRERMKRIEEGIKELGSQILKEHPVENTQLQNEKLYLYYLQNGRDMYVDQELDINRLSDYDVDHIVPQSFLKDDSIDNKVLTRSDKARGKSDNVPSEEVVKKMKNYWRQLLNAKLITQRKFDNLTKAERGGLSELDKAGFIKRQLVETRQITKHVAQILDSRMNTKYDENDKLIREVKVITLKSKLVSDFRKDFQFYKVREINNYHHAHDAYLNAVVGTALIKKYPKLESEFVYGDYKVYDVRKMIAKSEQEIGKATAKYFFYSNIMNFFKTEITLANGEIRKRPLIETNGETGEIVWDKGRDFATVRKVLSMPQVNIVKKTEVQTGGFSKESILPKRNSDKLIARKKDWDPKKYGGFDSPTVAYSVLVVAKVEKGKSKKLKSVKELLGITIMERSSFEKNPIDFLEAKGYKEVKKDLIIKLPKYSLFELENGRKRMLASAGELQKGNELALPSKYVNFLYLASHYEKLKGSPEDNEQKQLFVEQHKHYLDEIIEQISEFSKRVILADANLDKVLSAYNKHRDKPIREQAENIIHLFTLTNLGAPAAFKYFDTTIDRKRYTSTKEVLDATLIHQSITGLYETRIDLSQLGGDGGGGGEAAAKPAPGGTLNIEDEYRLHETSKEPDVPLGSTWLSDFPQAWAETGGMGLAVRQAPLIIPLKATSTPVSIKQYPMSQEARLGIKPHIQRLLDQGILVPCQSPWNTPLLPVKKPGTNDYRPVQDLREVNKRVEDIHPTVPNPYNLLSGLPPSHQWYTVLDLKDAFFCLRLHPTSQPLFAFEWRDPEMGISGQLTWTRLPQGFKNSPTLFNEALHRDLADFRIQHPDLILLQYVDDLLLAATSEQDCQRGTRALLQTLGNLGYRASAKKAQICQKQVKYLGYLLKEGQRWLTEARKETVMGQPTPKTPRQLREFLGTAGFCRLWIPGFAEMAAPLYPLTKPGTLFNWGPDQQKAYQEIKQALLTAPALGLPDLTKPFELFVDEKQGYAKGVLTQKLGPWRRPVAYLSKKLDPVAAGWPPCLRMVAAIAVLTKDAGKLTMGQPLVILAPHAVEALVKQPPDRWLSNARMTHYQAMLLDTDRVQFGPVVALNPATLLPLPEKEAPHDCLEILAETHGTRPDLTDQPIPDADYTWYTDGSSFLQEGQRRAGAAVTTETEVIWARALPAGTSAQRAELIALTQALKMAEGKKLNVYTDSRYAFATAHVHGEIYRRRGWLTSEGREIKNKNEILALLKALFLPKRLSIIHCPGHQKGNSAEARGNRMADQAAREAAMKAVLETSTLLAGKRTADGSEFEKRTADGSEFESPKKKAKVE

SEQ ID NO: 986 - protein, 2094 aa, synthetic construct
MPAAKRVKLDGGDKKYSIGLDIGTNSVGWAVITDEYKVPSKKFKVLGNTDRHSIKKNLIGALLFDSGETAEATRLKRTARRRYTRRKNRICYLQEIFSNEMAKVDDSFFHRLEESFLVEEDKKHERHPIFGNIVDEVAYHEKYPTIYHLRKKLVDSTDKADLRLIYLALAHMIKFRGHFLIEGDLNPDNSDVDKLFIQLVQTYNQLFEENPINASGVDAKAILSARLSKSRRLENLIAQLPGEKKNGLFGNLIALSLGLTPNFKSNFDLAEDAKLQLSKDTYDDDLDNLLAQIGDQYADLFLAAKNLSDAILLSDILRVNTEITKAPLSASMIKRYDEHHQDLTLLKALVRQQLPEKYKEIFFDQSKNGYAGYIDGGASQEEFYKFIKPILEKMDGTEELLVKLNREDLLRKQRTFDNGSIPHQIHLGELHAILRRQEDFYPFLKDNREKIEKILTFRIPYYVGPLARGNSRFAWMTRKSEETITPWNFEEVVDKGASAQSFIERMTNFDKNLPNEKVLPKHSLLYEYFTVYNELTKVKYVTEGMRKPAFLSGEQKKAIVDLLFKTNRKVTVKQLKEDYFKKIECFDSVEISGVEDRFNASLGTYHDLLKIIKDKDFLDNEENEDILEDIVLTLTLFEDREMIEERLKTYAHLFDDKVMKQLKRRRYTGWGRLSRKLINGIRDKQSGKTILDFLKSDGFANRNFMQLIHDDSLTFKEDIQKAQVSGQGDSLHEHIANLAGSPAIKKGILQTVKVVDELVKVMGRHKPENIVIEMARENQTTQKGQKNSRERMKRIEEGIKELGSQILKEHPVENTQLQNEKLYLYYLQNGRDMYVDQELDINRLSDYDVDHIVPQSFLKDDSIDNKVLTRSDKARGKSDNVPSEEVVKKMKNYWRQLLNAKLITQRKFDNLTKAERGGLSELDKAGFIKRQLVETRQITKHVAQILDSRMNTKYDENDKLIREVKVITLKSKLVSDFRKDFQFYKVREINNYHHAHDAYLNAVVGTALIKKYPKLESEFVYGDYKVYDVRKMIAKSEQEIGKATAKYFFYSNIMNFFKTEITLANGEIRKRPLIETNGETGEIVWDKGRDFATVRKVLSMPQVNIVKKTEVQTGGFSKESILPKRNSDKLIARKKDWDPKKYGGFDSPTVAYSVLVVAKVEKGKSKKLKSVKELLGITIMERSSFEKNPIDFLEAKGYKEVKKDLIIKLPKYSLFELENGRKRMLASAGELQKGNELALPSKYVNFLYLASHYEKLKGSPEDNEQKQLFVEQHKHYLDEIIEQISEFSKRVILADANLDKVLSAYNKHRDKPIREQAENIIHLFTLTNLGAPAAFKYFDTTIDRKRYTSTKEVLDATLIHQSITGLYETRIDLSQLGGDGGGGSPAPGSSGGTLNIEDEYRLHETSKEPDVPLGSTWLSDFPQAWAETGGMGLAVRQAPLIIPLKATSTPVSIKQYPMSQEARLGIKPHIQRLLDQGILVPCQSPWNTPLLPVKKPGTNDYRPVQDLREVNKRVEDIHPTVPNPYNLLSGLPPSHQWYTVLDLKDAFFCLRLHPTSQPLFAFEWRDPEMGISGQLTWTRLPQGFKNSPTLFNEALHRDLADFRIQHPDLILLQYVDDLLLAATSEQDCQRGTRALLQTLGNLGYRASAKKAQICQKQVKYLGYLLKEGQRWLTEARKETVMGQPTPKTPRQLREFLGTAGFCRLWIPGFAEMAAPLYPLTKPGTLFNWGPDQQKAYQEIKQALLTAPALGLPDLTKPFELFVDEKQGYAKGVLTQKLGPWRRPVAYLSKKLDPVAAGWPPCLRMVAAIAVLTKDAGKLTMGQPLVILAPHAVEALVKQPPDRWLSNARMTHYQAMLLDTDRVQFGPVVALNPATLLPLPEKEAPHDCLEILAETHGTRPDLTDQPIPDADYTWYTDGSSFLQEGQRRAGAAVTTETEVIWARALPAGTSAQRAELIALTQALKMAEGKKLNVYTDSRYAFATAHVHGEIYRRRGWLTSEGREIKNKNEILALLKALFLPKRLSIIHCPGHQKGNSAEARGNRMADQAAREAAMKAVLETSTLLAGKRTADGSEFEKRTADGSEFESPKKKAKVE

SEQ ID NO: 987 - protein, 2094 aa, synthetic construct
MPAAKRVKLDGGDKKYSIGLDIGTNSVGWAVITDEYKVPSKKFKVLGNTDRHSIKKNLIGALLFDSGETAEATRLKRTARRRYTRRKNRICYLQEIFSNEMAKVDDSFFHRLEESFLVEEDKKHERHPIFGNIVDEVAYHEKYPTIYHLRKKLVDSTDKADLRLIYLALAHMIKFRGHFLIEGDLNPDNSDVDKLFIQLVQTYNQLFEENPINASGVDAKAILSARLSKSRRLENLIAQLPGEKKNGLFGNLIALSLGLTPNFKSNFDLAEDAKLQLSKDTYDDDLDNLLAQIGDQYADLFLAAKNLSDAILLSDILRVNTEITKAPLSASMIKRYDEHHQDLTLLKALVRQQLPEKYKEIFFDQSKNGYAGYIDGGASQEEFYKFIKPILEKMDGTEELLVKLNREDLLRKQRTFDNGSIPHQIHLGELHAILRRQEDFYPFLKDNREKIEKILTFRIPYYVGPLARGNSRFAWMTRKSEETITPWNFEEVVDKGASAQSFIERMTNFDKNLPNEKVLPKHSLLYEYFTVYNELTKVKYVTEGMRKPAFLSGEQKKAIVDLLFKTNRKVTVKQLKEDYFKKIECFDSVEISGVEDRFNASLGTYHDLLKIIKDKDFLDNEENEDILEDIVLTLTLFEDREMIEERLKTYAHLFDDKVMKQLKRRRYTGWGRLSRKLINGIRDKQSGKTILDFLKSDGFANRNFMQLIHDDSLTFKEDIQKAQVSGQGDSLHEHIANLAGSPAIKKGILQTVKVVDELVKVMGRHKPENIVIEMARENQTTQKGQKNSRERMKRIEEGIKELGSQILKEHPVENTQLQNEKLYLYYLQNGRDMYVDQELDINRLSDYDVDHIVPQSFLKDDSIDNKVLTRSDKARGKSDNVPSEEVVKKMKNYWRQLLNAKLITQRKFDNLTKAERGGLSELDKAGFIKRQLVETRQITKHVAQILDSRMNTKYDENDKLIREVKVITLKSKLVSDFRKDFQFYKVREINNYHHAHDAYLNAVVGTALIKKYPKLESEFVYGDYKVYDVRKMIAKSEQEIGKATAKYFFYSNIMNFFKTEITLANGEIRKRPLIETNGETGEIVWDKGRDFATVRKVLSMPQVNIVKKTEVQTGGFSKESILPKRNSDKLIARKKDWDPKKYGGFDSPTVAYSVLVVAKVEKGKSKKLKSVKELLGITIMERSSFEKNPIDFLEAKGYKEVKKDLIIKLPKYSLFELENGRKRMLASAGELQKGNELALPSKYVNFLYLASHYEKLKGSPEDNEQKQLFVEQHKHYLDEIIEQISEFSKRVILADANLDKVLSAYNKHRDKPIREQAENIIHLFTLTNLGAPAAFKYFDTTIDRKRYTSTKEVLDATLIHQSITGLYETRIDLSQLGGDGGGSSPAPGGSGGTLNIEDEYRLHETSKEPDVPLGSTWLSDFPQAWAETGGMGLAVRQAPLIIPLKATSTPVSIKQYPMSQEARLGIKPHIQRLLDQGILVPCQSPWNTPLLPVKKPGTNDYRPVQDLREVNKRVEDIHPTVPNPYNLLSGLPPSHQWYTVLDLKDAFFCLRLHPTSQPLFAFEWRDPEMGISGQLTWTRLPQGFKNSPTLFNEALHRDLADFRIQHPDLILLQYVDDLLLAATSEQDCQRGTRALLQTLGNLGYRASAKKAQICQKQVKYLGYLLKEGQRWLTEARKETVMGQPTPKTPRQLREFLGTAGFCRLWIPGFAEMAAPLYPLTKPGTLFNWGPDQQKAYQEIKQALLTAPALGLPDLTKPFELFVDEKQGYAKGVLTQKLGPWRRPVAYLSKKLDPVAAGWPPCLRMVAAIAVLTKDAGKLTMGQPLVILAPHAVEALVKQPPDRWLSNARMTHYQAMLLDTDRVQFGPVVALNPATLLPLPEKEAPHDCLEILAETHGTRPDLTDQPIPDADYTWYTDGSSFLQEGQRRAGAAVTTETEVIWARALPAGTSAQRAELIALTQALKMAEGKKLNVYTDSRYAFATAHVHGEIYRRRGWLTSEGREIKNKNEILALLKALFLPKRLSIIHCPGHQKGNSAEARGNRMADQAAREAAMKAVLETSTLLAGKRTADGSEFEKRTADGSEFESPKKKAKVE

SEQ ID NO: 988 - protein, 2090 aa, synthetic construct
MPAAKRVKLDGGDKKYSIGLDIGTNSVGWAVITDEYKVPSKKFKVLGNTDRHSIKKNLIGALLFDSGETAEATRLKRTARRRYTRRKNRICYLQEIFSNEMAKVDDSFFHRLEESFLVEEDKKHERHPIFGNIVDEVAYHEKYPTIYHLRKKLVDSTDKADLRLIYLALAHMIKFRGHFLIEGDLNPDNSDVDKLFIQLVQTYNQLFEENPINASGVDAKAILSARLSKSRRLENLIAQLPGEKKNGLFGNLIALSLGLTPNFKSNFDLAEDAKLQLSKDTYDDDLDNLLAQIGDQYADLFLAAKNLSDAILLSDILRVNTEITKAPLSASMIKRYDEHHQDLTLLKALVRQQLPEKYKEIFFDQSKNGYAGYIDGGASQEEFYKFIKPILEKMDGTEELLVKLNREDLLRKQRTFDNGSIPHQIHLGELHAILRRQEDFYPFLKDNREKIEKILTFRIPYYVGPLARGNSRFAWMTRKSEETITPWNFEEVVDKGASAQSFIERMTNFDKNLPNEKVLPKHSLLYEYFTVYNELTKVKYVTEGMRKPAFLSGEQKKAIVDLLFKTNRKVTVKQLKEDYFKKIECFDSVEISGVEDRFNASLGTYHDLLKIIKDKDFLDNEENEDILEDIVLTLTLFEDREMIEERLKTYAHLFDDKVMKQLKRRRYTGWGRLSRKLINGIRDKQSGKTILDFLKSDGFANRNFMQLIHDDSLTFKEDIQKAQVSGQGDSLHEHIANLAGSPAIKKGILQTVKVVDELVKVMGRHKPENIVIEMARENQTTQKGQKNSRERMKRIEEGIKELGSQILKEHPVENTQLQNEKLYLYYLQNGRDMYVDQELDINRLSDYDVDHIVPQSFLKDDSIDNKVLTRSDKARGKSDNVPSEEVVKKMKNYWRQLLNAKLITQRKFDNLTKAERGGLSELDKAGFIKRQLVETRQITKHVAQILDSRMNTKYDENDKLIREVKVITLKSKLVSDFRKDFQFYKVREINNYHHAHDAYLNAVVGTALIKKYPKLESEFVYGDYKVYDVRKMIAKSEQEIGKATAKYFFYSNIMNFFKTEITLANGEIRKRPLIETNGETGEIVWDKGRDFATVRKVLSMPQVNIVKKTEVQTGGFSKESILPKRNSDKLIARKKDWDPKKYGGFDSPTVAYSVLVVAKVEKGKSKKLKSVKELLGITIMERSSFEKNPIDFLEAKGYKEVKKDLIIKLPKYSLFELENGRKRMLASAGELQKGNELALPSKYVNFLYLASHYEKLKGSPEDNEQKQLFVEQHKHYLDEIIEQISEFSKRVILADANLDKVLSAYNKHRDKPIREQAENIIHLFTLTNLGAPAAFKYFDTTIDRKRYTSTKEVLDATLIHQSITGLYETRIDLSQLGGDGGEAAAKGGTLNIEDEYRLHETSKEPDVPLGSTWLSDFPQAWAETGGMGLAVRQAPLIIPLKATSTPVSIKQYPMSQEARLGIKPHIQRLLDQGILVPCQSPWNTPLLPVKKPGTNDYRPVQDLREVNKRVEDIHPTVPNPYNLLSGLPPSHQWYTVLDLKDAFFCLRLHPTSQPLFAFEWRDPEMGISGQLTWTRLPQGFKNSPTLFNEALHRDLADFRIQHPDLILLQYVDDLLLAATSEQDCQRGTRALLQTLGNLGYRASAKKAQICQKQVKYLGYLLKEGQRWLTEARKETVMGQPTPKTPRQLREFLGTAGFCRLWIPGFAEMAAPLYPLTKPGTLFNWGPDQQKAYQEIKQALLTAPALGLPDLTKPFELFVDEKQGYAKGVLTQKLGPWRRPVAYLSKKLDPVAAGWPPCLRMVAAIAVLTKDAGKLTMGQPLVILAPHAVEALVKQPPDRWLSNARMTHYQAMLLDTDRVQFGPVVALNPATLLPLPEKEAPHDCLEILAETHGTRPDLTDQPIPDADYTWYTDGSSFLQEGQRRAGAAVTTETEVIWARALPAGTSAQRAELIALTQALKMAEGKKLNVYTDSRYAFATAHVHGEIYRRRGWLTSEGREIKNKNEILALLKALFLPKRLSIIHCPGHQKGNSAEARGNRMADQAAREAAMKAVLETSTLLAGKRTADGSEFEKRTADGSEFESPKKKAKVE

SEQ ID NO: 989 - protein, 2094 aa, synthetic construct
MPAAKRVKLDGGDKKYSIGLDIGTNSVGWAVITDEYKVPSKKFKVLGNTDRHSIKKNLIGALLFDSGETAEATRLKRTARRRYTRRKNRICYLQEIFSNEMAKVDDSFFHRLEESFLVEEDKKHERHPIFGNIVDEVAYHEKYPTIYHLRKKLVDSTDKADLRLIYLALAHMIKFRGHFLIEGDLNPDNSDVDKLFIQLVQTYNQLFEENPINASGVDAKAILSARLSKSRRLENLIAQLPGEKKNGLFGNLIALSLGLTPNFKSNFDLAEDAKLQLSKDTYDDDLDNLLAQIGDQYADLFLAAKNLSDAILLSDILRVNTEITKAPLSASMIKRYDEHHQDLTLLKALVRQQLPEKYKEIFFDQSKNGYAGYIDGGASQEEFYKFIKPILEKMDGTEELLVKLNREDLLRKQRTFDNGSIPHQIHLGELHAILRRQEDFYPFLKDNREKIEKILTFRIPYYVGPLARGNSRFAWMTRKSEETITPWNFEEVVDKGASAQSFIERMTNFDKNLPNEKVLPKHSLLYEYFTVYNELTKVKYVTEGMRKPAFLSGEQKKAIVDLLFKTNRKVTVKQLKEDYFKKIECFDSVEISGVEDRFNASLGTYHDLLKIIKDKDFLDNEENEDILEDIVLTLTLFEDREMIEERLKTYAHLFDDKVMKQLKRRRYTGWGRLSRKLINGIRDKQSGKTILDFLKSDGFANRNFMQLIHDDSLTFKEDIQKAQVSGQGDSLHEHIANLAGSPAIKKGILQTVKVVDELVKVMGRHKPENIVIEMARENQTTQKGQKNSRERMKRIEEGIKELGSQILKEHPVENTQLQNEKLYLYYLQNGRDMYVDQELDINRLSDYDVDHIVPQSFLKDDSIDNKVLTRSDKARGKSDNVPSEEVVKKMKNYWRQLLNAKLITQRKFDNLTKAERGGLSELDKAGFIKRQLVETRQITKHVAQILDSRMNTKYDENDKLIREVKVITLKSKLVSDFRKDFQFYKVREINNYHHAHDAYLNAVVGTALIKKYPKLESEFVYGDYKVYDVRKMIAKSEQEIGKATAKYFFYSNIMNFFKTEITLANGEIRKRPLIETNGETGEIVWDKGRDFATVRKVLSMPQVNIVKKTEVQTGGFSKESILPKRNSDKLIARKKDWDPKKYGGFDSPTVAYSVLVVAKVEKGKSKKLKSVKELLGITIMERSSFEKNPIDFLEAKGYKEVKKDLIIKLPKYSLFELENGRKRMLASAGELQKGNELALPSKYVNFLYLASHYEKLKGSPEDNEQKQLFVEQHKHYLDEIIEQISEFSKRVILADANLDKVLSAYNKHRDKPIREQAENIIHLFTLTNLGAPAAFKYFDTTIDRKRYTSTKEVLDATLIHQSITGLYETRIDLSQLGGDGGGGGGGSGSSGGTLNIEDEYRLHETSKEPDVPLGSTWLSDFPQAWAETGGMGLAVRQAPLIIPLKATSTPVSIKQYPMSQEARLGIKPHIQRLLDQGILVPCQSPWNTPLLPVKKPGTNDYRPVQDLREVNKRVEDIHPTVPNPYNLLSGLPPSHQWYTVLDLKDAFFCLRLHPTSQPLFAFEWRDPEMGISGQLTWTRLPQGFKNSPTLFNEALHRDLADFRIQHPDLILLQYVDDLLLAATSEQDCQRGTRALLQTLGNLGYRASAKKAQICQKQVKYLGYLLKEGQRWLTEARKETVMGQPTPKTPRQLREFLGTAGFCRLWIPGFAEMAAPLYPLTKPGTLFNWGPDQQKAYQEIKQALLTAPALGLPDLTKPFELFVDEKQGYAKGVLTQKLGPWRRPVAYLSKKLDPVAAGWPPCLRMVAAIAVLTKDAGKLTMGQPLVILAPHAVEALVKQPPDRWLSNARMTHYQAMLLDTDRVQFGPVVALNPATLLPLPEKEAPHDCLEILAETHGTRPDLTDQPIPDADYTWYTDGSSFLQEGQRRAGAAVTTETEVIWARALPAGTSAQRAELIALTQALKMAEGKKLNVYTDSRYAFATAHVHGEIYRRRGWLTSEGREIKNKNEILALLKALFLPKRLSIIHCPGHQKGNSAEARGNRMADQAAREAAMKAVLETSTLLAGKRTADGSEFEKRTADGSEFESPKKKAKVE

SEQ ID NO: 990 - protein, 2091 aa, synthetic construct
MPAAKRVKLDGGDKKYSIGLDIGTNSVGWAVITDEYKVPSKKFKVLGNTDRHSIKKNLIGALLFDSGETAEATRLKRTARRRYTRRKNRICYLQEIFSNEMAKVDDSFFHRLEESFLVEEDKKHERHPIFGNIVDEVAYHEKYPTIYHLRKKLVDSTDKADLRLIYLALAHMIKFRGHFLIEGDLNPDNSDVDKLFIQLVQTYNQLFEENPINASGVDAKAILSARLSKSRRLENLIAQLPGEKKNGLFGNLIALSLGLTPNFKSNFDLAEDAKLQLSKDTYDDDLDNLLAQIGDQYADLFLAAKNLSDAILLSDILRVNTEITKAPLSASMIKRYDEHHQDLTLLKALVRQQLPEKYKEIFFDQSKNGYAGYIDGGASQEEFYKFIKPILEKMDGTEELLVKLNREDLLRKQRTFDNGSIPHQIHLGELHAILRRQEDFYPFLKDNREKIEKILTFRIPYYVGPLARGNSRFAWMTRKSEETITPWNFEEVVDKGASAQSFIERMTNFDKNLPNEKVLPKHSLLYEYFTVYNELTKVKYVTEGMRKPAFLSGEQKKAIVDLLFKTNRKVTVKQLKEDYFKKIECFDSVEISGVEDRFNASLGTYHDLLKIIKDKDFLDNEENEDILEDIVLTLTLFEDREMIEERLKTYAHLFDDKVMKQLKRRRYTGWGRLSRKLINGIRDKQSGKTILDFLKSDGFANRNFMQLIHDDSLTFKEDIQKAQVSGQGDSLHEHIANLAGSPAIKKGILQTVKVVDELVKVMGRHKPENIVIEMARENQTTQKGQKNSRERMKRIEEGIKELGSQILKEHPVENTQLQNEKLYLYYLQNGRDMYVDQELDINRLSDYDVDHIVPQSFLKDDSIDNKVLTRSDKARGKSDNVPSEEVVKKMKNYWRQLLNAKLITQRKFDNLTKAERGGLSELDKAGFIKRQLVETRQITKHVAQILDSRMNTKYDENDKLIREVKVITLKSKLVSDFRKDFQFYKVREINNYHHAHDAYLNAVVGTALIKKYPKLESEFVYGDYKVYDVRKMIAKSEQEIGKATAKYFFYSNIMNFFKTEITLANGEIRKRPLIETNGETGEIVWDKGRDFATVRKVLSMPQVNIVKKTEVQTGGFSKESILPKRNSDKLIARKKDWDPKKYGGFDSPTVAYSVLVVAKVEKGKSKKLKSVKELLGITIMERSSFEKNPIDFLEAKGYKEVKKDLIIKLPKYSLFELENGRKRMLASAGELQKGNELALPSKYVNFLYLASHYEKLKGSPEDNEQKQLFVEQHKHYLDEIIEQISEFSKRVILADANLDKVLSAYNKHRDKPIREQAENIIHLFTLTNLGAPAAFKYFDTTIDRKRYTSTKEVLDATLIHQSITGLYETRIDLSQLGGDGGPAPGSSGGTLNIEDEYRLHETSKEPDVPLGSTWLSDFPQAWAETGGMGLAVRQAPLIIPLKATSTPVSIKQYPMSQEARLGIKPHIQRLLDQGILVPCQSPWNTPLLPVKKPGTNDYRPVQDLREVNKRVEDIHPTVPNPYNLLSGLPPSHQWYTVLDLKDAFFCLRLHPTSQPLFAFEWRDPEMGISGQLTWTRLPQGFKNSPTLFNEALHRDLADFRIQHPDLILLQYVDDLLLAATSEQDCQRGTRALLQTLGNLGYRASAKKAQICQKQVKYLGYLLKEGQRWLTEARKETVMGQPTPKTPRQLREFLGTAGFCRLWIPGFAEMAAPLYPLTKPGTLFNWGPDQQKAYQEIKQALLTAPALGLPDLTKPFELFVDEKQGYAKGVLTQKLGPWRRPVAYLSKKLDPVAAGWPPCLRMVAAIAVLTKDAGKLTMGQPLVILAPHAVEALVKQPPDRWLSNARMTHYQAMLLDTDRVQFGPVVALNPATLLPLPEKEAPHDCLEILAETHGTRPDLTDQPIPDADYTWYTDGSSFLQEGQRRAGAAVTTETEVIWARALPAGTSAQRAELIALTQALKMAEGKKLNVYTDSRYAFATAHVHGEIYRRRGWLTSEGREIKNKNEILALLKALFLPKRLSIIHCPGHQKGNSAEARGNRMADQAAREAAMKAVLETSTLLAGKRTADGSEFEKRTADGSEFESPKKKAKVE

SEQ ID NO: 991 - protein, 2095 aa, synthetic construct
MPAAKRVKLDGGDKKYSIGLDIGTNSVGWAVITDEYKVPSKKFKVLGNTDRHSIKKNLIGALLFDSGETAEATRLKRTARRRYTRRKNRICYLQEIFSNEMAKVDDSFFHRLEESFLVEEDKKHERHPIFGNIVDEVAYHEKYPTIYHLRKKLVDSTDKADLRLIYLALAHMIKFRGHFLIEGDLNPDNSDVDKLFIQLVQTYNQLFEENPINASGVDAKAILSARLSKSRRLENLIAQLPGEKKNGLFGNLIALSLGLTPNFKSNFDLAEDAKLQLSKDTYDDDLDNLLAQIGDQYADLFLAAKNLSDAILLSDILRVNTEITKAPLSASMIKRYDEHHQDLTLLKALVRQQLPEKYKEIFFDQSKNGYAGYIDGGASQEEFYKFIKPILEKMDGTEELLVKLNREDLLRKQRTFDNGSIPHQIHLGELHAILRRQEDFYPFLKDNREKIEKILTFRIPYYVGPLARGNSRFAWMTRKSEETITPWNFEEVVDKGASAQSFIERMTNFDKNLPNEKVLPKHSLLYEYFTVYNELTKVKYVTEGMRKPAFLSGEQKKAIVDLLFKTNRKVTVKQLKEDYFKKIECFDSVEISGVEDRFNASLGTYHDLLKIIKDKDFLDNEENEDILEDIVLTLTLFEDREMIEERLKTYAHLFDDKVMKQLKRRRYTGWGRLSRKLINGIRDKQSGKTILDFLKSDGFANRNFMQLIHDDSLTFKEDIQKAQVSGQGDSLHEHIANLAGSPAIKKGILQTVKVVDELVKVMGRHKPENIVIEMARENQTTQKGQKNSRERMKRIEEGIKELGSQILKEHPVENTQLQNEKLYLYYLQNGRDMYVDQELDINRLSDYDVDHIVPQSFLKDDSIDNKVLTRSDKARGKSDNVPSEEVVKKMKNYWRQLLNAKLITQRKFDNLTKAERGGLSELDKAGFIKRQLVETRQITKHVAQILDSRMNTKYDENDKLIREVKVITLKSKLVSDFRKDFQFYKVREINNYHHAHDAYLNAVVGTALIKKYPKLESEFVYGDYKVYDVRKMIAKSEQEIGKATAKYFFYSNIMNFFKTEITLANGEIRKRPLIETNGETGEIVWDKGRDFATVRKVLSMPQVNIVKKTEVQTGGFSKESILPKRNSDKLIARKKDWDPKKYGGFDSPTVAYSVLVVAKVEKGKSKKLKSVKELLGITIMERSSFEKNPIDFLEAKGYKEVKKDLIIKLPKYSLFELENGRKRMLASAGELQKGNELALPSKYVNFLYLASHYEKLKGSPEDNEQKQLFVEQHKHYLDEIIEQISEFSKRVILADANLDKVLSAYNKHRDKPIREQAENIIHLFTLTNLGAPAAFKYFDTTIDRKRYTSTKEVLDATLIHQSITGLYETRIDLSQLGGDGGEAAAKEAAAKGGTLNIEDEYRLHETSKEPDVPLGSTWLSDFPQAWAETGGMGLAVRQAPLIIPLKATSTPVSIKQYPMSQEARLGIKPHIQRLLDQGILVPCQSPWNTPLLPVKKPGTNDYRPVQDLREVNKRVEDIHPTVPNPYNLLSGLPPSHQWYTVLDLKDAFFCLRLHPTSQPLFAFEWRDPEMGISGQLTWTRLPQGFKNSPTLFNEALHRDLADFRIQHPDLILLQYVDDLLLAATSEQDCQRGTRALLQTLGNLGYRASAKKAQICQKQVKYLGYLLKEGQRWLTEARKETVMGQPTPKTPRQLREFLGTAGFCRLWIPGFAEMAAPLYPLTKPGTLFNWGPDQQKAYQEIKQALLTAPALGLPDLTKPFELFVDEKQGYAKGVLTQKLGPWRRPVAYLSKKLDPVAAGWPPCLRMVAAIAVLTKDAGKLTMGQPLVILAPHAVEALVKQPPDRWLSNARMTHYQAMLLDTDRVQFGPVVALNPATLLPLPEKEAPHDCLEILAETHGTRPDLTDQPIPDADYTWYTDGSSFLQEGQRRAGAAVTTETEVIWARALPAGTSAQRAELIALTQALKMAEGKKLNVYTDSRYAFATAHVHGEIYRRRGWLTSEGREIKNKNEILALLKALFLPKRLSIIHCPGHQKGNSAEARGNRMADQAAREAAMKAVLETSTLLAGKRTADGSEFEKRTADGSEFESPKKKAKVE

SEQ ID NO: 992 - protein, 2091 aa, synthetic construct
MPAAKRVKLDGGDKKYSIGLDIGTNSVGWAVITDEYKVPSKKFKVLGNTDRHSIKKNLIGALLFDSGETAEATRLKRTARRRYTRRKNRICYLQEIFSNEMAKVDDSFFHRLEESFLVEEDKKHERHPIFGNIVDEVAYHEKYPTIYHLRKKLVDSTDKADLRLIYLALAHMIKFRGHFLIEGDLNPDNSDVDKLFIQLVQTYNQLFEENPINASGVDAKAILSARLSKSRRLENLIAQLPGEKKNGLFGNLIALSLGLTPNFKSNFDLAEDAKLQLSKDTYDDDLDNLLAQIGDQYADLFLAAKNLSDAILLSDILRVNTEITKAPLSASMIKRYDEHHQDLTLLKALVRQQLPEKYKEIFFDQSKNGYAGYIDGGASQEEFYKFIKPILEKMDGTEELLVKLNREDLLRKQRTFDNGSIPHQIHLGELHAILRRQEDFYPFLKDNREKIEKILTFRIPYYVGPLARGNSRFAWMTRKSEETITPWNFEEVVDKGASAQSFIERMTNFDKNLPNEKVLPKHSLLYEYFTVYNELTKVKYVTEGMRKPAFLSGEQKKAIVDLLFKTNRKVTVKQLKEDYFKKIECFDSVEISGVEDRFNASLGTYHDLLKIIKDKDFLDNEENEDILEDIVLTLTLFEDREMIEERLKTYAHLFDDKVMKQLKRRRYTGWGRLSRKLINGIRDKQSGKTILDFLKSDGFANRNFMQLIHDDSLTFKEDIQKAQVSGQGDSLHEHIANLAGSPAIKKGILQTVKVVDELVKVMGRHKPENIVIEMARENQTTQKGQKNSRERMKRIEEGIKELGSQILKEHPVENTQLQNEKLYLYYLQNGRDMYVDQELDINRLSDYDVDHIVPQSFLKDDSIDNKVLTRSDKARGKSDNVPSEEVVKKMKNYWRQLLNAKLITQRKFDNLTKAERGGLSELDKAGFIKRQLVETRQITKHVAQILDSRMNTKYDENDKLIREVKVITLKSKLVSDFRKDFQFYKVREINNYHHAHDAYLNAVVGTALIKKYPKLESEFVYGDYKVYDVRKMIAKSEQEIGKATAKYFFYSNIMNFFKTEITLANGEIRKRPLIETNGETGEIVWDKGRDFATVRKVLSMPQVNIVKKTEVQTGGFSKESILPKRNSDKLIARKKDWDPKKYGGFDSPTVAYSVLVVAKVEKGKSKKLKSVKELLGITIMERSSFEKNPIDFLEAKGYKEVKKDLIIKLPKYSLFELENGRKRMLASAGELQKGNELALPSKYVNFLYLASHYEKLKGSPEDNEQKQLFVEQHKHYLDEIIEQISEFSKRVILADANLDKVLSAYNKHRDKPIREQAENIIHLFTLTNLGAPAAFKYFDTTIDRKRYTSTKEVLDATLIHQSITGLYETRIDLSQLGGDGGGSSGGGGGTLNIEDEYRLHETSKEPDVPLGSTWLSDFPQAWAETGGMGLAVRQAPLIIPLKATSTPVSIKQYPMSQEARLGIKPHIQRLLDQGILVPCQSPWNTPLLPVKKPGTNDYRPVQDLREVNKRVEDIHPTVPNPYNLLSGLPPSHQWYTVLDLKDAFFCLRLHPTSQPLFAFEWRDPEMGISGQLTWTRLPQGFKNSPTLFNEALHRDLADFRIQHPDLILLQYVDDLLLAATSEQDCQRGTRALLQTLGNLGYRASAKKAQICQKQVKYLGYLLKEGQRWLTEARKETVMGQPTPKTPRQLREFLGTAGFCRLWIPGFAEMAAPLYPLTKPGTLFNWGPDQQKAYQEIKQALLTAPALGLPDLTKPFELFVDEKQGYAKGVLTQKLGPWRRPVAYLSKKLDPVAAGWPPCLRMVAAIAVLTKDAGKLTMGQPLVILAPHAVEALVKQPPDRWLSNARMTHYQAMLLDTDRVQFGPVVALNPATLLPLPEKEAPHDCLEILAETHGTRPDLTDQPIPDADYTWYTDGSSFLQEGQRRAGAAVTTETEVIWARALPAGTSAQRAELIALTQALKMAEGKKLNVYTDSRYAFATAHVHGEIYRRRGWLTSEGREIKNKNEILALLKALFLPKRLSIIHCPGHQKGNSAEARGNRMADQAAREAAMKAVLETSTLLAGKRTADGSEFEKRTADGSEFESPKKKAKVE

SEQ ID NO: 993 - protein, 2093 aa, synthetic construct
MPAAKRVKLDGGDKKYSIGLDIGTNSVGWAVITDEYKVPSKKFKVLGNTDRHSIKKNLIGALLFDSGETAEATRLKRTARRRYTRRKNRICYLQEIFSNEMAKVDDSFFHRLEESFLVEEDKKHERHPIFGNIVDEVAYHEKYPTIYHLRKKLVDSTDKADLRLIYLALAHMIKFRGHFLIEGDLNPDNSDVDKLFIQLVQTYNQLFEENPINASGVDAKAILSARLSKSRRLENLIAQLPGEKKNGLFGNLIALSLGLTPNFKSNFDLAEDAKLQLSKDTYDDDLDNLLAQIGDQYADLFLAAKNLSDAILLSDILRVNTEITKAPLSASMIKRYDEHHQDLTLLKALVRQQLPEKYKEIFFDQSKNGYAGYIDGGASQEEFYKFIKPILEKMDGTEELLVKLNREDLLRKQRTFDNGSIPHQIHLGELHAILRRQEDFYPFLKDNREKIEKILTFRIPYYVGPLARGNSRFAWMTRKSEETITPWNFEEVVDKGASAQSFIERMTNFDKNLPNEKVLPKHSLLYEYFTVYNELTKVKYVTEGMRKPAFLSGEQKKAIVDLLFKTNRKVTVKQLKEDYFKKIECFDSVEISGVEDRFNASLGTYHDLLKIIKDKDFLDNEENEDILEDIVLTLTLFEDREMIEERLKTYAHLFDDKVMKQLKRRRYTGWGRLSRKLINGIRDKQSGKTILDFLKSDGFANRNFMQLIHDDSLTFKEDIQKAQVSGQGDSLHEHIANLAGSPAIKKGILQTVKVVDELVKVMGRHKPENIVIEMARENQTTQKGQKNSRERMKRIEEGIKELGSQILKEHPVENTQLQNEKLYLYYLQNGRDMYVDQELDINRLSDYDVDHIVPQSFLKDDSIDNKVLTRSDKARGKSDNVPSEEVVKKMKNYWRQLLNAKLITQRKFDNLTKAERGGLSELDKAGFIKRQLVETRQITKHVAQILDSRMNTKYDENDKLIREVKVITLKSKLVSDFRKDFQFYKVREINNYHHAHDAYLNAVVGTALIKKYPKLESEFVYGDYKVYDVRKMIAKSEQEIGKATAKYFFYSNIMNFFKTEITLANGEIRKRPLIETNGETGEIVWDKGRDFATVRKVLSMPQVNIVKKTEVQTGGFSKESILPKRNSDKLIARKKDWDPKKYGGFDSPTVAYSVLVVAKVEKGKSKKLKSVKELLGITIMERSSFEKNPIDFLEAKGYKEVKKDLIIKLPKYSLFELENGRKRMLASAGELQKGNELALPSKYVNFLYLASHYEKLKGSPEDNEQKQLFVEQHKHYLDEIIEQISEFSKRVILADANLDKVLSAYNKHRDKPIREQAENIIHLFTLTNLGAPAAFKYFDTTIDRKRYTSTKEVLDATLIHQSITGLYETRIDLSQLGGDGGGGSEAAAKGGTLNIEDEYRLHETSKEPDVPLGSTWLSDFPQAWAETGGMGLAVRQAPLIIPLKATSTPVSIKQYPMSQEARLGIKPHIQRLLDQGILVPCQSPWNTPLLPVKKPGTNDYRPVQDLREVNKRVEDIHPTVPNPYNLLSGLPPSHQWYTVLDLKDAFFCLRLHPTSQPLFAFEWRDPEMGISGQLTWTRLPQGFKNSPTLFNEALHRDLADFRIQHPDLILLQYVDDLLLAATSEQDCQRGTRALLQTLGNLGYRASAKKAQICQKQVKYLGYLLKEGQRWLTEARKETVMGQPTPKTPRQLREFLGTAGFCRLWIPGFAEMAAPLYPLTKPGTLFNWGPDQQKAYQEIKQALLTAPALGLPDLTKPFELFVDEKQGYAKGVLTQKLGPWRRPVAYLSKKLDPVAAGWPPCLRMVAAIAVLTKDAGKLTMGQPLVILAPHAVEALVKQPPDRWLSNARMTHYQAMLLDTDRVQFGPVVALNPATLLPLPEKEAPHDCLEILAETHGTRPDLTDQPIPDADYTWYTDGSSFLQEGQRRAGAAVTTETEVIWARALPAGTSAQRAELIALTQALKMAEGKKLNVYTDSRYAFATAHVHGEIYRRRGWLTSEGREIKNKNEILALLKALFLPKRLSIIHCPGHQKGNSAEARGNRMADQAAREAAMKAVLETSTLLAGKRTADGSEFEKRTADGSEFESPKKKAKVE

SEQ ID NO: 994 - protein, 2100 aa, synthetic construct
MPAAKRVKLDGGDKKYSIGLDIGTNSVGWAVITDEYKVPSKKFKVLGNTDRHSIKKNLIGALLFDSGETAEATRLKRTARRRYTRRKNRICYLQEIFSNEMAKVDDSFFHRLEESFLVEEDKKHERHPIFGNIVDEVAYHEKYPTIYHLRKKLVDSTDKADLRLIYLALAHMIKFRGHFLIEGDLNPDNSDVDKLFIQLVQTYNQLFEENPINASGVDAKAILSARLSKSRRLENLIAQLPGEKKNGLFGNLIALSLGLTPNFKSNFDLAEDAKLQLSKDTYDDDLDNLLAQIGDQYADLFLAAKNLSDAILLSDILRVNTEITKAPLSASMIKRYDEHHQDLTLLKALVRQQLPEKYKEIFFDQSKNGYAGYIDGGASQEEFYKFIKPILEKMDGTEELLVKLNREDLLRKQRTFDNGSIPHQIHLGELHAILRRQEDFYPFLKDNREKIEKILTFRIPYYVGPLARGNSRFAWMTRKSEETITPWNFEEVVDKGASAQSFIERMTNFDKNLPNEKVLPKHSLLYEYFTVYNELTKVKYVTEGMRKPAFLSGEQKKAIVDLLFKTNRKVTVKQLKEDYFKKIECFDSVEISGVEDRFNASLGTYHDLLKIIKDKDFLDNEENEDILEDIVLTLTLFEDREMIEERLKTYAHLFDDKVMKQLKRRRYTGWGRLSRKLINGIRDKQSGKTILDFLKSDGFANRNFMQLIHDDSLTFKEDIQKAQVSGQGDSLHEHIANLAGSPAIKKGILQTVKVVDELVKVMGRHKPENIVIEMARENQTTQKGQKNSRERMKRIEEGIKELGSQILKEHPVENTQLQNEKLYLYYLQNGRDMYVDQELDINRLSDYDVDHIVPQSFLKDDSIDNKVLTRSDKARGKSDNVPSEEVVKKMKNYWRQLLNAKLITQRKFDNLTKAERGGLSELDKAGFIKRQLVETRQITKHVAQILDSRMNTKYDENDKLIREVKVITLKSKLVSDFRKDFQFYKVREINNYHHAHDAYLNAVVGTALIKKYPKLESEFVYGDYKVYDVRKMIAKSEQEIGKATAKYFFYSNIMNFFKTEITLANGEIRKRPLIETNGETGEIVWDKGRDFATVRKVLSMPQVNIVKKTEVQTGGFSKESILPKRNSDKLIARKKDWDPKKYGGFDSPTVAYSVLVVAKVEKGKSKKLKSVKELLGITIMERSSFEKNPIDFLEAKGYKEVKKDLIIKLPKYSLFELENGRKRMLASAGELQKGNELALPSKYVNFLYLASHYEKLKGSPEDNEQKQLFVEQHKHYLDEIIEQISEFSKRVILADANLDKVLSAYNKHRDKPIREQAENIIHLFTLTNLGAPAAFKYFDTTIDRKRYTSTKEVLDATLIHQSITGLYETRIDLSQLGGDGGGGSGGSGGSGGSGGSGGTLNIEDEYRLHETSKEPDVPLGSTWLSDFPQAWAETGGMGLAVRQAPLIIPLKATSTPVSIKQYPMSQEARLGIKPHIQRLLDQGILVPCQSPWNTPLLPVKKPGTNDYRPVQDLREVNKRVEDIHPTVPNPYNLLSGLPPSHQWYTVLDLKDAFFCLRLHPTSQPLFAFEWRDPEMGISGQLTWTRLPQGFKNSPTLFNEALHRDLADFRIQHPDLILLQYVDDLLLAATSEQDCQRGTRALLQTLGNLGYRASAKKAQICQKQVKYLGYLLKEGQRWLTEARKETVMGQPTPKTPRQLREFLGTAGFCRLWIPGFAEMAAPLYPLTKPGTLFNWGPDQQKAYQEIKQALLTAPALGLPDLTKPFELFVDEKQGYAKGVLTQKLGPWRRPVAYLSKKLDPVAAGWPPCLRMVAAIAVLTKDAGKLTMGQPLVILAPHAVEALVKQPPDRWLSNARMTHYQAMLLDTDRVQFGPVVALNPATLLPLPEKEAPHDCLEILAETHGTRPDLTDQPIPDADYTWYTDGSSFLQEGQRRAGAAVTTETEVIWARALPAGTSAQRAELIALTQALKMAEGKKLNVYTDSRYAFATAHVHGEIYRRRGWLTSEGREIKNKNEILALLKALFLPKRLSIIHCPGHQKGNSAEARGNRMADQAAREAAMKAVLETSTLLAGKRTADGSEFEKRTADGSEFESPKKKAKVE

SEQ ID NO: 995 - protein, 2094 aa, synthetic construct
MPAAKRVKLDGGDKKYSIGLDIGTNSVGWAVITDEYKVPSKKFKVLGNTDRHSIKKNLIGALLFDSGETAEATRLKRTARRRYTRRKNRICYLQEIFSNEMAKVDDSFFHRLEESFLVEEDKKHERHPIFGNIVDEVAYHEKYPTIYHLRKKLVDSTDKADLRLIYLALAHMIKFRGHFLIEGDLNPDNSDVDKLFIQLVQTYNQLFEENPINASGVDAKAILSARLSKSRRLENLIAQLPGEKKNGLFGNLIALSLGLTPNFKSNFDLAEDAKLQLSKDTYDDDLDNLLAQIGDQYADLFLAAKNLSDAILLSDILRVNTEITKAPLSASMIKRYDEHHQDLTLLKALVRQQLPEKYKEIFFDQSKNGYAGYIDGGASQEEFYKFIKPILEKMDGTEELLVKLNREDLLRKQRTFDNGSIPHQIHLGELHAILRRQEDFYPFLKDNREKIEKILTFRIPYYVGPLARGNSRFAWMTRKSEETITPWNFEEVVDKGASAQSFIERMTNFDKNLPNEKVLPKHSLLYEYFTVYNELTKVKYVTEGMRKPAFLSGEQKKAIVDLLFKTNRKVTVKQLKEDYFKKIECFDSVEISGVEDRFNASLGTYHDLLKIIKDKDFLDNEENEDILEDIVLTLTLFEDREMIEERLKTYAHLFDDKVMKQLKRRRYTGWGRLSRKLINGIRDKQSGKTILDFLKSDGFANRNFMQLIHDDSLTFKEDIQKAQVSGQGDSLHEHIANLAGSPAIKKGILQTVKVVDELVKVMGRHKPENIVIEMARENQTTQKGQKNSRERMKRIEEGIKELGSQILKEHPVENTQLQNEKLYLYYLQNGRDMYVDQELDINRLSDYDVDHIVPQSFLKDDSIDNKVLTRSDKARGKSDNVPSEEVVKKMKNYWRQLLNAKLITQRKFDNLTKAERGGLSELDKAGFIKRQLVETRQITKHVAQILDSRMNTKYDENDKLIREVKVITLKSKLVSDFRKDFQFYKVREINNYHHAHDAYLNAVVGTALIKKYPKLESEFVYGDYKVYDVRKMIAKSEQEIGKATAKYFFYSNIMNFFKTEITLANGEIRKRPLIETNGETGEIVWDKGRDFATVRKVLSMPQVNIVKKTEVQTGGFSKESILPKRNSDKLIARKKDWDPKKYGGFDSPTVAYSVLVVAKVEKGKSKKLKSVKELLGITIMERSSFEKNPIDFLEAKGYKEVKKDLIIKLPKYSLFELENGRKRMLASAGELQKGNELALPSKYVNFLYLASHYEKLKGSPEDNEQKQLFVEQHKHYLDEIIEQISEFSKRVILADANLDKVLSAYNKHRDKPIREQAENIIHLFTLTNLGAPAAFKYFDTTIDRKRYTSTKEVLDATLIHQSITGLYETRIDLSQLGGDGGGGSGSSGGGGGTLNIEDEYRLHETSKEPDVPLGSTWLSDFPQAWAETGGMGLAVRQAPLIIPLKATSTPVSIKQYPMSQEARLGIKPHIQRLLDQGILVPCQSPWNTPLLPVKKPGTNDYRPVQDLREVNKRVEDIHPTVPNPYNLLSGLPPSHQWYTVLDLKDAFFCLRLHPTSQPLFAFEWRDPEMGISGQLTWTRLPQGFKNSPTLFNEALHRDLADFRIQHPDLILLQYVDDLLLAATSEQDCQRGTRALLQTLGNLGYRASAKKAQICQKQVKYLGYLLKEGQRWLTEARKETVMGQPTPKTPRQLREFLGTAGFCRLWIPGFAEMAAPLYPLTKPGTLFNWGPDQQKAYQEIKQALLTAPALGLPDLTKPFELFVDEKQGYAKGVLTQKLGPWRRPVAYLSKKLDPVAAGWPPCLRMVAAIAVLTKDAGKLTMGQPLVILAPHAVEALVKQPPDRWLSNARMTHYQAMLLDTDRVQFGPVVALNPATLLPLPEKEAPHDCLEILAETHGTRPDLTDQPIPDADYTWYTDGSSFLQEGQRRAGAAVTTETEVIWARALPAGTSAQRAELIALTQALKMAEGKKLNVYTDSRYAFATAHVHGEIYRRRGWLTSEGREIKNKNEILALLKALFLPKRLSIIHCPGHQKGNSAEARGNRMADQAAREAAMKAVLETSTLLAGKRTADGSEFEKRTADGSEFESPKKKAKVE

SEQ ID NO: 996 - protein, 2100 aa, synthetic construct
MPAAKRVKLDGGDKKYSIGLDIGTNSVGWAVITDEYKVPSKKFKVLGNTDRHSIKKNLIGALLFDSGETAEATRLKRTARRRYTRRKNRICYLQEIFSNEMAKVDDSFFHRLEESFLVEEDKKHERHPIFGNIVDEVAYHEKYPTIYHLRKKLVDSTDKADLRLIYLALAHMIKFRGHFLIEGDLNPDNSDVDKLFIQLVQTYNQLFEENPINASGVDAKAILSARLSKSRRLENLIAQLPGEKKNGLFGNLIALSLGLTPNFKSNFDLAEDAKLQLSKDTYDDDLDNLLAQIGDQYADLFLAAKNLSDAILLSDILRVNTEITKAPLSASMIKRYDEHHQDLTLLKALVRQQLPEKYKEIFFDQSKNGYAGYIDGGASQEEFYKFIKPILEKMDGTEELLVKLNREDLLRKQRTFDNGSIPHQIHLGELHAILRRQEDFYPFLKDNREKIEKILTFRIPYYVGPLARGNSRFAWMTRKSEETITPWNFEEVVDKGASAQSFIERMTNFDKNLPNEKVLPKHSLLYEYFTVYNELTKVKYVTEGMRKPAFLSGEQKKAIVDLLFKTNRKVTVKQLKEDYFKKIECFDSVEISGVEDRFNASLGTYHDLLKIIKDKDFLDNEENEDILEDIVLTLTLFEDREMIEERLKTYAHLFDDKVMKQLKRRRYTGWGRLSRKLINGIRDKQSGKTILDFLKSDGFANRNFMQLIHDDSLTFKEDIQKAQVSGQGDSLHEHIANLAGSPAIKKGILQTVKVVDELVKVMGRHKPENIVIEMARENQTTQKGQKNSRERMKRIEEGIKELGSQILKEHPVENTQLQNEKLYLYYLQNGRDMYVDQELDINRLSDYDVDHIVPQSFLKDDSIDNKVLTRSDKARGKSDNVPSEEVVKKMKNYWRQLLNAKLITQRKFDNLTKAERGGLSELDKAGFIKRQLVETRQITKHVAQILDSRMNTKYDENDKLIREVKVITLKSKLVSDFRKDFQFYKVREINNYHHAHDAYLNAVVGTALIKKYPKLESEFVYGDYKVYDVRKMIAKSEQEIGKATAKYFFYSNIMNFFKTEITLANGEIRKRPLIETNGETGEIVWDKGRDFATVRKVLSMPQVNIVKKTEVQTGGFSKESILPKRNSDKLIARKKDWDPKKYGGFDSPTVAYSVLVVAKVEKGKSKKLKSVKELLGITIMERSSFEKNPIDFLEAKGYKEVKKDLIIKLPKYSLFELENGRKRMLASAGELQKGNELALPSKYVNFLYLASHYEKLKGSPEDNEQKQLFVEQHKHYLDEIIEQISEFSKRVILADANLDKVLSAYNKHRDKPIREQAENIIHLFTLTNLGAPAAFKYFDTTIDRKRYTSTKEVLDATLIHQSITGLYETRIDLSQLGGDGGEAAAKEAAAKEAAAKGGTLNIEDEYRLHETSKEPDVPLGSTWLSDFPQAWAETGGMGLAVRQAPLIIPLKATSTPVSIKQYPMSQEARLGIKPHIQRLLDQGILVPCQSPWNTPLLPVKKPGTNDYRPVQDLREVNKRVEDIHPTVPNPYNLLSGLPPSHQWYTVLDLKDAFFCLRLHPTSQPLFAFEWRDPEMGISGQLTWTRLPQGFKNSPTLFNEALHRDLADFRIQHPDLILLQYVDDLLLAATSEQDCQRGTRALLQTLGNLGYRASAKKAQICQKQVKYLGYLLKEGQRWLTEARKETVMGQPTPKTPRQLREFLGTAGFCRLWIPGFAEMAAPLYPLTKPGTLFNWGPDQQKAYQEIKQALLTAPALGLPDLTKPFELFVDEKQGYAKGVLTQKLGPWRRPVAYLSKKLDPVAAGWPPCLRMVAAIAVLTKDAGKLTMGQPLVILAPHAVEALVKQPPDRWLSNARMTHYQAMLLDTDRVQFGPVVALNPATLLPLPEKEAPHDCLEILAETHGTRPDLTDQPIPDADYTWYTDGSSFLQEGQRRAGAAVTTETEVIWARALPAGTSAQRAELIALTQALKMAEGKKLNVYTDSRYAFATAHVHGEIYRRRGWLTSEGREIKNKNEILALLKALFLPKRLSIIHCPGHQKGNSAEARGNRMADQAAREAAMKAVLETSTLLAGKRTADGSEFEKRTADGSEFESPKKKAKVE

SEQ ID NO: 997 - protein, 2088 aa, synthetic construct
MPAAKRVKLDGGDKKYSIGLDIGTNSVGWAVITDEYKVPSKKFKVLGNTDRHSIKKNLIGALLFDSGETAEATRLKRTARRRYTRRKNRICYLQEIFSNEMAKVDDSFFHRLEESFLVEEDKKHERHPIFGNIVDEVAYHEKYPTIYHLRKKLVDSTDKADLRLIYLALAHMIKFRGHFLIEGDLNPDNSDVDKLFIQLVQTYNQLFEENPINASGVDAKAILSARLSKSRRLENLIAQLPGEKKNGLFGNLIALSLGLTPNFKSNFDLAEDAKLQLSKDTYDDDLDNLLAQIGDQYADLFLAAKNLSDAILLSDILRVNTEITKAPLSASMIKRYDEHHQDLTLLKALVRQQLPEKYKEIFFDQSKNGYAGYIDGGASQEEFYKFIKPILEKMDGTEELLVKLNREDLLRKQRTFDNGSIPHQIHLGELHAILRRQEDFYPFLKDNREKIEKILTFRIPYYVGPLARGNSRFAWMTRKSEETITPWNFEEVVDKGASAQSFIERMTNFDKNLPNEKVLPKHSLLYEYFTVYNELTKVKYVTEGMRKPAFLSGEQKKAIVDLLFKTNRKVTVKQLKEDYFKKIECFDSVEISGVEDRFNASLGTYHDLLKIIKDKDFLDNEENEDILEDIVLTLTLFEDREMIEERLKTYAHLFDDKVMKQLKRRRYTGWGRLSRKLINGIRDKQSGKTILDFLKSDGFANRNFMQLIHDDSLTFKEDIQKAQVSGQGDSLHEHIANLAGSPAIKKGILQTVKVVDELVKVMGRHKPENIVIEMARENQTTQKGQKNSRERMKRIEEGIKELGSQILKEHPVENTQLQNEKLYLYYLQNGRDMYVDQELDINRLSDYDVDHIVPQSFLKDDSIDNKVLTRSDKARGKSDNVPSEEVVKKMKNYWRQLLNAKLITQRKFDNLTKAERGGLSELDKAGFIKRQLVETRQITKHVAQILDSRMNTKYDENDKLIREVKVITLKSKLVSDFRKDFQFYKVREINNYHHAHDAYLNAVVGTALIKKYPKLESEFVYGDYKVYDVRKMIAKSEQEIGKATAKYFFYSNIMNFFKTEITLANGEIRKRPLIETNGETGEIVWDKGRDFATVRKVLSMPQVNIVKKTEVQTGGFSKESILPKRNSDKLIARKKDWDPKKYGGFDSPTVAYSVLVVAKVEKGKSKKLKSVKELLGITIMERSSFEKNPIDFLEAKGYKEVKKDLIIKLPKYSLFELENGRKRMLASAGELQKGNELALPSKYVNFLYLASHYEKLKGSPEDNEQKQLFVEQHKHYLDEIIEQISEFSKRVILADANLDKVLSAYNKHRDKPIREQAENIIHLFTLTNLGAPAAFKYFDTTIDRKRYTSTKEVLDATLIHQSITGLYETRIDLSQLGGDGGGGGGGTLNIEDEYRLHETSKEPDVPLGSTWLSDFPQAWAETGGMGLAVRQAPLIIPLKATSTPVSIKQYPMSQEARLGIKPHIQRLLDQGILVPCQSPWNTPLLPVKKPGTNDYRPVQDLREVNKRVEDIHPTVPNPYNLLSGLPPSHQWYTVLDLKDAFFCLRLHPTSQPLFAFEWRDPEMGISGQLTWTRLPQGFKNSPTLFNEALHRDLADFRIQHPDLILLQYVDDLLLAATSEQDCQRGTRALLQTLGNLGYRASAKKAQICQKQVKYLGYLLKEGQRWLTEARKETVMGQPTPKTPRQLREFLGTAGFCRLWIPGFAEMAAPLYPLTKPGTLFNWGPDQQKAYQEIKQALLTAPALGLPDLTKPFELFVDEKQGYAKGVLTQKLGPWRRPVAYLSKKLDPVAAGWPPCLRMVAAIAVLTKDAGKLTMGQPLVILAPHAVEALVKQPPDRWLSNARMTHYQAMLLDTDRVQFGPVVALNPATLLPLPEKEAPHDCLEILAETHGTRPDLTDQPIPDADYTWYTDGSSFLQEGQRRAGAAVTTETEVIWARALPAGTSAQRAELIALTQALKMAEGKKLNVYTDSRYAFATAHVHGEIYRRRGWLTSEGREIKNKNEILALLKALFLPKRLSIIHCPGHQKGNSAEARGNRMADQAAREAAMKAVLETSTLLAGKRTADGSEFEKRTADGSEFESPKKKAKVE

SEQ ID NO: 998 - protein, 2090 aa, synthetic construct
MPAAKRVKLDGGDKKYSIGLDIGTNSVGWAVITDEYKVPSKKFKVLGNTDRHSIKKNLIGALLFDSGETAEATRLKRTARRRYTRRKNRICYLQEIFSNEMAKVDDSFFHRLEESFLVEEDKKHERHPIFGNIVDEVAYHEKYPTIYHLRKKLVDSTDKADLRLIYLALAHMIKFRGHFLIEGDLNPDNSDVDKLFIQLVQTYNQLFEENPINASGVDAKAILSARLSKSRRLENLIAQLPGEKKNGLFGNLIALSLGLTPNFKSNFDLAEDAKLQLSKDTYDDDLDNLLAQIGDQYADLFLAAKNLSDAILLSDILRVNTEITKAPLSASMIKRYDEHHQDLTLLKALVRQQLPEKYKEIFFDQSKNGYAGYIDGGASQEEFYKFIKPILEKMDGTEELLVKLNREDLLRKQRTFDNGSIPHQIHLGELHAILRRQEDFYPFLKDNREKIEKILTFRIPYYVGPLARGNSRFAWMTRKSEETITPWNFEEVVDKGASAQSFIERMTNFDKNLPNEKVLPKHSLLYEYFTVYNELTKVKYVTEGMRKPAFLSGEQKKAIVDLLFKTNRKVTVKQLKEDYFKKIECFDSVEISGVEDRFNASLGTYHDLLKIIKDKDFLDNEENEDILEDIVLTLTLFEDREMIEERLKTYAHLFDDKVMKQLKRRRYTGWGRLSRKLINGIRDKQSGKTILDFLKSDGFANRNFMQLIHDDSLTFKEDIQKAQVSGQGDSLHEHIANLAGSPAIKKGILQTVKVVDELVKVMGRHKPENIVIEMARENQTTQKGQKNSRERMKRIEEGIKELGSQILKEHPVENTQLQNEKLYLYYLQNGRDMYVDQELDINRLSDYDVDHIVPQSFLKDDSIDNKVLTRSDKARGKSDNVPSEEVVKKMKNYWRQLLNAKLITQRKFDNLTKAERGGLSELDKAGFIKRQLVETRQITKHVAQILDSRMNTKYDENDKLIREVKVITLKSKLVSDFRKDFQFYKVREINNYHHAHDAYLNAVVGTALIKKYPKLESEFVYGDYKVYDVRKMIAKSEQEIGKATAKYFFYSNIMNFFKTEITLANGEIRKRPLIETNGETGEIVWDKGRDFATVRKVLSMPQVNIVKKTEVQTGGFSKESILPKRNSDKLIARKKDWDPKKYGGFDSPTVAYSVLVVAKVEKGKSKKLKSVKELLGITIMERSSFEKNPIDFLEAKGYKEVKKDLIIKLPKYSLFELENGRKRMLASAGELQKGNELALPSKYVNFLYLASHYEKLKGSPEDNEQKQLFVEQHKHYLDEIIEQISEFSKRVILADANLDKVLSAYNKHRDKPIREQAENIIHLFTLTNLGAPAAFKYFDTTIDRKRYTSTKEVLDATLIHQSITGLYETRIDLSQLGGDGGGGGGSGGTLNIEDEYRLHETSKEPDVPLGSTWLSDFPQAWAETGGMGLAVRQAPLIIPLKATSTPVSIKQYPMSQEARLGIKPHIQRLLDQGILVPCQSPWNTPLLPVKKPGTNDYRPVQDLREVNKRVEDIHPTVPNPYNLLSGLPPSHQWYTVLDLKDAFFCLRLHPTSQPLFAFEWRDPEMGISGQLTWTRLPQGFKNSPTLFNEALHRDLADFRIQHPDLILLQYVDDLLLAATSEQDCQRGTRALLQTLGNLGYRASAKKAQICQKQVKYLGYLLKEGQRWLTEARKETVMGQPTPKTPRQLREFLGTAGFCRLWIPGFAEMAAPLYPLTKPGTLFNWGPDQQKAYQEIKQALLTAPALGLPDLTKPFELFVDEKQGYAKGVLTQKLGPWRRPVAYLSKKLDPVAAGWPPCLRMVAAIAVLTKDAGKLTMGQPLVILAPHAVEALVKQPPDRWLSNARMTHYQAMLLDTDRVQFGPVVALNPATLLPLPEKEAPHDCLEILAETHGTRPDLTDQPIPDADYTWYTDGSSFLQEGQRRAGAAVTTETEVIWARALPAGTSAQRAELIALTQALKMAEGKKLNVYTDSRYAFATAHVHGEIYRRRGWLTSEGREIKNKNEILALLKALFLPKRLSIIHCPGHQKGNSAEARGNRMADQAAREAAMKAVLETSTLLAGKRTADGSEFEKRTADGSEFESPKKKAKVE

SEQ ID NO: 999 - protein, 2094 aa, synthetic construct
MPAAKRVKLDGGDKKYSIGLDIGTNSVGWAVITDEYKVPSKKFKVLGNTDRHSIKKNLIGALLFDSGETAEATRLKRTARRRYTRRKNRICYLQEIFSNEMAKVDDSFFHRLEESFLVEEDKKHERHPIFGNIVDEVAYHEKYPTIYHLRKKLVDSTDKADLRLIYLALAHMIKFRGHFLIEGDLNPDNSDVDKLFIQLVQTYNQLFEENPINASGVDAKAILSARLSKSRRLENLIAQLPGEKKNGLFGNLIALSLGLTPNFKSNFDLAEDAKLQLSKDTYDDDLDNLLAQIGDQYADLFLAAKNLSDAILLSDILRVNTEITKAPLSASMIKRYDEHHQDLTLLKALVRQQLPEKYKEIFFDQSKNGYAGYIDGGASQEEFYKFIKPILEKMDGTEELLVKLNREDLLRKQRTFDNGSIPHQIHLGELHAILRRQEDFYPFLKDNREKIEKILTFRIPYYVGPLARGNSRFAWMTRKSEETITPWNFEEVVDKGASAQSFIERMTNFDKNLPNEKVLPKHSLLYEYFTVYNELTKVKYVTEGMRKPAFLSGEQKKAIVDLLFKTNRKVTVKQLKEDYFKKIECFDSVEISGVEDRFNASLGTYHDLLKIIKDKDFLDNEENEDILEDIVLTLTLFEDREMIEERLKTYAHLFDDKVMKQLKRRRYTGWGRLSRKLINGIRDKQSGKTILDFLKSDGFANRNFMQLIHDDSLTFKEDIQKAQVSGQGDSLHEHIANLAGSPAIKKGILQTVKVVDELVKVMGRHKPENIVIEMARENQTTQKGQKNSRERMKRIEEGIKELGSQILKEHPVENTQLQNEKLYLYYLQNGRDMYVDQELDINRLSDYDVDHIVPQSFLKDDSIDNKVLTRSDKARGKSDNVPSEEVVKKMKNYWRQLLNAKLITQRKFDNLTKAERGGLSELDKAGFIKRQLVETRQITKHVAQILDSRMNTKYDENDKLIREVKVITLKSKLVSDFRKDFQFYKVREINNYHHAHDAYLNAVVGTALIKKYPKLESEFVYGDYKVYDVRKMIAKSEQEIGKATAKYFFYSNIMNFFKTEITLANGEIRKRPLIETNGETGEIVWDKGRDFATVRKVLSMPQVNIVKKTEVQTGGFSKESILPKRNSDKLIARKKDWDPKKYGGFDSPTVAYSVLVVAKVEKGKSKKLKSVKELLGITIMERSSFEKNPIDFLEAKGYKEVKKDLIIKLPKYSLFELENGRKRMLASAGELQKGNELALPSKYVNFLYLASHYEKLKGSPEDNEQKQLFVEQHKHYLDEIIEQISEFSKRVILADANLDKVLSAYNKHRDKPIREQAENIIHLFTLTNLGAPAAFKYFDTTIDRKRYTSTKEVLDATLIHQSITGLYETRIDLSQLGGDGGGGGGGSPAPGGTLNIEDEYRLHETSKEPDVPLGSTWLSDFPQAWAETGGMGLAVRQAPLIIPLKATSTPVSIKQYPMSQEARLGIKPHIQRLLDQGILVPCQSPWNTPLLPVKKPGTNDYRPVQDLREVNKRVEDIHPTVPNPYNLLSGLPPSHQWYTVLDLKDAFFCLRLHPTSQPLFAFEWRDPEMGISGQLTWTRLPQGFKNSPTLFNEALHRDLADFRIQHPDLILLQYVDDLLLAATSEQDCQRGTRALLQTLGNLGYRASAKKAQICQKQVKYLGYLLKEGQRWLTEARKETVMGQPTPKTPRQLREFLGTAGFCRLWIPGFAEMAAPLYPLTKPGTLFNWGPDQQKAYQEIKQALLTAPALGLPDLTKPFELFVDEKQGYAKGVLTQKLGPWRRPVAYLSKKLDPVAAGWPPCLRMVAAIAVLTKDAGKLTMGQPLVILAPHAVEALVKQPPDRWLSNARMTHYQAMLLDTDRVQFGPVVALNPATLLPLPEKEAPHDCLEILAETHGTRPDLTDQPIPDADYTWYTDGSSFLQEGQRRAGAAVTTETEVIWARALPAGTSAQRAELIALTQALKMAEGKKLNVYTDSRYAFATAHVHGEIYRRRGWLTSEGREIKNKNEILALLKALFLPKRLSIIHCPGHQKGNSAEARGNRMADQAAREAAMKAVLETSTLLAGKRTADGSEFEKRTADGSEFESPKKKAKVE

SEQ ID NO: 1000 - protein, 2094 aa, synthetic construct
MPAAKRVKLDGGDKKYSIGLDIGTNSVGWAVITDEYKVPSKKFKVLGNTDRHSIKKNLIGALLFDSGETAEATRLKRTARRRYTRRKNRICYLQEIFSNEMAKVDDSFFHRLEESFLVEEDKKHERHPIFGNIVDEVAYHEKYPTIYHLRKKLVDSTDKADLRLIYLALAHMIKFRGHFLIEGDLNPDNSDVDKLFIQLVQTYNQLFEENPINASGVDAKAILSARLSKSRRLENLIAQLPGEKKNGLFGNLIALSLGLTPNFKSNFDLAEDAKLQLSKDTYDDDLDNLLAQIGDQYADLFLAAKNLSDAILLSDILRVNTEITKAPLSASMIKRYDEHHQDLTLLKALVRQQLPEKYKEIFFDQSKNGYAGYIDGGASQEEFYKFIKPILEKMDGTEELLVKLNREDLLRKQRTFDNGSIPHQIHLGELHAILRRQEDFYPFLKDNREKIEKILTFRIPYYVGPLARGNSRFAWMTRKSEETITPWNFEEVVDKGASAQSFIERMTNFDKNLPNEKVLPKHSLLYEYFTVYNELTKVKYVTEGMRKPAFLSGEQKKAIVDLLFKTNRKVTVKQLKEDYFKKIECFDSVEISGVEDRFNASLGTYHDLLKIIKDKDFLDNEENEDILEDIVLTLTLFEDREMIEERLKTYAHLFDDKVMKQLKRRRYTGWGRLSRKLINGIRDKQSGKTILDFLKSDGFANRNFMQLIHDDSLTFKEDIQKAQVSGQGDSLHEHIANLAGSPAIKKGILQTVKVVDELVKVMGRHKPENIVIEMARENQTTQKGQKNSRERMKRIEEGIKELGSQILKEHPVENTQLQNEKLYLYYLQNGRDMYVDQELDINRLSDYDVDHIVPQSFLKDDSIDNKVLTRSDKARGKSDNVPSEEVVKKMKNYWRQLLNAKLITQRKFDNLTKAERGGLSELDKAGFIKRQLVETRQITKHVAQILDSRMNTKYDENDKLIREVKVITLKSKLVSDFRKDFQFYKVREINNYHHAHDAYLNAVVGTALIKKYPKLESEFVYGDYKVYDVRKMIAKSEQEIGKATAKYFFYSNIMNFFKTEITLANGEIRKRPLIETNGETGEIVWDKGRDFATVRKVLSMPQVNIVKKTEVQTGGFSKESILPKRNSDKLIARKKDWDPKKYGGFDSPTVAYSVLVVAKVEKGKSKKLKSVKELLGITIMERSSFEKNPIDFLEAKGYKEVKKDLIIKLPKYSLFELENGRKRMLASAGELQKGNELALPSKYVNFLYLASHYEKLKGSPEDNEQKQLFVEQHKHYLDEIIEQISEFSKRVILADANLDKVLSAYNKHRDKPIREQAENIIHLFTLTNLGAPAAFKYFDTTIDRKRYTSTKEVLDATLIHQSITGLYETRIDLSQLGGDGGGSSPAPGGGGGTLNIEDEYRLHETSKEPDVPLGSTWLSDFPQAWAETGGMGLAVRQAPLIIPLKATSTPVSIKQYPMSQEARLGIKPHIQRLLDQGILVPCQSPWNTPLLPVKKPGTNDYRPVQDLREVNKRVEDIHPTVPNPYNLLSGLPPSHQWYTVLDLKDAFFCLRLHPTSQPLFAFEWRDPEMGISGQLTWTRLPQGFKNSPTLFNEALHRDLADFRIQHPDLILLQYVDDLLLAATSEQDCQRGTRALLQTLGNLGYRASAKKAQICQKQVKYLGYLLKEGQRWLTEARKETVMGQPTPKTPRQLREFLGTAGFCRLWIPGFAEMAAPLYPLTKPGTLFNWGPDQQKAYQEIKQALLTAPALGLPDLTKPFELFVDEKQGYAKGVLTQKLGPWRRPVAYLSKKLDPVAAGWPPCLRMVAAIAVLTKDAGKLTMGQPLVILAPHAVEALVKQPPDRWLSNARMTHYQAMLLDTDRVQFGPVVALNPATLLPLPEKEAPHDCLEILAETHGTRPDLTDQPIPDADYTWYTDGSSFLQEGQRRAGAAVTTETEVIWARALPAGTSAQRAELIALTQALKMAEGKKLNVYTDSRYAFATAHVHGEIYRRRGWLTSEGREIKNKNEILALLKALFLPKRLSIIHCPGHQKGNSAEARGNRMADQAAREAAMKAVLETSTLLAGKRTADGSEFEKRTADGSEFESPKKKAKVE

SEQ ID NO: 1001 - protein, 2094 aa, synthetic construct
MPAAKRVKLDGGDKKYSIGLDIGTNSVGWAVITDEYKVPSKKFKVLGNTDRHSIKKNLIGALLFDSGETAEATRLKRTARRRYTRRKNRICYLQEIFSNEMAKVDDSFFHRLEESFLVEEDKKHERHPIFGNIVDEVAYHEKYPTIYHLRKKLVDSTDKADLRLIYLALAHMIKFRGHFLIEGDLNPDNSDVDKLFIQLVQTYNQLFEENPINASGVDAKAILSARLSKSRRLENLIAQLPGEKKNGLFGNLIALSLGLTPNFKSNFDLAEDAKLQLSKDTYDDDLDNLLAQIGDQYADLFLAAKNLSDAILLSDILRVNTEITKAPLSASMIKRYDEHHQDLTLLKALVRQQLPEKYKEIFFDQSKNGYAGYIDGGASQEEFYKFIKPILEKMDGTEELLVKLNREDLLRKQRTFDNGSIPHQIHLGELHAILRRQEDFYPFLKDNREKIEKILTFRIPYYVGPLARGNSRFAWMTRKSEETITPWNFEEVVDKGASAQSFIERMTNFDKNLPNEKVLPKHSLLYEYFTVYNELTKVKYVTEGMRKPAFLSGEQKKAIVDLLFKTNRKVTVKQLKEDYFKKIECFDSVEISGVEDRFNASLGTYHDLLKIIKDKDFLDNEENEDILEDIVLTLTLFEDREMIEERLKTYAHLFDDKVMKQLKRRRYTGWGRLSRKLINGIRDKQSGKTILDFLKSDGFANRNFMQLIHDDSLTFKEDIQKAQVSGQGDSLHEHIANLAGSPAIKKGILQTVKVVDELVKVMGRHKPENIVIEMARENQTTQKGQKNSRERMKRIEEGIKELGSQILKEHPVENTQLQNEKLYLYYLQNGRDMYVDQELDINRLSDYDVDHIVPQSFLKDDSIDNKVLTRSDKARGKSDNVPSEEVVKKMKNYWRQLLNAKLITQRKFDNLTKAERGGLSELDKAGFIKRQLVETRQITKHVAQILDSRMNTKYDENDKLIREVKVITLKSKLVSDFRKDFQFYKVREINNYHHAHDAYLNAVVGTALIKKYPKLESEFVYGDYKVYDVRKMIAKSEQEIGKATAKYFFYSNIMNFFKTEITLANGEIRKRPLIETNGETGEIVWDKGRDFATVRKVLSMPQVNIVKKTEVQTGGFSKESILPKRNSDKLIARKKDWDPKKYGGFDSPTVAYSVLVVAKVEKGKSKKLKSVKELLGITIMERSSFEKNPIDFLEAKGYKEVKKDLIIKLPKYSLFELENGRKRMLASAGELQKGNELALPSKYVNFLYLASHYEKLKGSPEDNEQKQLFVEQHKHYLDEIIEQISEFSKRVILADANLDKVLSAYNKHRDKPIREQAENIIHLFTLTNLGAPAAFKYFDTTIDRKRYTSTKEVLDATLIHQSITGLYETRIDLSQLGGDGGGGSPAPGGGGGTLNIEDEYRLHETSKEPDVPLGSTWLSDFPQAWAETGGMGLAVRQAPLIIPLKATSTPVSIKQYPMSQEARLGIKPHIQRLLDQGILVPCQSPWNTPLLPVKKPGTNDYRPVQDLREVNKRVEDIHPTVPNPYNLLSGLPPSHQWYTVLDLKDAFFCLRLHPTSQPLFAFEWRDPEMGISGQLTWTRLPQGFKNSPTLFNEALHRDLADFRIQHPDLILLQYVDDLLLAATSEQDCQRGTRALLQTLGNLGYRASAKKAQICQKQVKYLGYLLKEGQRWLTEARKETVMGQPTPKTPRQLREFLGTAGFCRLWIPGFAEMAAPLYPLTKPGTLFNWGPDQQKAYQEIKQALLTAPALGLPDLTKPFELFVDEKQGYAKGVLTQKLGPWRRPVAYLSKKLDPVAAGWPPCLRMVAAIAVLTKDAGKLTMGQPLVILAPHAVEALVKQPPDRWLSNARMTHYQAMLLDTDRVQFGPVVALNPATLLPLPEKEAPHDCLEILAETHGTRPDLTDQPIPDADYTWYTDGSSFLQEGQRRAGAAVTTETEVIWARALPAGTSAQRAELIALTQALKMAEGKKLNVYTDSRYAFATAHVHGEIYRRRGWLTSEGREIKNKNEILALLKALFLPKRLSIIHCPGHQKGNSAEARGNRMADQAAREAAMKAVLETSTLLAGKRTADGSEFEKRTADGSEFESPKKKAKVE

SEQ ID NO: 1002 - protein, 2095 aa, synthetic construct
MPAAKRVKLDGGDKKYSIGLDIGTNSVGWAVITDEYKVPSKKFKVLGNTDRHSIKKNLIGALLFDSGETAEATRLKRTARRRYTRRKNRICYLQEIFSNEMAKVDDSFFHRLEESFLVEEDKKHERHPIFGNIVDEVAYHEKYPTIYHLRKKLVDSTDKADLRLIYLALAHMIKFRGHFLIEGDLNPDNSDVDKLFIQLVQTYNQLFEENPINASGVDAKAILSARLSKSRRLENLIAQLPGEKKNGLFGNLIALSLGLTPNFKSNFDLAEDAKLQLSKDTYDDDLDNLLAQIGDQYADLFLAAKNLSDAILLSDILRVNTEITKAPLSASMIKRYDEHHQDLTLLKALVRQQLPEKYKEIFFDQSKNGYAGYIDGGASQEEFYKFIKPILEKMDGTEELLVKLNREDLLRKQRTFDNGSIPHQIHLGELHAILRRQEDFYPFLKDNREKIEKILTFRIPYYVGPLARGNSRFAWMTRKSEETITPWNFEEVVDKGASAQSFIERMTNFDKNLPNEKVLPKHSLLYEYFTVYNELTKVKYVTEGMRKPAFLSGEQKKAIVDLLFKTNRKVTVKQLKEDYFKKIECFDSVEISGVEDRFNASLGTYHDLLKIIKDKDFLDNEENEDILEDIVLTLTLFEDREMIEERLKTYAHLFDDKVMKQLKRRRYTGWGRLSRKLINGIRDKQSGKTILDFLKSDGFANRNFMQLIHDDSLTFKEDIQKAQVSGQGDSLHEHIANLAGSPAIKKGILQTVKVVDELVKVMGRHKPENIVIEMARENQTTQKGQKNSRERMKRIEEGIKELGSQILKEHPVENTQLQNEKLYLYYLQNGRDMYVDQELDINRLSDYDVDHIVPQSFLKDDSIDNKVLTRSDKARGKSDNVPSEEVVKKMKNYWRQLLNAKLITQRKFDNLTKAERGGLSELDKAGFIKRQLVETRQITKHVAQILDSRMNTKYDENDKLIREVKVITLKSKLVSDFRKDFQFYKVREINNYHHAHDAYLNAVVGTALIKKYPKLESEFVYGDYKVYDVRKMIAKSEQEIGKATAKYFFYSNIMNFFKTEITLANGEIRKRPLIETNGETGEIVWDKGRDFATVRKVLSMPQVNIVKKTEVQTGGFSKESILPKRNSDKLIARKKDWDPKKYGGFDSPTVAYSVLVVAKVEKGKSKKLKSVKELLGITIMERSSFEKNPIDFLEAKGYKEVKKDLIIKLPKYSLFELENGRKRMLASAGELQKGNELALPSKYVNFLYLASHYEKLKGSPEDNEQKQLFVEQHKHYLDEIIEQISEFSKRVILADANLDKVLSAYNKHRDKPIREQAENIIHLFTLTNLGAPAAFKYFDTTIDRKRYTSTKEVLDATLIHQSITGLYETRIDLSQLGGDGGGGGGSGGGGSGGTLNIEDEYRLHETSKEPDVPLGSTWLSDFPQAWAETGGMGLAVRQAPLIIPLKATSTPVSIKQYPMSQEARLGIKPHIQRLLDQGILVPCQSPWNTPLLPVKKPGTNDYRPVQDLREVNKRVEDIHPTVPNPYNLLSGLPPSHQWYTVLDLKDAFFCLRLHPTSQPLFAFEWRDPEMGISGQLTWTRLPQGFKNSPTLFNEALHRDLADFRIQHPDLILLQYVDDLLLAATSEQDCQRGTRALLQTLGNLGYRASAKKAQICQKQVKYLGYLLKEGQRWLTEARKETVMGQPTPKTPRQLREFLGTAGFCRLWIPGFAEMAAPLYPLTKPGTLFNWGPDQQKAYQEIKQALLTAPALGLPDLTKPFELFVDEKQGYAKGVLTQKLGPWRRPVAYLSKKLDPVAAGWPPCLRMVAAIAVLTKDAGKLTMGQPLVILAPHAVEALVKQPPDRWLSNARMTHYQAMLLDTDRVQFGPVVALNPATLLPLPEKEAPHDCLEILAETHGTRPDLTDQPIPDADYTWYTDGSSFLQEGQRRAGAAVTTETEVIWARALPAGTSAQRAELIALTQALKMAEGKKLNVYTDSRYAFATAHVHGEIYRRRGWLTSEGREIKNKNEILALLKALFLPKRLSIIHCPGHQKGNSAEARGNRMADQAAREAAMKAVLETSTLLAGKRTADGSEFEKRTADGSEFESPKKKAKVE

SEQ ID NO: 1003 - protein, 2088 aa, synthetic construct
MPAAKRVKLDGGDKKYSIGLDIGTNSVGWAVITDEYKVPSKKFKVLGNTDRHSIKKNLIGALLFDSGETAEATRLKRTARRRYTRRKNRICYLQEIFSNEMAKVDDSFFHRLEESFLVEEDKKHERHPIFGNIVDEVAYHEKYPTIYHLRKKLVDSTDKADLRLIYLALAHMIKFRGHFLIEGDLNPDNSDVDKLFIQLVQTYNQLFEENPINASGVDAKAILSARLSKSRRLENLIAQLPGEKKNGLFGNLIALSLGLTPNFKSNFDLAEDAKLQLSKDTYDDDLDNLLAQIGDQYADLFLAAKNLSDAILLSDILRVNTEITKAPLSASMIKRYDEHHQDLTLLKALVRQQLPEKYKEIFFDQSKNGYAGYIDGGASQEEFYKFIKPILEKMDGTEELLVKLNREDLLRKQRTFDNGSIPHQIHLGELHAILRRQEDFYPFLKDNREKIEKILTFRIPYYVGPLARGNSRFAWMTRKSEETITPWNFEEVVDKGASAQSFIERMTNFDKNLPNEKVLPKHSLLYEYFTVYNELTKVKYVTEGMRKPAFLSGEQKKAIVDLLFKTNRKVTVKQLKEDYFKKIECFDSVEISGVEDRFNASLGTYHDLLKIIKDKDFLDNEENEDILEDIVLTLTLFEDREMIEERLKTYAHLFDDKVMKQLKRRRYTGWGRLSRKLINGIRDKQSGKTILDFLKSDGFANRNFMQLIHDDSLTFKEDIQKAQVSGQGDSLHEHIANLAGSPAIKKGILQTVKVVDELVKVMGRHKPENIVIEMARENQTTQKGQKNSRERMKRIEEGIKELGSQILKEHPVENTQLQNEKLYLYYLQNGRDMYVDQELDINRLSDYDVDHIVPQSFLKDDSIDNKVLTRSDKARGKSDNVPSEEVVKKMKNYWRQLLNAKLITQRKFDNLTKAERGGLSELDKAGFIKRQLVETRQITKHVAQILDSRMNTKYDENDKLIREVKVITLKSKLVSDFRKDFQFYKVREINNYHHAHDAYLNAVVGTALIKKYPKLESEFVYGDYKVYDVRKMIAKSEQEIGKATAKYFFYSNIMNFFKTEITLANGEIRKRPLIETNGETGEIVWDKGRDFATVRKVLSMPQVNIVKKTEVQTGGFSKESILPKRNSDKLIARKKDWDPKKYGGFDSPTVAYSVLVVAKVEKGKSKKLKSVKELLGITIMERSSFEKNPIDFLEAKGYKEVKKDLIIKLPKYSLFELENGRKRMLASAGELQKGNELALPSKYVNFLYLASHYEKLKGSPEDNEQKQLFVEQHKHYLDEIIEQISEFSKRVILADANLDKVLSAYNKHRDKPIREQAENIIHLFTLTNLGAPAAFKYFDTTIDRKRYTSTKEVLDATLIHQSITGLYETRIDLSQLGGDGGGGSGGTLNIEDEYRLHETSKEPDVPLGSTWLSDFPQAWAETGGMGLAVRQAPLIIPLKATSTPVSIKQYPMSQEARLGIKPHIQRLLDQGILVPCQSPWNTPLLPVKKPGTNDYRPVQDLREVNKRVEDIHPTVPNPYNLLSGLPPSHQWYTVLDLKDAFFCLRLHPTSQPLFAFEWRDPEMGISGQLTWTRLPQGFKNSPTLFNEALHRDLADFRIQHPDLILLQYVDDLLLAATSEQDCQRGTRALLQTLGNLGYRASAKKAQICQKQVKYLGYLLKEGQRWLTEARKETVMGQPTPKTPRQLREFLGTAGFCRLWIPGFAEMAAPLYPLTKPGTLFNWGPDQQKAYQEIKQALLTAPALGLPDLTKPFELFVDEKQGYAKGVLTQKLGPWRRPVAYLSKKLDPVAAGWPPCLRMVAAIAVLTKDAGKLTMGQPLVILAPHAVEALVKQPPDRWLSNARMTHYQAMLLDTDRVQFGPVVALNPATLLPLPEKEAPHDCLEILAETHGTRPDLTDQPIPDADYTWYTDGSSFLQEGQRRAGAAVTTETEVIWARALPAGTSAQRAELIALTQALKMAEGKKLNVYTDSRYAFATAHVHGEIYRRRGWLTSEGREIKNKNEILALLKALFLPKRLSIIHCPGHQKGNSAEARGNRMADQAAREAAMKAVLETSTLLAGKRTADGSEFEKRTADGSEFESPKKKAKVE

SEQ ID NO: 1004 - protein, 2094 aa, synthetic construct
MPAAKRVKLDGGDKKYSIGLDIGTNSVGWAVITDEYKVPSKKFKVLGNTDRHSIKKNLIGALLFDSGETAEATRLKRTARRRYTRRKNRICYLQEIFSNEMAKVDDSFFHRLEESFLVEEDKKHERHPIFGNIVDEVAYHEKYPTIYHLRKKLVDSTDKADLRLIYLALAHMIKFRGHFLIEGDLNPDNSDVDKLFIQLVQTYNQLFEENPINASGVDAKAILSARLSKSRRLENLIAQLPGEKKNGLFGNLIALSLGLTPNFKSNFDLAEDAKLQLSKDTYDDDLDNLLAQIGDQYADLFLAAKNLSDAILLSDILRVNTEITKAPLSASMIKRYDEHHQDLTLLKALVRQQLPEKYKEIFFDQSKNGYAGYIDGGASQEEFYKFIKPILEKMDGTEELLVKLNREDLLRKQRTFDNGSIPHQIHLGELHAILRRQEDFYPFLKDNREKIEKILTFRIPYYVGPLARGNSRFAWMTRKSEETITPWNFEEVVDKGASAQSFIERMTNFDKNLPNEKVLPKHSLLYEYFTVYNELTKVKYVTEGMRKPAFLSGEQKKAIVDLLFKTNRKVTVKQLKEDYFKKIECFDSVEISGVEDRFNASLGTYHDLLKIIKDKDFLDNEENEDILEDIVLTLTLFEDREMIEERLKTYAHLFDDKVMKQLKRRRYTGWGRLSRKLINGIRDKQSGKTILDFLKSDGFANRNFMQLIHDDSLTFKEDIQKAQVSGQGDSLHEHIANLAGSPAIKKGILQTVKVVDELVKVMGRHKPENIVIEMARENQTTQKGQKNSRERMKRIEEGIKELGSQILKEHPVENTQLQNEKLYLYYLQNGRDMYVDQELDINRLSDYDVDHIVPQSFLKDDSIDNKVLTRSDKARGKSDNVPSEEVVKKMKNYWRQLLNAKLITQRKFDNLTKAERGGLSELDKAGFIKRQLVETRQITKHVAQILDSRMNTKYDENDKLIREVKVITLKSKLVSDFRKDFQFYKVREINNYHHAHDAYLNAVVGTALIKKYPKLESEFVYGDYKVYDVRKMIAKSEQEIGKATAKYFFYSNIMNFFKTEITLANGEIRKRPLIETNGETGEIVWDKGRDFATVRKVLSMPQVNIVKKTEVQTGGFSKESILPKRNSDKLIARKKDWDPKKYGGFDSPTVAYSVLVVAKVEKGKSKKLKSVKELLGITIMERSSFEKNPIDFLEAKGYKEVKKDLIIKLPKYSLFELENGRKRMLASAGELQKGNELALPSKYVNFLYLASHYEKLKGSPEDNEQKQLFVEQHKHYLDEIIEQISEFSKRVILADANLDKVLSAYNKHRDKPIREQAENIIHLFTLTNLGAPAAFKYFDTTIDRKRYTSTKEVLDATLIHQSITGLYETRIDLSQLGGDGGGSSGGSGGGGGTLNIEDEYRLHETSKEPDVPLGSTWLSDFPQAWAETGGMGLAVRQAPLIIPLKATSTPVSIKQYPMSQEARLGIKPHIQRLLDQGILVPCQSPWNTPLLPVKKPGTNDYRPVQDLREVNKRVEDIHPTVPNPYNLLSGLPPSHQWYTVLDLKDAFFCLRLHPTSQPLFAFEWRDPEMGISGQLTWTRLPQGFKNSPTLFNEALHRDLADFRIQHPDLILLQYVDDLLLAATSEQDCQRGTRALLQTLGNLGYRASAKKAQICQKQVKYLGYLLKEGQRWLTEARKETVMGQPTPKTPRQLREFLGTAGFCRLWIPGFAEMAAPLYPLTKPGTLFNWGPDQQKAYQEIKQALLTAPALGLPDLTKPFELFVDEKQGYAKGVLTQKLGPWRRPVAYLSKKLDPVAAGWPPCLRMVAAIAVLTKDAGKLTMGQPLVILAPHAVEALVKQPPDRWLSNARMTHYQAMLLDTDRVQFGPVVALNPATLLPLPEKEAPHDCLEILAETHGTRPDLTDQPIPDADYTWYTDGSSFLQEGQRRAGAAVTTETEVIWARALPAGTSAQRAELIALTQALKMAEGKKLNVYTDSRYAFATAHVHGEIYRRRGWLTSEGREIKNKNEILALLKALFLPKRLSIIHCPGHQKGNSAEARGNRMADQAAREAAMKAVLETSTLLAGKRTADGSEFEKRTADGSEFESPKKKAKVE

SEQ ID NO: 1005 - protein, 2096 aa, synthetic construct
MPAAKRVKLDGGDKKYSIGLDIGTNSVGWAVITDEYKVPSKKFKVLGNTDRHSIKKNLIGALLFDSGETAEATRLKRTARRRYTRRKNRICYLQEIFSNEMAKVDDSFFHRLEESFLVEEDKKHERHPIFGNIVDEVAYHEKYPTIYHLRKKLVDSTDKADLRLIYLALAHMIKFRGHFLIEGDLNPDNSDVDKLFIQLVQTYNQLFEENPINASGVDAKAILSARLSKSRRLENLIAQLPGEKKNGLFGNLIALSLGLTPNFKSNFDLAEDAKLQLSKDTYDDDLDNLLAQIGDQYADLFLAAKNLSDAILLSDILRVNTEITKAPLSASMIKRYDEHHQDLTLLKALVRQQLPEKYKEIFFDQSKNGYAGYIDGGASQEEFYKFIKPILEKMDGTEELLVKLNREDLLRKQRTFDNGSIPHQIHLGELHAILRRQEDFYPFLKDNREKIEKILTFRIPYYVGPLARGNSRFAWMTRKSEETITPWNFEEVVDKGASAQSFIERMTNFDKNLPNEKVLPKHSLLYEYFTVYNELTKVKYVTEGMRKPAFLSGEQKKAIVDLLFKTNRKVTVKQLKEDYFKKIECFDSVEISGVEDRFNASLGTYHDLLKIIKDKDFLDNEENEDILEDIVLTLTLFEDREMIEERLKTYAHLFDDKVMKQLKRRRYTGWGRLSRKLINGIRDKQSGKTILDFLKSDGFANRNFMQLIHDDSLTFKEDIQKAQVSGQGDSLHEHIANLAGSPAIKKGILQTVKVVDELVKVMGRHKPENIVIEMARENQTTQKGQKNSRERMKRIEEGIKELGSQILKEHPVENTQLQNEKLYLYYLQNGRDMYVDQELDINRLSDYDVDHIVPQSFLKDDSIDNKVLTRSDKARGKSDNVPSEEVVKKMKNYWRQLLNAKLITQRKFDNLTKAERGGLSELDKAGFIKRQLVETRQITKHVAQILDSRMNTKYDENDKLIREVKVITLKSKLVSDFRKDFQFYKVREINNYHHAHDAYLNAVVGTALIKKYPKLESEFVYGDYKVYDVRKMIAKSEQEIGKATAKYFFYSNIMNFFKTEITLANGEIRKRPLIETNGETGEIVWDKGRDFATVRKVLSMPQVNIVKKTEVQTGGFSKESILPKRNSDKLIARKKDWDPKKYGGFDSPTVAYSVLVVAKVEKGKSKKLKSVKELLGITIMERSSFEKNPIDFLEAKGYKEVKKDLIIKLPKYSLFELENGRKRMLASAGELQKGNELALPSKYVNFLYLASHYEKLKGSPEDNEQKQLFVEQHKHYLDEIIEQISEFSKRVILADANLDKVLSAYNKHRDKPIREQAENIIHLFTLTNLGAPAAFKYFDTTIDRKRYTSTKEVLDATLIHQSITGLYETRIDLSQLGGDGGGGSGSSEAAAKGGTLNIEDEYRLHETSKEPDVPLGSTWLSDFPQAWAETGGMGLAVRQAPLIIPLKATSTPVSIKQYPMSQEARLGIKPHIQRLLDQGILVPCQSPWNTPLLPVKKPGTNDYRPVQDLREVNKRVEDIHPTVPNPYNLLSGLPPSHQWYTVLDLKDAFFCLRLHPTSQPLFAFEWRDPEMGISGQLTWTRLPQGFKNSPTLFNEALHRDLADFRIQHPDLILLQYVDDLLLAATSEQDCQRGTRALLQTLGNLGYRASAKKAQICQKQVKYLGYLLKEGQRWLTEARKETVMGQPTPKTPRQLREFLGTAGFCRLWIPGFAEMAAPLYPLTKPGTLFNWGPDQQKAYQEIKQALLTAPALGLPDLTKPFELFVDEKQGYAKGVLTQKLGPWRRPVAYLSKKLDPVAAGWPPCLRMVAAIAVLTKDAGKLTMGQPLVILAPHAVEALVKQPPDRWLSNARMTHYQAMLLDTDRVQFGPVVALNPATLLPLPEKEAPHDCLEILAETHGTRPDLTDQPIPDADYTWYTDGSSFLQEGQRRAGAAVTTETEVIWARALPAGTSAQRAELIALTQALKMAEGKKLNVYTDSRYAFATAHVHGEIYRRRGWLTSEGREIKNKNEILALLKALFLPKRLSIIHCPGHQKGNSAEARGNRMADQAAREAAMKAVLETSTLLAGKRTADGSEFEKRTADGSEFESPKKKAKVE

SEQ ID NO: 1006 - protein, 2131 aa, synthetic construct
MPAAKRVKLDGGDKKYSIGLDIGTNSVGWAVITDEYKVPSKKFKVLGNTDRHSIKKNLIGALLFDSGETAEATRLKRTARRRYTRRKNRICYLQEIFSNEMAKVDDSFFHRLEESFLVEEDKKHERHPIFGNIVDEVAYHEKYPTIYHLRKKLVDSTDKADLRLIYLALAHMIKFRGHFLIEGDLNPDNSDVDKLFIQLVQTYNQLFEENPINASGVDAKAILSARLSKSRRLENLIAQLPGEKKNGLFGNLIALSLGLTPNFKSNFDLAEDAKLQLSKDTYDDDLDNLLAQIGDQYADLFLAAKNLSDAILLSDILRVNTEITKAPLSASMIKRYDEHHQDLTLLKALVRQQLPEKYKEIFFDQSKNGYAGYIDGGASQEEFYKFIKPILEKMDGTEELLVKLNREDLLRKQRTFDNGSIPHQIHLGELHAILRRQEDFYPFLKDNREKIEKILTFRIPYYVGPLARGNSRFAWMTRKSEETITPWNFEEVVDKGASAQSFIERMTNFDKNLPNEKVLPKHSLLYEYFTVYNELTKVKYVTEGMRKPAFLSGEQKKAIVDLLFKTNRKVTVKQLKEDYFKKIECFDSVEISGVEDRFNASLGTYHDLLKIIKDKDFLDNEENEDILEDIVLTLTLFEDREMIEERLKTYAHLFDDKVMKQLKRRRYTGWGRLSRKLINGIRDKQSGKTILDFLKSDGFANRNFMQLIHDDSLTFKEDIQKAQVSGQGDSLHEHIANLAGSPAIKKGILQTVKVVDELVKVMGRHKPENIVIEMARENQTTQKGQKNSRERMKRIEEGIKELGSQILKEHPVENTQLQNEKLYLYYLQNGRDMYVDQELDINRLSDYDVDHIVPQSFLKDDSIDNKVLTRSDKARGKSDNVPSEEVVKKMKNYWRQLLNAKLITQRKFDNLTKAERGGLSELDKAGFIKRQLVETRQITKHVAQILDSRMNTKYDENDKLIREVKVITLKSKLVSDFRKDFQFYKVREINNYHHAHDAYLNAVVGTALIKKYPKLESEFVYGDYKVYDVRKMIAKSEQEIGKATAKYFFYSNIMNFFKTEITLANGEIRKRPLIETNGETGEIVWDKGRDFATVRKVLSMPQVNIVKKTEVQTGGFSKESILPKRNSDKLIARKKDWDPKKYGGFDSPTVAYSVLVVAKVEKGKSKKLKSVKELLGITIMERSSFEKNPIDFLEAKGYKEVKKDLIIKLPKYSLFELENGRKRMLASAGELQKGNELALPSKYVNFLYLASHYEKLKGSPEDNEQKQLFVEQHKHYLDEIIEQISEFSKRVILADANLDKVLSAYNKHRDKPIREQAENIIHLFTLTNLGAPAAFKYFDTTIDRKRYTSTKEVLDATLIHQSITGLYETRIDLSQLGGDGGAEAAAKEAAAKEAAAKEAAAKALEAEAAAKEAAAKEAAAKEAAAKAGGTLNIEDEYRLHETSKEPDVPLGSTWLSDFPQAWAETGGMGLAVRQAPLIIPLKATSTPVSIKQYPMSQEARLGIKPHIQRLLDQGILVPCQSPWNTPLLPVKKPGTNDYRPVQDLREVNKRVEDIHPTVPNPYNLLSGLPPSHQWYTVLDLKDAFFCLRLHPTSQPLFAFEWRDPEMGISGQLTWTRLPQGFKNSPTLFNEALHRDLADFRIQHPDLILLQYVDDLLLAATSEQDCQRGTRALLQTLGNLGYRASAKKAQICQKQVKYLGYLLKEGQRWLTEARKETVMGQPTPKTPRQLREFLGKAGFCRLFIPGFAEMAAPLYPLTKPGTLFNWGPDQQKAYQEIKQALLTAPALGLPDLTKPFELFVDEKQGYAKGVLTQKLGPWRRPVAYLSKKLDPVAAGWPPCLRMVAAIAVLTKDAGKLTMGQPLVILAPHAVEALVKQPPDRWLSNARMTHYQAMLLDTDRVQFGPVVALNPATLLPLPEKEAPHDCLEILAETHGTRPDLTDQPIPDADYTWYTDGSSFLQEGQRRAGAAVTTETEVIWARALPAGTSAQRAELIALTQALKMAEGKKLNVYTDSRYAFATAHVHGEIYRRRGWLTSEGREIKNKNEILALLKALFLPKRLSIIHCPGHQKGNSAEARGNRMADQAAREAAMKAVLETSTLLAGKRTADGSEFEKRTADGSEFESPKKKAKVE

SEQ ID NO: 1007 - protein, 2096 aa, synthetic construct
MPAAKRVKLDGGDKKYSIGLDIGTNSVGWAVITDEYKVPSKKFKVLGNTDRHSIKKNLIGALLFDSGETAEATRLKRTARRRYTRRKNRICYLQEIFSNEMAKVDDSFFHRLEESFLVEEDKKHERHPIFGNIVDEVAYHEKYPTIYHLRKKLVDSTDKADLRLIYLALAHMIKFRGHFLIEGDLNPDNSDVDKLFIQLVQTYNQLFEENPINASGVDAKAILSARLSKSRRLENLIAQLPGEKKNGLFGNLIALSLGLTPNFKSNFDLAEDAKLQLSKDTYDDDLDNLLAQIGDQYADLFLAAKNLSDAILLSDILRVNTEITKAPLSASMIKRYDEHHQDLTLLKALVRQQLPEKYKEIFFDQSKNGYAGYIDGGASQEEFYKFIKPILEKMDGTEELLVKLNREDLLRKQRTFDNGSIPHQIHLGELHAILRRQEDFYPFLKDNREKIEKILTFRIPYYVGPLARGNSRFAWMTRKSEETITPWNFEEVVDKGASAQSFIERMTNFDKNLPNEKVLPKHSLLYEYFTVYNELTKVKYVTEGMRKPAFLSGEQKKAIVDLLFKTNRKVTVKQLKEDYFKKIECFDSVEISGVEDRFNASLGTYHDLLKIIKDKDFLDNEENEDILEDIVLTLTLFEDREMIEERLKTYAHLFDDKVMKQLKRRRYTGWGRLSRKLINGIRDKQSGKTILDFLKSDGFANRNFMQLIHDDSLTFKEDIQKAQVSGQGDSLHEHIANLAGSPAIKKGILQTVKVVDELVKVMGRHKPENIVIEMARENQTTQKGQKNSRERMKRIEEGIKELGSQILKEHPVENTQLQNEKLYLYYLQNGRDMYVDQELDINRLSDYDVDHIVPQSFLKDDSIDNKVLTRSDKARGKSDNVPSEEVVKKMKNYWRQLLNAKLITQRKFDNLTKAERGGLSELDKAGFIKRQLVETRQITKHVAQILDSRMNTKYDENDKLIREVKVITLKSKLVSDFRKDFQFYKVREINNYHHAHDAYLNAVVGTALIKKYPKLESEFVYGDYKVYDVRKMIAKSEQEIGKATAKYFFYSNIMNFFKTEITLANGEIRKRPLIETNGETGEIVWDKGRDFATVRKVLSMPQVNIVKKTEVQTGGFSKESILPKRNSDKLIARKKDWDPKKYGGFDSPTVAYSVLVVAKVEKGKSKKLKSVKELLGITIMERSSFEKNPIDFLEAKGYKEVKKDLIIKLPKYSLFELENGRKRMLASAGELQKGNELALPSKYVNFLYLASHYEKLKGSPEDNEQKQLFVEQHKHYLDEIIEQISEFSKRVILADANLDKVLSAYNKHRDKPIREQAENIIHLFTLTNLGAPAAFKYFDTTIDRKRYTSTKEVLDATLIHQSITGLYETRIDLSQLGGDGGPAPEAAAKGSSGGTLNIEDEYRLHETSKEPDVPLGSTWLSDFPQAWAETGGMGLAVRQAPLIIPLKATSTPVSIKQYPMSQEARLGIKPHIQRLLDQGILVPCQSPWNTPLLPVKKPGTNDYRPVQDLREVNKRVEDIHPTVPNPYNLLSGLPPSHQWYTVLDLKDAFFCLRLHPTSQPLFAFEWRDPEMGISGQLTWTRLPQGFKNSPTLFNEALHRDLADFRIQHPDLILLQYVDDLLLAATSEQDCQRGTRALLQTLGNLGYRASAKKAQICQKQVKYLGYLLKEGQRWLTEARKETVMGQPTPKTPRQLREFLGKAGFCRLFIPGFAEMAAPLYPLTKPGTLFNWGPDQQKAYQEIKQALLTAPALGLPDLTKPFELFVDEKQGYAKGVLTQKLGPWRRPVAYLSKKLDPVAAGWPPCLRMVAAIAVLTKDAGKLTMGQPLVILAPHAVEALVKQPPDRWLSNARMTHYQAMLLDTDRVQFGPVVALNPATLLPLPEKEAPHDCLEILAETHGTRPDLTDQPIPDADYTWYTDGSSFLQEGQRRAGAAVTTETEVIWARALPAGTSAQRAELIALTQALKMAEGKKLNVYTDSRYAFATAHVHGEIYRRRGWLTSEGREIKNKNEILALLKALFLPKRLSIIHCPGHQKGNSAEARGNRMADQAAREAAMKAVLETSTLLAGKRTADGSEFEKRTADGSEFESPKKKAKVE

SEQ ID NO: 1008 - protein, 2105 aa, synthetic construct
MPAAKRVKLDGGDKKYSIGLDIGTNSVGWAVITDEYKVPSKKFKVLGNTDRHSIKKNLIGALLFDSGETAEATRLKRTARRRYTRRKNRICYLQEIFSNEMAKVDDSFFHRLEESFLVEEDKKHERHPIFGNIVDEVAYHEKYPTIYHLRKKLVDSTDKADLRLIYLALAHMIKFRGHFLIEGDLNPDNSDVDKLFIQLVQTYNQLFEENPINASGVDAKAILSARLSKSRRLENLIAQLPGEKKNGLFGNLIALSLGLTPNFKSNFDLAEDAKLQLSKDTYDDDLDNLLAQIGDQYADLFLAAKNLSDAILLSDILRVNTEITKAPLSASMIKRYDEHHQDLTLLKALVRQQLPEKYKEIFFDQSKNGYAGYIDGGASQEEFYKFIKPILEKMDGTEELLVKLNREDLLRKQRTFDNGSIPHQIHLGELHAILRRQEDFYPFLKDNREKIEKILTFRIPYYVGPLARGNSRFAWMTRKSEETITPWNFEEVVDKGASAQSFIERMTNFDKNLPNEKVLPKHSLLYEYFTVYNELTKVKYVTEGMRKPAFLSGEQKKAIVDLLFKTNRKVTVKQLKEDYFKKIECFDSVEISGVEDRFNASLGTYHDLLKIIKDKDFLDNEENEDILEDIVLTLTLFEDREMIEERLKTYAHLFDDKVMKQLKRRRYTGWGRLSRKLINGIRDKQSGKTILDFLKSDGFANRNFMQLIHDDSLTFKEDIQKAQVSGQGDSLHEHIANLAGSPAIKKGILQTVKVVDELVKVMGRHKPENIVIEMARENQTTQKGQKNSRERMKRIEEGIKELGSQILKEHPVENTQLQNEKLYLYYLQNGRDMYVDQELDINRLSDYDVDHIVPQSFLKDDSIDNKVLTRSDKARGKSDNVPSEEVVKKMKNYWRQLLNAKLITQRKFDNLTKAERGGLSELDKAGFIKRQLVETRQITKHVAQILDSRMNTKYDENDKLIREVKVITLKSKLVSDFRKDFQFYKVREINNYHHAHDAYLNAVVGTALIKKYPKLESEFVYGDYKVYDVRKMIAKSEQEIGKATAKYFFYSNIMNFFKTEITLANGEIRKRPLIETNGETGEIVWDKGRDFATVRKVLSMPQVNIVKKTEVQTGGFSKESILPKRNSDKLIARKKDWDPKKYGGFDSPTVAYSVLVVAKVEKGKSKKLKSVKELLGITIMERSSFEKNPIDFLEAKGYKEVKKDLIIKLPKYSLFELENGRKRMLASAGELQKGNELALPSKYVNFLYLASHYEKLKGSPEDNEQKQLFVEQHKHYLDEIIEQISEFSKRVILADANLDKVLSAYNKHRDKPIREQAENIIHLFTLTNLGAPAAFKYFDTTIDRKRYTSTKEVLDATLIHQSITGLYETRIDLSQLGGDGGEAAAKEAAAKEAAAKEAAAKGGTLNIEDEYRLHETSKEPDVPLGSTWLSDFPQAWAETGGMGLAVRQAPLIIPLKATSTPVSIKQYPMSQEARLGIKPHIQRLLDQGILVPCQSPWNTPLLPVKKPGTNDYRPVQDLREVNKRVEDIHPTVPNPYNLLSGLPPSHQWYTVLDLKDAFFCLRLHPTSQPLFAFEWRDPEMGISGQLTWTRLPQGFKNSPTLFNEALHRDLADFRIQHPDLILLQYVDDLLLAATSEQDCQRGTRALLQTLGNLGYRASAKKAQICQKQVKYLGYLLKEGQRWLTEARKETVMGQPTPKTPRQLREFLGKAGFCRLFIPGFAEMAAPLYPLTKPGTLFNWGPDQQKAYQEIKQALLTAPALGLPDLTKPFELFVDEKQGYAKGVLTQKLGPWRRPVAYLSKKLDPVAAGWPPCLRMVAAIAVLTKDAGKLTMGQPLVILAPHAVEALVKQPPDRWLSNARMTHYQAMLLDTDRVQFGPVVALNPATLLPLPEKEAPHDCLEILAETHGTRPDLTDQPIPDADYTWYTDGSSFLQEGQRRAGAAVTTETEVIWARALPAGTSAQRAELIALTQALKMAEGKKLNVYTDSRYAFATAHVHGEIYRRRGWLTSEGREIKNKNEILALLKALFLPKRLSIIHCPGHQKGNSAEARGNRMADQAAREAAMKAVLETSTLLAGKRTADGSEFEKRTADGSEFESPKKKAKVE

SEQ ID NO: 1009 - protein, 2090 aa, synthetic construct
MPAAKRVKLDGGDKKYSIGLDIGTNSVGWAVITDEYKVPSKKFKVLGNTDRHSIKKNLIGALLFDSGETAEATRLKRTARRRYTRRKNRICYLQEIFSNEMAKVDDSFFHRLEESFLVEEDKKHERHPIFGNIVDEVAYHEKYPTIYHLRKKLVDSTDKADLRLIYLALAHMIKFRGHFLIEGDLNPDNSDVDKLFIQLVQTYNQLFEENPINASGVDAKAILSARLSKSRRLENLIAQLPGEKKNGLFGNLIALSLGLTPNFKSNFDLAEDAKLQLSKDTYDDDLDNLLAQIGDQYADLFLAAKNLSDAILLSDILRVNTEITKAPLSASMIKRYDEHHQDLTLLKALVRQQLPEKYKEIFFDQSKNGYAGYIDGGASQEEFYKFIKPILEKMDGTEELLVKLNREDLLRKQRTFDNGSIPHQIHLGELHAILRRQEDFYPFLKDNREKIEKILTFRIPYYVGPLARGNSRFAWMTRKSEETITPWNFEEVVDKGASAQSFIERMTNFDKNLPNEKVLPKHSLLYEYFTVYNELTKVKYVTEGMRKPAFLSGEQKKAIVDLLFKTNRKVTVKQLKEDYFKKIECFDSVEISGVEDRFNASLGTYHDLLKIIKDKDFLDNEENEDILEDIVLTLTLFEDREMIEERLKTYAHLFDDKVMKQLKRRRYTGWGRLSRKLINGIRDKQSGKTILDFLKSDGFANRNFMQLIHDDSLTFKEDIQKAQVSGQGDSLHEHIANLAGSPAIKKGILQTVKVVDELVKVMGRHKPENIVIEMARENQTTQKGQKNSRERMKRIEEGIKELGSQILKEHPVENTQLQNEKLYLYYLQNGRDMYVDQELDINRLSDYDVDHIVPQSFLKDDSIDNKVLTRSDKARGKSDNVPSEEVVKKMKNYWRQLLNAKLITQRKFDNLTKAERGGLSELDKAGFIKRQLVETRQITKHVAQILDSRMNTKYDENDKLIREVKVITLKSKLVSDFRKDFQFYKVREINNYHHAHDAYLNAVVGTALIKKYPKLESEFVYGDYKVYDVRKMIAKSEQEIGKATAKYFFYSNIMNFFKTEITLANGEIRKRPLIETNGETGEIVWDKGRDFATVRKVLSMPQVNIVKKTEVQTGGFSKESILPKRNSDKLIARKKDWDPKKYGGFDSPTVAYSVLVVAKVEKGKSKKLKSVKELLGITIMERSSFEKNPIDFLEAKGYKEVKKDLIIKLPKYSLFELENGRKRMLASAGELQKGNELALPSKYVNFLYLASHYEKLKGSPEDNEQKQLFVEQHKHYLDEIIEQISEFSKRVILADANLDKVLSAYNKHRDKPIREQAENIIHLFTLTNLGAPAAFKYFDTTIDRKRYTSTKEVLDATLIHQSITGLYETRIDLSQLGGDGGEAAAKGGTLNIEDEYRLHETSKEPDVPLGSTWLSDFPQAWAETGGMGLAVRQAPLIIPLKATSTPVSIKQYPMSQEARLGIKPHIQRLLDQGILVPCQSPWNTPLLPVKKPGTNDYRPVQDLREVNKRVEDIHPTVPNPYNLLSGLPPSHQWYTVLDLKDAFFCLRLHPTSQPLFAFEWRDPEMGISGQLTWTRLPQGFKNSPTLFNEALHRDLADFRIQHPDLILLQYVDDLLLAATSEQDCQRGTRALLQTLGNLGYRASAKKAQICQKQVKYLGYLLKEGQRWLTEARKETVMGQPTPKTPRQLREFLGKAGFCRLFIPGFAEMAAPLYPLTKPGTLFNWGPDQQKAYQEIKQALLTAPALGLPDLTKPFELFVDEKQGYAKGVLTQKLGPWRRPVAYLSKKLDPVAAGWPPCLRMVAAIAVLTKDAGKLTMGQPLVILAPHAVEALVKQPPDRWLSNARMTHYQAMLLDTDRVQFGPVVALNPATLLPLPEKEAPHDCLEILAETHGTRPDLTDQPIPDADYTWYTDGSSFLQEGQRRAGAAVTTETEVIWARALPAGTSAQRAELIALTQALKMAEGKKLNVYTDSRYAFATAHVHGEIYRRRGWLTSEGREIKNKNEILALLKALFLPKRLSIIHCPGHQKGNSAEARGNRMADQAAREAAMKAVLETSTLLAGKRTADGSEFEKRTADGSEFESPKKKAKVE

SEQ ID NO: 1010 - protein, 2096 aa, synthetic construct
MPAAKRVKLDGGDKKYSIGLDIGTNSVGWAVITDEYKVPSKKFKVLGNTDRHSIKKNLIGALLFDSGETAEATRLKRTARRRYTRRKNRICYLQEIFSNEMAKVDDSFFHRLEESFLVEEDKKHERHPIFGNIVDEVAYHEKYPTIYHLRKKLVDSTDKADLRLIYLALAHMIKFRGHFLIEGDLNPDNSDVDKLFIQLVQTYNQLFEENPINASGVDAKAILSARLSKSRRLENLIAQLPGEKKNGLFGNLIALSLGLTPNFKSNFDLAEDAKLQLSKDTYDDDLDNLLAQIGDQYADLFLAAKNLSDAILLSDILRVNTEITKAPLSASMIKRYDEHHQDLTLLKALVRQQLPEKYKEIFFDQSKNGYAGYIDGGASQEEFYKFIKPILEKMDGTEELLVKLNREDLLRKQRTFDNGSIPHQIHLGELHAILRRQEDFYPFLKDNREKIEKILTFRIPYYVGPLARGNSRFAWMTRKSEETITPWNFEEVVDKGASAQSFIERMTNFDKNLPNEKVLPKHSLLYEYFTVYNELTKVKYVTEGMRKPAFLSGEQKKAIVDLLFKTNRKVTVKQLKEDYFKKIECFDSVEISGVEDRFNASLGTYHDLLKIIKDKDFLDNEENEDILEDIVLTLTLFEDREMIEERLKTYAHLFDDKVMKQLKRRRYTGWGRLSRKLINGIRDKQSGKTILDFLKSDGFANRNFMQLIHDDSLTFKEDIQKAQVSGQGDSLHEHIANLAGSPAIKKGILQTVKVVDELVKVMGRHKPENIVIEMARENQTTQKGQKNSRERMKRIEEGIKELGSQILKEHPVENTQLQNEKLYLYYLQNGRDMYVDQELDINRLSDYDVDHIVPQSFLKDDSIDNKVLTRSDKARGKSDNVPSEEVVKKMKNYWRQLLNAKLITQRKFDNLTKAERGGLSELDKAGFIKRQLVETRQITKHVAQILDSRMNTKYDENDKLIREVKVITLKSKLVSDFRKDFQFYKVREINNYHHAHDAYLNAVVGTALIKKYPKLESEFVYGDYKVYDVRKMIAKSEQEIGKATAKYFFYSNIMNFFKTEITLANGEIRKRPLIETNGETGEIVWDKGRDFATVRKVLSMPQVNIVKKTEVQTGGFSKESILPKRNSDKLIARKKDWDPKKYGGFDSPTVAYSVLVVAKVEKGKSKKLKSVKELLGITIMERSSFEKNPIDFLEAKGYKEVKKDLIIKLPKYSLFELENGRKRMLASAGELQKGNELALPSKYVNFLYLASHYEKLKGSPEDNEQKQLFVEQHKHYLDEIIEQISEFSKRVILADANLDKVLSAYNKHRDKPIREQAENIIHLFTLTNLGAPAAFKYFDTTIDRKRYTSTKEVLDATLIHQSITGLYETRIDLSQLGGDGGGSSPAPEAAAKGGTLNIEDEYRLHETSKEPDVPLGSTWLSDFPQAWAETGGMGLAVRQAPLIIPLKATSTPVSIKQYPMSQEARLGIKPHIQRLLDQGILVPCQSPWNTPLLPVKKPGTNDYRPVQDLREVNKRVEDIHPTVPNPYNLLSGLPPSHQWYTVLDLKDAFFCLRLHPTSQPLFAFEWRDPEMGISGQLTWTRLPQGFKNSPTLFNEALHRDLADFRIQHPDLILLQYVDDLLLAATSEQDCQRGTRALLQTLGNLGYRASAKKAQICQKQVKYLGYLLKEGQRWLTEARKETVMGQPTPKTPRQLREFLGKAGFCRLFIPGFAEMAAPLYPLTKPGTLFNWGPDQQKAYQEIKQALLTAPALGLPDLTKPFELFVDEKQGYAKGVLTQKLGPWRRPVAYLSKKLDPVAAGWPPCLRMVAAIAVLTKDAGKLTMGQPLVILAPHAVEALVKQPPDRWLSNARMTHYQAMLLDTDRVQFGPVVALNPATLLPLPEKEAPHDCLEILAETHGTRPDLTDQPIPDADYTWYTDGSSFLQEGQRRAGAAVTTETEVIWARALPAGTSAQRAELIALTQALKMAEGKKLNVYTDSRYAFATAHVHGEIYRRRGWLTSEGREIKNKNEILALLKALFLPKRLSIIHCPGHQKGNSAEARGNRMADQAAREAAMKAVLETSTLLAGKRTADGSEFEKRTADGSEFESPKKKAKVE

SEQ ID NO: 1011 - protein, 2088 aa, synthetic construct
MPAAKRVKLDGGDKKYSIGLDIGTNSVGWAVITDEYKVPSKKFKVLGNTDRHSIKKNLIGALLFDSGETAEATRLKRTARRRYTRRKNRICYLQEIFSNEMAKVDDSFFHRLEESFLVEEDKKHERHPIFGNIVDEVAYHEKYPTIYHLRKKLVDSTDKADLRLIYLALAHMIKFRGHFLIEGDLNPDNSDVDKLFIQLVQTYNQLFEENPINASGVDAKAILSARLSKSRRLENLIAQLPGEKKNGLFGNLIALSLGLTPNFKSNFDLAEDAKLQLSKDTYDDDLDNLLAQIGDQYADLFLAAKNLSDAILLSDILRVNTEITKAPLSASMIKRYDEHHQDLTLLKALVRQQLPEKYKEIFFDQSKNGYAGYIDGGASQEEFYKFIKPILEKMDGTEELLVKLNREDLLRKQRTFDNGSIPHQIHLGELHAILRRQEDFYPFLKDNREKIEKILTFRIPYYVGPLARGNSRFAWMTRKSEETITPWNFEEVVDKGASAQSFIERMTNFDKNLPNEKVLPKHSLLYEYFTVYNELTKVKYVTEGMRKPAFLSGEQKKAIVDLLFKTNRKVTVKQLKEDYFKKIECFDSVEISGVEDRFNASLGTYHDLLKIIKDKDFLDNEENEDILEDIVLTLTLFEDREMIEERLKTYAHLFDDKVMKQLKRRRYTGWGRLSRKLINGIRDKQSGKTILDFLKSDGFANRNFMQLIHDDSLTFKEDIQKAQVSGQGDSLHEHIANLAGSPAIKKGILQTVKVVDELVKVMGRHKPENIVIEMARENQTTQKGQKNSRERMKRIEEGIKELGSQILKEHPVENTQLQNEKLYLYYLQNGRDMYVDQELDINRLSDYDVDHIVPQSFLKDDSIDNKVLTRSDKARGKSDNVPSEEVVKKMKNYWRQLLNAKLITQRKFDNLTKAERGGLSELDKAGFIKRQLVETRQITKHVAQILDSRMNTKYDENDKLIREVKVITLKSKLVSDFRKDFQFYKVREINNYHHAHDAYLNAVVGTALIKKYPKLESEFVYGDYKVYDVRKMIAKSEQEIGKATAKYFFYSNIMNFFKTEITLANGEIRKRPLIETNGETGEIVWDKGRDFATVRKVLSMPQVNIVKKTEVQTGGFSKESILPKRNSDKLIARKKDWDPKKYGGFDSPTVAYSVLVVAKVEKGKSKKLKSVKELLGITIMERSSFEKNPIDFLEAKGYKEVKKDLIIKLPKYSLFELENGRKRMLASAGELQKGNELALPSKYVNFLYLASHYEKLKGSPEDNEQKQLFVEQHKHYLDEIIEQISEFSKRVILADANLDKVLSAYNKHRDKPIREQAENIIHLFTLTNLGAPAAFKYFDTTIDRKRYTSTKEVLDATLIHQSITGLYETRIDLSQLGGDGGGSSGGTLNIEDEYRLHETSKEPDVPLGSTWLSDFPQAWAETGGMGLAVRQAPLIIPLKATSTPVSIKQYPMSQEARLGIKPHIQRLLDQGILVPCQSPWNTPLLPVKKPGTNDYRPVQDLREVNKRVEDIHPTVPNPYNLLSGLPPSHQWYTVLDLKDAFFCLRLHPTSQPLFAFEWRDPEMGISGQLTWTRLPQGFKNSPTLFNEALHRDLADFRIQHPDLILLQYVDDLLLAATSEQDCQRGTRALLQTLGNLGYRASAKKAQICQKQVKYLGYLLKEGQRWLTEARKETVMGQPTPKTPRQLREFLGKAGFCRLFIPGFAEMAAPLYPLTKPGTLFNWGPDQQKAYQEIKQALLTAPALGLPDLTKPFELFVDEKQGYAKGVLTQKLGPWRRPVAYLSKKLDPVAAGWPPCLRMVAAIAVLTKDAGKLTMGQPLVILAPHAVEALVKQPPDRWLSNARMTHYQAMLLDTDRVQFGPVVALNPATLLPLPEKEAPHDCLEILAETHGTRPDLTDQPIPDADYTWYTDGSSFLQEGQRRAGAAVTTETEVIWARALPAGTSAQRAELIALTQALKMAEGKKLNVYTDSRYAFATAHVHGEIYRRRGWLTSEGREIKNKNEILALLKALFLPKRLSIIHCPGHQKGNSAEARGNRMADQAAREAAMKAVLETSTLLAGKRTADGSEFEKRTADGSEFESPKKKAKVE

SEQ ID NO: 1012 - protein, 2096 aa, synthetic construct
MPAAKRVKLDGGDKKYSIGLDIGTNSVGWAVITDEYKVPSKKFKVLGNTDRHSIKKNLIGALLFDSGETAEATRLKRTARRRYTRRKNRICYLQEIFSNEMAKVDDSFFHRLEESFLVEEDKKHERHPIFGNIVDEVAYHEKYPTIYHLRKKLVDSTDKADLRLIYLALAHMIKFRGHFLIEGDLNPDNSDVDKLFIQLVQTYNQLFEENPINASGVDAKAILSARLSKSRRLENLIAQLPGEKKNGLFGNLIALSLGLTPNFKSNFDLAEDAKLQLSKDTYDDDLDNLLAQIGDQYADLFLAAKNLSDAILLSDILRVNTEITKAPLSASMIKRYDEHHQDLTLLKALVRQQLPEKYKEIFFDQSKNGYAGYIDGGASQEEFYKFIKPILEKMDGTEELLVKLNREDLLRKQRTFDNGSIPHQIHLGELHAILRRQEDFYPFLKDNREKIEKILTFRIPYYVGPLARGNSRFAWMTRKSEETITPWNFEEVVDKGASAQSFIERMTNFDKNLPNEKVLPKHSLLYEYFTVYNELTKVKYVTEGMRKPAFLSGEQKKAIVDLLFKTNRKVTVKQLKEDYFKKIECFDSVEISGVEDRFNASLGTYHDLLKIIKDKDFLDNEENEDILEDIVLTLTLFEDREMIEERLKTYAHLFDDKVMKQLKRRRYTGWGRLSRKLINGIRDKQSGKTILDFLKSDGFANRNFMQLIHDDSLTFKEDIQKAQVSGQGDSLHEHIANLAGSPAIKKGILQTVKVVDELVKVMGRHKPENIVIEMARENQTTQKGQKNSRERMKRIEEGIKELGSQILKEHPVENTQLQNEKLYLYYLQNGRDMYVDQELDINRLSDYDVDHIVPQSFLKDDSIDNKVLTRSDKARGKSDNVPSEEVVKKMKNYWRQLLNAKLITQRKFDNLTKAERGGLSELDKAGFIKRQLVETRQITKHVAQILDSRMNTKYDENDKLIREVKVITLKSKLVSDFRKDFQFYKVREINNYHHAHDAYLNAVVGTALIKKYPKLESEFVYGDYKVYDVRKMIAKSEQEIGKATAKYFFYSNIMNFFKTEITLANGEIRKRPLIETNGETGEIVWDKGRDFATVRKVLSMPQVNIVKKTEVQTGGFSKESILPKRNSDKLIARKKDWDPKKYGGFDSPTVAYSVLVVAKVEKGKSKKLKSVKELLGITIMERSSFEKNPIDFLEAKGYKEVKKDLIIKLPKYSLFELENGRKRMLASAGELQKGNELALPSKYVNFLYLASHYEKLKGSPEDNEQKQLFVEQHKHYLDEIIEQISEFSKRVILADANLDKVLSAYNKHRDKPIREQAENIIHLFTLTNLGAPAAFKYFDTTIDRKRYTSTKEVLDATLIHQSITGLYETRIDLSQLGGDGGEAAAKGSSGGGGGTLNIEDEYRLHETSKEPDVPLGSTWLSDFPQAWAETGGMGLAVRQAPLIIPLKATSTPVSIKQYPMSQEARLGIKPHIQRLLDQGILVPCQSPWNTPLLPVKKPGTNDYRPVQDLREVNKRVEDIHPTVPNPYNLLSGLPPSHQWYTVLDLKDAFFCLRLHPTSQPLFAFEWRDPEMGISGQLTWTRLPQGFKNSPTLFNEALHRDLADFRIQHPDLILLQYVDDLLLAATSEQDCQRGTRALLQTLGNLGYRASAKKAQICQKQVKYLGYLLKEGQRWLTEARKETVMGQPTPKTPRQLREFLGKAGFCRLFIPGFAEMAAPLYPLTKPGTLFNWGPDQQKAYQEIKQALLTAPALGLPDLTKPFELFVDEKQGYAKGVLTQKLGPWRRPVAYLSKKLDPVAAGWPPCLRMVAAIAVLTKDAGKLTMGQPLVILAPHAVEALVKQPPDRWLSNARMTHYQAMLLDTDRVQFGPVVALNPATLLPLPEKEAPHDCLEILAETHGTRPDLTDQPIPDADYTWYTDGSSFLQEGQRRAGAAVTTETEVIWARALPAGTSAQRAELIALTQALKMAEGKKLNVYTDSRYAFATAHVHGEIYRRRGWLTSEGREIKNKNEILALLKALFLPKRLSIIHCPGHQKGNSAEARGNRMADQAAREAAMKAVLETSTLLAGKRTADGSEFEKRTADGSEFESPKKKAKVE

SEQ ID NO: 1013 - protein, 2094 aa, synthetic construct
MPAAKRVKLDGGDKKYSIGLDIGTNSVGWAVITDEYKVPSKKFKVLGNTDRHSIKKNLIGALLFDSGETAEATRLKRTARRRYTRRKNRICYLQEIFSNEMAKVDDSFFHRLEESFLVEEDKKHERHPIFGNIVDEVAYHEKYPTIYHLRKKLVDSTDKADLRLIYLALAHMIKFRGHFLIEGDLNPDNSDVDKLFIQLVQTYNQLFEENPINASGVDAKAILSARLSKSRRLENLIAQLPGEKKNGLFGNLIALSLGLTPNFKSNFDLAEDAKLQLSKDTYDDDLDNLLAQIGDQYADLFLAAKNLSDAILLSDILRVNTEITKAPLSASMIKRYDEHHQDLTLLKALVRQQLPEKYKEIFFDQSKNGYAGYIDGGASQEEFYKFIKPILEKMDGTEELLVKLNREDLLRKQRTFDNGSIPHQIHLGELHAILRRQEDFYPFLKDNREKIEKILTFRIPYYVGPLARGNSRFAWMTRKSEETITPWNFEEVVDKGASAQSFIERMTNFDKNLPNEKVLPKHSLLYEYFTVYNELTKVKYVTEGMRKPAFLSGEQKKAIVDLLFKTNRKVTVKQLKEDYFKKIECFDSVEISGVEDRFNASLGTYHDLLKIIKDKDFLDNEENEDILEDIVLTLTLFEDREMIEERLKTYAHLFDDKVMKQLKRRRYTGWGRLSRKLINGIRDKQSGKTILDFLKSDGFANRNFMQLIHDDSLTFKEDIQKAQVSGQGDSLHEHIANLAGSPAIKKGILQTVKVVDELVKVMGRHKPENIVIEMARENQTTQKGQKNSRERMKRIEEGIKELGSQILKEHPVENTQLQNEKLYLYYLQNGRDMYVDQELDINRLSDYDVDHIVPQSFLKDDSIDNKVLTRSDKARGKSDNVPSEEVVKKMKNYWRQLLNAKLITQRKFDNLTKAERGGLSELDKAGFIKRQLVETRQITKHVAQILDSRMNTKYDENDKLIREVKVITLKSKLVSDFRKDFQFYKVREINNYHHAHDAYLNAVVGTALIKKYPKLESEFVYGDYKVYDVRKMIAKSEQEIGKATAKYFFYSNIMNFFKTEITLANGEIRKRPLIETNGETGEIVWDKGRDFATVRKVLSMPQVNIVKKTEVQTGGFSKESILPKRNSDKLIARKKDWDPKKYGGFDSPTVAYSVLVVAKVEKGKSKKLKSVKELLGITIMERSSFEKNPIDFLEAKGYKEVKKDLIIKLPKYSLFELENGRKRMLASAGELQKGNELALPSKYVNFLYLASHYEKLKGSPEDNEQKQLFVEQHKHYLDEIIEQISEFSKRVILADANLDKVLSAYNKHRDKPIREQAENIIHLFTLTNLGAPAAFKYFDTTIDRKRYTSTKEVLDATLIHQSITGLYETRIDLSQLGGDGGGGGPAPGSSGGTLNIEDEYRLHETSKEPDVPLGSTWLSDFPQAWAETGGMGLAVRQAPLIIPLKATSTPVSIKQYPMSQEARLGIKPHIQRLLDQGILVPCQSPWNTPLLPVKKPGTNDYRPVQDLREVNKRVEDIHPTVPNPYNLLSGLPPSHQWYTVLDLKDAFFCLRLHPTSQPLFAFEWRDPEMGISGQLTWTRLPQGFKNSPTLFNEALHRDLADFRIQHPDLILLQYVDDLLLAATSEQDCQRGTRALLQTLGNLGYRASAKKAQICQKQVKYLGYLLKEGQRWLTEARKETVMGQPTPKTPRQLREFLGKAGFCRLFIPGFAEMAAPLYPLTKPGTLFNWGPDQQKAYQEIKQALLTAPALGLPDLTKPFELFVDEKQGYAKGVLTQKLGPWRRPVAYLSKKLDPVAAGWPPCLRMVAAIAVLTKDAGKLTMGQPLVILAPHAVEALVKQPPDRWLSNARMTHYQAMLLDTDRVQFGPVVALNPATLLPLPEKEAPHDCLEILAETHGTRPDLTDQPIPDADYTWYTDGSSFLQEGQRRAGAAVTTETEVIWARALPAGTSAQRAELIALTQALKMAEGKKLNVYTDSRYAFATAHVHGEIYRRRGWLTSEGREIKNKNEILALLKALFLPKRLSIIHCPGHQKGNSAEARGNRMADQAAREAAMKAVLETSTLLAGKRTADGSEFEKRTADGSEFESPKKKAKVE

SEQ ID NO: 1014 - protein, 2094 aa, synthetic construct
MPAAKRVKLDGGDKKYSIGLDIGTNSVGWAVITDEYKVPSKKFKVLGNTDRHSIKKNLIGALLFDSGETAEATRLKRTARRRYTRRKNRICYLQEIFSNEMAKVDDSFFHRLEESFLVEEDKKHERHPIFGNIVDEVAYHEKYPTIYHLRKKLVDSTDKADLRLIYLALAHMIKFRGHFLIEGDLNPDNSDVDKLFIQLVQTYNQLFEENPINASGVDAKAILSARLSKSRRLENLIAQLPGEKKNGLFGNLIALSLGLTPNFKSNFDLAEDAKLQLSKDTYDDDLDNLLAQIGDQYADLFLAAKNLSDAILLSDILRVNTEITKAPLSASMIKRYDEHHQDLTLLKALVRQQLPEKYKEIFFDQSKNGYAGYIDGGASQEEFYKFIKPILEKMDGTEELLVKLNREDLLRKQRTFDNGSIPHQIHLGELHAILRRQEDFYPFLKDNREKIEKILTFRIPYYVGPLARGNSRFAWMTRKSEETITPWNFEEVVDKGASAQSFIERMTNFDKNLPNEKVLPKHSLLYEYFTVYNELTKVKYVTEGMRKPAFLSGEQKKAIVDLLFKTNRKVTVKQLKEDYFKKIECFDSVEISGVEDRFNASLGTYHDLLKIIKDKDFLDNEENEDILEDIVLTLTLFEDREMIEERLKTYAHLFDDKVMKQLKRRRYTGWGRLSRKLINGIRDKQSGKTILDFLKSDGFANRNFMQLIHDDSLTFKEDIQKAQVSGQGDSLHEHIANLAGSPAIKKGILQTVKVVDELVKVMGRHKPENIVIEMARENQTTQKGQKNSRERMKRIEEGIKELGSQILKEHPVENTQLQNEKLYLYYLQNGRDMYVDQELDINRLSDYDVDHIVPQSFLKDDSIDNKVLTRSDKARGKSDNVPSEEVVKKMKNYWRQLLNAKLITQRKFDNLTKAERGGLSELDKAGFIKRQLVETRQITKHVAQILDSRMNTKYDENDKLIREVKVITLKSKLVSDFRKDFQFYKVREINNYHHAHDAYLNAVVGTALIKKYPKLESEFVYGDYKVYDVRKMIAKSEQEIGKATAKYFFYSNIMNFFKTEITLANGEIRKRPLIETNGETGEIVWDKGRDFATVRKVLSMPQVNIVKKTEVQTGGFSKESILPKRNSDKLIARKKDWDPKKYGGFDSPTVAYSVLVVAKVEKGKSKKLKSVKELLGITIMERSSFEKNPIDFLEAKGYKEVKKDLIIKLPKYSLFELENGRKRMLASAGELQKGNELALPSKYVNFLYLASHYEKLKGSPEDNEQKQLFVEQHKHYLDEIIEQISEFSKRVILADANLDKVLSAYNKHRDKPIREQAENIIHLFTLTNLGAPAAFKYFDTTIDRKRYTSTKEVLDATLIHQSITGLYETRIDLSQLGGDGGGSSPAPGGSGGTLNIEDEYRLHETSKEPDVPLGSTWLSDFPQAWAETGGMGLAVRQAPLIIPLKATSTPVSIKQYPMSQEARLGIKPHIQRLLDQGILVPCQSPWNTPLLPVKKPGTNDYRPVQDLREVNKRVEDIHPTVPNPYNLLSGLPPSHQWYTVLDLKDAFFCLRLHPTSQPLFAFEWRDPEMGISGQLTWTRLPQGFKNSPTLFNEALHRDLADFRIQHPDLILLQYVDDLLLAATSEQDCQRGTRALLQTLGNLGYRASAKKAQICQKQVKYLGYLLKEGQRWLTEARKETVMGQPTPKTPRQLREFLGKAGFCRLFIPGFAEMAAPLYPLTKPGTLFNWGPDQQKAYQEIKQALLTAPALGLPDLTKPFELFVDEKQGYAKGVLTQKLGPWRRPVAYLSKKLDPVAAGWPPCLRMVAAIAVLTKDAGKLTMGQPLVILAPHAVEALVKQPPDRWLSNARMTHYQAMLLDTDRVQFGPVVALNPATLLPLPEKEAPHDCLEILAETHGTRPDLTDQPIPDADYTWYTDGSSFLQEGQRRAGAAVTTETEVIWARALPAGTSAQRAELIALTQALKMAEGKKLNVYTDSRYAFATAHVHGEIYRRRGWLTSEGREIKNKNEILALLKALFLPKRLSIIHCPGHQKGNSAEARGNRMADQAAREAAMKAVLETSTLLAGKRTADGSEFEKRTADGSEFESPKKKAKVE

SEQ ID NO: 1015 - protein, 2094 aa, synthetic construct
MPAAKRVKLDGGDKKYSIGLDIGTNSVGWAVITDEYKVPSKKFKVLGNTDRHSIKKNLIGALLFDSGETAEATRLKRTARRRYTRRKNRICYLQEIFSNEMAKVDDSFFHRLEESFLVEEDKKHERHPIFGNIVDEVAYHEKYPTIYHLRKKLVDSTDKADLRLIYLALAHMIKFRGHFLIEGDLNPDNSDVDKLFIQLVQTYNQLFEENPINASGVDAKAILSARLSKSRRLENLIAQLPGEKKNGLFGNLIALSLGLTPNFKSNFDLAEDAKLQLSKDTYDDDLDNLLAQIGDQYADLFLAAKNLSDAILLSDILRVNTEITKAPLSASMIKRYDEHHQDLTLLKALVRQQLPEKYKEIFFDQSKNGYAGYIDGGASQEEFYKFIKPILEKMDGTEELLVKLNREDLLRKQRTFDNGSIPHQIHLGELHAILRRQEDFYPFLKDNREKIEKILTFRIPYYVGPLARGNSRFAWMTRKSEETITPWNFEEVVDKGASAQSFIERMTNFDKNLPNEKVLPKHSLLYEYFTVYNELTKVKYVTEGMRKPAFLSGEQKKAIVDLLFKTNRKVTVKQLKEDYFKKIECFDSVEISGVEDRFNASLGTYHDLLKIIKDKDFLDNEENEDILEDIVLTLTLFEDREMIEERLKTYAHLFDDKVMKQLKRRRYTGWGRLSRKLINGIRDKQSGKTILDFLKSDGFANRNFMQLIHDDSLTFKEDIQKAQVSGQGDSLHEHIANLAGSPAIKKGILQTVKVVDELVKVMGRHKPENIVIEMARENQTTQKGQKNSRERMKRIEEGIKELGSQILKEHPVENTQLQNEKLYLYYLQNGRDMYVDQELDINRLSDYDVDHIVPQSFLKDDSIDNKVLTRSDKARGKSDNVPSEEVVKKMKNYWRQLLNAKLITQRKFDNLTKAERGGLSELDKAGFIKRQLVETRQITKHVAQILDSRMNTKYDENDKLIREVKVITLKSKLVSDFRKDFQFYKVREINNYHHAHDAYLNAVVGTALIKKYPKLESEFVYGDYKVYDVRKMIAKSEQEIGKATAKYFFYSNIMNFFKTEITLANGEIRKRPLIETNGETGEIVWDKGRDFATVRKVLSMPQVNIVKKTEVQTGGFSKESILPKRNSDKLIARKKDWDPKKYGGFDSPTVAYSVLVVAKVEKGKSKKLKSVKELLGITIMERSSFEKNPIDFLEAKGYKEVKKDLIIKLPKYSLFELENGRKRMLASAGELQKGNELALPSKYVNFLYLASHYEKLKGSPEDNEQKQLFVEQHKHYLDEIIEQISEFSKRVILADANLDKVLSAYNKHRDKPIREQAENIIHLFTLTNLGAPAAFKYFDTTIDRKRYTSTKEVLDATLIHQSITGLYETRIDLSQLGGDGGGGGGGSPAPGGTLNIEDEYRLHETSKEPDVPLGSTWLSDFPQAWAETGGMGLAVRQAPLIIPLKATSTPVSIKQYPMSQEARLGIKPHIQRLLDQGILVPCQSPWNTPLLPVKKPGTNDYRPVQDLREVNKRVEDIHPTVPNPYNLLSGLPPSHQWYTVLDLKDAFFCLRLHPTSQPLFAFEWRDPEMGISGQLTWTRLPQGFKNSPTLFNEALHRDLADFRIQHPDLILLQYVDDLLLAATSEQDCQRGTRALLQTLGNLGYRASAKKAQICQKQVKYLGYLLKEGQRWLTEARKETVMGQPTPKTPRQLREFLGKAGFCRLFIPGFAEMAAPLYPLTKPGTLFNWGPDQQKAYQEIKQALLTAPALGLPDLTKPFELFVDEKQGYAKGVLTQKLGPWRRPVAYLSKKLDPVAAGWPPCLRMVAAIAVLTKDAGKLTMGQPLVILAPHAVEALVKQPPDRWLSNARMTHYQAMLLDTDRVQFGPVVALNPATLLPLPEKEAPHDCLEILAETHGTRPDLTDQPIPDADYTWYTDGSSFLQEGQRRAGAAVTTETEVIWARALPAGTSAQRAELIALTQALKMAEGKKLNVYTDSRYAFATAHVHGEIYRRRGWLTSEGREIKNKNEILALLKALFLPKRLSIIHCPGHQKGNSAEARGNRMADQAAREAAMKAVLETSTLLAGKRTADGSEFEKRTADGSEFESPKKKAKVE

SEQ ID NO: 1016 - protein, 2091 aa, synthetic construct
MPAAKRVKLDGGDKKYSIGLDIGTNSVGWAVITDEYKVPSKKFKVLGNTDRHSIKKNLIGALLFDSGETAEATRLKRTARRRYTRRKNRICYLQEIFSNEMAKVDDSFFHRLEESFLVEEDKKHERHPIFGNIVDEVAYHEKYPTIYHLRKKLVDSTDKADLRLIYLALAHMIKFRGHFLIEGDLNPDNSDVDKLFIQLVQTYNQLFEENPINASGVDAKAILSARLSKSRRLENLIAQLPGEKKNGLFGNLIALSLGLTPNFKSNFDLAEDAKLQLSKDTYDDDLDNLLAQIGDQYADLFLAAKNLSDAILLSDILRVNTEITKAPLSASMIKRYDEHHQDLTLLKALVRQQLPEKYKEIFFDQSKNGYAGYIDGGASQEEFYKFIKPILEKMDGTEELLVKLNREDLLRKQRTFDNGSIPHQIHLGELHAILRRQEDFYPFLKDNREKIEKILTFRIPYYVGPLARGNSRFAWMTRKSEETITPWNFEEVVDKGASAQSFIERMTNFDKNLPNEKVLPKHSLLYEYFTVYNELTKVKYVTEGMRKPAFLSGEQKKAIVDLLFKTNRKVTVKQLKEDYFKKIECFDSVEISGVEDRFNASLGTYHDLLKIIKDKDFLDNEENEDILEDIVLTLTLFEDREMIEERLKTYAHLFDDKVMKQLKRRRYTGWGRLSRKLINGIRDKQSGKTILDFLKSDGFANRNFMQLIHDDSLTFKEDIQKAQVSGQGDSLHEHIANLAGSPAIKKGILQTVKVVDELVKVMGRHKPENIVIEMARENQTTQKGQKNSRERMKRIEEGIKELGSQILKEHPVENTQLQNEKLYLYYLQNGRDMYVDQELDINRLSDYDVDHIVPQSFLKDDSIDNKVLTRSDKARGKSDNVPSEEVVKKMKNYWRQLLNAKLITQRKFDNLTKAERGGLSELDKAGFIKRQLVETRQITKHVAQILDSRMNTKYDENDKLIREVKVITLKSKLVSDFRKDFQFYKVREINNYHHAHDAYLNAVVGTALIKKYPKLESEFVYGDYKVYDVRKMIAKSEQEIGKATAKYFFYSNIMNFFKTEITLANGEIRKRPLIETNGETGEIVWDKGRDFATVRKVLSMPQVNIVKKTEVQTGGFSKESILPKRNSDKLIARKKDWDPKKYGGFDSPTVAYSVLVVAKVEKGKSKKLKSVKELLGITIMERSSFEKNPIDFLEAKGYKEVKKDLIIKLPKYSLFELENGRKRMLASAGELQKGNELALPSKYVNFLYLASHYEKLKGSPEDNEQKQLFVEQHKHYLDEIIEQISEFSKRVILADANLDKVLSAYNKHRDKPIREQAENIIHLFTLTNLGAPAAFKYFDTTIDRKRYTSTKEVLDATLIHQSITGLYETRIDLSQLGGDGGGGSGSSGGTLNIEDEYRLHETSKEPDVPLGSTWLSDFPQAWAETGGMGLAVRQAPLIIPLKATSTPVSIKQYPMSQEARLGIKPHIQRLLDQGILVPCQSPWNTPLLPVKKPGTNDYRPVQDLREVNKRVEDIHPTVPNPYNLLSGLPPSHQWYTVLDLKDAFFCLRLHPTSQPLFAFEWRDPEMGISGQLTWTRLPQGFKNSPTLFNEALHRDLADFRIQHPDLILLQYVDDLLLAATSEQDCQRGTRALLQTLGNLGYRASAKKAQICQKQVKYLGYLLKEGQRWLTEARKETVMGQPTPKTPRQLREFLGKAGFCRLFIPGFAEMAAPLYPLTKPGTLFNWGPDQQKAYQEIKQALLTAPALGLPDLTKPFELFVDEKQGYAKGVLTQKLGPWRRPVAYLSKKLDPVAAGWPPCLRMVAAIAVLTKDAGKLTMGQPLVILAPHAVEALVKQPPDRWLSNARMTHYQAMLLDTDRVQFGPVVALNPATLLPLPEKEAPHDCLEILAETHGTRPDLTDQPIPDADYTWYTDGSSFLQEGQRRAGAAVTTETEVIWARALPAGTSAQRAELIALTQALKMAEGKKLNVYTDSRYAFATAHVHGEIYRRRGWLTSEGREIKNKNEILALLKALFLPKRLSIIHCPGHQKGNSAEARGNRMADQAAREAAMKAVLETSTLLAGKRTADGSEFEKRTADGSEFESPKKKAKVE

SEQ ID NO: 1017 - protein, 2091 aa, synthetic construct
MPAAKRVKLDGGDKKYSIGLDIGTNSVGWAVITDEYKVPSKKFKVLGNTDRHSIKKNLIGALLFDSGETAEATRLKRTARRRYTRRKNRICYLQEIFSNEMAKVDDSFFHRLEESFLVEEDKKHERHPIFGNIVDEVAYHEKYPTIYHLRKKLVDSTDKADLRLIYLALAHMIKFRGHFLIEGDLNPDNSDVDKLFIQLVQTYNQLFEENPINASGVDAKAILSARLSKSRRLENLIAQLPGEKKNGLFGNLIALSLGLTPNFKSNFDLAEDAKLQLSKDTYDDDLDNLLAQIGDQYADLFLAAKNLSDAILLSDILRVNTEITKAPLSASMIKRYDEHHQDLTLLKALVRQQLPEKYKEIFFDQSKNGYAGYIDGGASQEEFYKFIKPILEKMDGTEELLVKLNREDLLRKQRTFDNGSIPHQIHLGELHAILRRQEDFYPFLKDNREKIEKILTFRIPYYVGPLARGNSRFAWMTRKSEETITPWNFEEVVDKGASAQSFIERMTNFDKNLPNEKVLPKHSLLYEYFTVYNELTKVKYVTEGMRKPAFLSGEQKKAIVDLLFKTNRKVTVKQLKEDYFKKIECFDSVEISGVEDRFNASLGTYHDLLKIIKDKDFLDNEENEDILEDIVLTLTLFEDREMIEERLKTYAHLFDDKVMKQLKRRRYTGWGRLSRKLINGIRDKQSGKTILDFLKSDGFANRNFMQLIHDDSLTFKEDIQKAQVSGQGDSLHEHIANLAGSPAIKKGILQTVKVVDELVKVMGRHKPENIVIEMARENQTTQKGQKNSRERMKRIEEGIKELGSQILKEHPVENTQLQNEKLYLYYLQNGRDMYVDQELDINRLSDYDVDHIVPQSFLKDDSIDNKVLTRSDKARGKSDNVPSEEVVKKMKNYWRQLLNAKLITQRKFDNLTKAERGGLSELDKAGFIKRQLVETRQITKHVAQILDSRMNTKYDENDKLIREVKVITLKSKLVSDFRKDFQFYKVREINNYHHAHDAYLNAVVGTALIKKYPKLESEFVYGDYKVYDVRKMIAKSEQEIGKATAKYFFYSNIMNFFKTEITLANGEIRKRPLIETNGETGEIVWDKGRDFATVRKVLSMPQVNIVKKTEVQTGGFSKESILPKRNSDKLIARKKDWDPKKYGGFDSPTVAYSVLVVAKVEKGKSKKLKSVKELLGITIMERSSFEKNPIDFLEAKGYKEVKKDLIIKLPKYSLFELENGRKRMLASAGELQKGNELALPSKYVNFLYLASHYEKLKGSPEDNEQKQLFVEQHKHYLDEIIEQISEFSKRVILADANLDKVLSAYNKHRDKPIREQAENIIHLFTLTNLGAPAAFKYFDTTIDRKRYTSTKEVLDATLIHQSITGLYETRIDLSQLGGDGGGGSPAPGGTLNIEDEYRLHETSKEPDVPLGSTWLSDFPQAWAETGGMGLAVRQAPLIIPLKATSTPVSIKQYPMSQEARLGIKPHIQRLLDQGILVPCQSPWNTPLLPVKKPGTNDYRPVQDLREVNKRVEDIHPTVPNPYNLLSGLPPSHQWYTVLDLKDAFFCLRLHPTSQPLFAFEWRDPEMGISGQLTWTRLPQGFKNSPTLFNEALHRDLADFRIQHPDLILLQYVDDLLLAATSEQDCQRGTRALLQTLGNLGYRASAKKAQICQKQVKYLGYLLKEGQRWLTEARKETVMGQPTPKTPRQLREFLGKAGFCRLFIPGFAEMAAPLYPLTKPGTLFNWGPDQQKAYQEIKQALLTAPALGLPDLTKPFELFVDEKQGYAKGVLTQKLGPWRRPVAYLSKKLDPVAAGWPPCLRMVAAIAVLTKDAGKLTMGQPLVILAPHAVEALVKQPPDRWLSNARMTHYQAMLLDTDRVQFGPVVALNPATLLPLPEKEAPHDCLEILAETHGTRPDLTDQPIPDADYTWYTDGSSFLQEGQRRAGAAVTTETEVIWARALPAGTSAQRAELIALTQALKMAEGKKLNVYTDSRYAFATAHVHGEIYRRRGWLTSEGREIKNKNEILALLKALFLPKRLSIIHCPGHQKGNSAEARGNRMADQAAREAAMKAVLETSTLLAGKRTADGSEFEKRTADGSEFESPKKKAKVE

SEQ ID NO: 1018 - protein, 2096 aa, synthetic construct
MPAAKRVKLDGGDKKYSIGLDIGTNSVGWAVITDEYKVPSKKFKVLGNTDRHSIKKNLIGALLFDSGETAEATRLKRTARRRYTRRKNRICYLQEIFSNEMAKVDDSFFHRLEESFLVEEDKKHERHPIFGNIVDEVAYHEKYPTIYHLRKKLVDSTDKADLRLIYLALAHMIKFRGHFLIEGDLNPDNSDVDKLFIQLVQTYNQLFEENPINASGVDAKAILSARLSKSRRLENLIAQLPGEKKNGLFGNLIALSLGLTPNFKSNFDLAEDAKLQLSKDTYDDDLDNLLAQIGDQYADLFLAAKNLSDAILLSDILRVNTEITKAPLSASMIKRYDEHHQDLTLLKALVRQQLPEKYKEIFFDQSKNGYAGYIDGGASQEEFYKFIKPILEKMDGTEELLVKLNREDLLRKQRTFDNGSIPHQIHLGELHAILRRQEDFYPFLKDNREKIEKILTFRIPYYVGPLARGNSRFAWMTRKSEETITPWNFEEVVDKGASAQSFIERMTNFDKNLPNEKVLPKHSLLYEYFTVYNELTKVKYVTEGMRKPAFLSGEQKKAIVDLLFKTNRKVTVKQLKEDYFKKIECFDSVEISGVEDRFNASLGTYHDLLKIIKDKDFLDNEENEDILEDIVLTLTLFEDREMIEERLKTYAHLFDDKVMKQLKRRRYTGWGRLSRKLINGIRDKQSGKTILDFLKSDGFANRNFMQLIHDDSLTFKEDIQKAQVSGQGDSLHEHIANLAGSPAIKKGILQTVKVVDELVKVMGRHKPENIVIEMARENQTTQKGQKNSRERMKRIEEGIKELGSQILKEHPVENTQLQNEKLYLYYLQNGRDMYVDQELDINRLSDYDVDHIVPQSFLKDDSIDNKVLTRSDKARGKSDNVPSEEVVKKMKNYWRQLLNAKLITQRKFDNLTKAERGGLSELDKAGFIKRQLVETRQITKHVAQILDSRMNTKYDENDKLIREVKVITLKSKLVSDFRKDFQFYKVREINNYHHAHDAYLNAVVGTALIKKYPKLESEFVYGDYKVYDVRKMIAKSEQEIGKATAKYFFYSNIMNFFKTEITLANGEIRKRPLIETNGETGEIVWDKGRDFATVRKVLSMPQVNIVKKTEVQTGGFSKESILPKRNSDKLIARKKDWDPKKYGGFDSPTVAYSVLVVAKVEKGKSKKLKSVKELLGITIMERSSFEKNPIDFLEAKGYKEVKKDLIIKLPKYSLFELENGRKRMLASAGELQKGNELALPSKYVNFLYLASHYEKLKGSPEDNEQKQLFVEQHKHYLDEIIEQISEFSKRVILADANLDKVLSAYNKHRDKPIREQAENIIHLFTLTNLGAPAAFKYFDTTIDRKRYTSTKEVLDATLIHQSITGLYETRIDLSQLGGDGGGGGEAAAKGGSGGTLNIEDEYRLHETSKEPDVPLGSTWLSDFPQAWAETGGMGLAVRQAPLIIPLKATSTPVSIKQYPMSQEARLGIKPHIQRLLDQGILVPCQSPWNTPLLPVKKPGTNDYRPVQDLREVNKRVEDIHPTVPNPYNLLSGLPPSHQWYTVLDLKDAFFCLRLHPTSQPLFAFEWRDPEMGISGQLTWTRLPQGFKNSPTLFNEALHRDLADFRIQHPDLILLQYVDDLLLAATSEQDCQRGTRALLQTLGNLGYRASAKKAQICQKQVKYLGYLLKEGQRWLTEARKETVMGQPTPKTPRQLREFLGKAGFCRLFIPGFAEMAAPLYPLTKPGTLFNWGPDQQKAYQEIKQALLTAPALGLPDLTKPFELFVDEKQGYAKGVLTQKLGPWRRPVAYLSKKLDPVAAGWPPCLRMVAAIAVLTKDAGKLTMGQPLVILAPHAVEALVKQPPDRWLSNARMTHYQAMLLDTDRVQFGPVVALNPATLLPLPEKEAPHDCLEILAETHGTRPDLTDQPIPDADYTWYTDGSSFLQEGQRRAGAAVTTETEVIWARALPAGTSAQRAELIALTQALKMAEGKKLNVYTDSRYAFATAHVHGEIYRRRGWLTSEGREIKNKNEILALLKALFLPKRLSIIHCPGHQKGNSAEARGNRMADQAAREAAMKAVLETSTLLAGKRTADGSEFEKRTADGSEFESPKKKAKVE

SEQ ID NO: 1019 - protein, 2097 aa, synthetic construct
MPAAKRVKLDGGDKKYSIGLDIGTNSVGWAVITDEYKVPSKKFKVLGNTDRHSIKKNLIGALLFDSGETAEATRLKRTARRRYTRRKNRICYLQEIFSNEMAKVDDSFFHRLEESFLVEEDKKHERHPIFGNIVDEVAYHEKYPTIYHLRKKLVDSTDKADLRLIYLALAHMIKFRGHFLIEGDLNPDNSDVDKLFIQLVQTYNQLFEENPINASGVDAKAILSARLSKSRRLENLIAQLPGEKKNGLFGNLIALSLGLTPNFKSNFDLAEDAKLQLSKDTYDDDLDNLLAQIGDQYADLFLAAKNLSDAILLSDILRVNTEITKAPLSASMIKRYDEHHQDLTLLKALVRQQLPEKYKEIFFDQSKNGYAGYIDGGASQEEFYKFIKPILEKMDGTEELLVKLNREDLLRKQRTFDNGSIPHQIHLGELHAILRRQEDFYPFLKDNREKIEKILTFRIPYYVGPLARGNSRFAWMTRKSEETITPWNFEEVVDKGASAQSFIERMTNFDKNLPNEKVLPKHSLLYEYFTVYNELTKVKYVTEGMRKPAFLSGEQKKAIVDLLFKTNRKVTVKQLKEDYFKKIECFDSVEISGVEDRFNASLGTYHDLLKIIKDKDFLDNEENEDILEDIVLTLTLFEDREMIEERLKTYAHLFDDKVMKQLKRRRYTGWGRLSRKLINGIRDKQSGKTILDFLKSDGFANRNFMQLIHDDSLTFKEDIQKAQVSGQGDSLHEHIANLAGSPAIKKGILQTVKVVDELVKVMGRHKPENIVIEMARENQTTQKGQKNSRERMKRIEEGIKELGSQILKEHPVENTQLQNEKLYLYYLQNGRDMYVDQELDINRLSDYDVDHIVPQSFLKDDSIDNKVLTRSDKARGKSDNVPSEEVVKKMKNYWRQLLNAKLITQRKFDNLTKAERGGLSELDKAGFIKRQLVETRQITKHVAQILDSRMNTKYDENDKLIREVKVITLKSKLVSDFRKDFQFYKVREINNYHHAHDAYLNAVVGTALIKKYPKLESEFVYGDYKVYDVRKMIAKSEQEIGKATAKYFFYSNIMNFFKTEITLANGEIRKRPLIETNGETGEIVWDKGRDFATVRKVLSMPQVNIVKKTEVQTGGFSKESILPKRNSDKLIARKKDWDPKKYGGFDSPTVAYSVLVVAKVEKGKSKKLKSVKELLGITIMERSSFEKNPIDFLEAKGYKEVKKDLIIKLPKYSLFELENGRKRMLASAGELQKGNELALPSKYVNFLYLASHYEKLKGSPEDNEQKQLFVEQHKHYLDEIIEQISEFSKRVILADANLDKVLSAYNKHRDKPIREQAENIIHLFTLTNLGAPAAFKYFDTTIDRKRYTSTKEVLDATLIHQSITGLYETRIDLSQLGGDGGGGSGGSGGSGGSGGTLNIEDEYRLHETSKEPDVPLGSTWLSDFPQAWAETGGMGLAVRQAPLIIPLKATSTPVSIKQYPMSQEARLGIKPHIQRLLDQGILVPCQSPWNTPLLPVKKPGTNDYRPVQDLREVNKRVEDIHPTVPNPYNLLSGLPPSHQWYTVLDLKDAFFCLRLHPTSQPLFAFEWRDPEMGISGQLTWTRLPQGFKNSPTLFNEALHRDLADFRIQHPDLILLQYVDDLLLAATSEQDCQRGTRALLQTLGNLGYRASAKKAQICQKQVKYLGYLLKEGQRWLTEARKETVMGQPTPKTPRQLREFLGKAGFCRLFIPGFAEMAAPLYPLTKPGTLFNWGPDQQKAYQEIKQALLTAPALGLPDLTKPFELFVDEKQGYAKGVLTQKLGPWRRPVAYLSKKLDPVAAGWPPCLRMVAAIAVLTKDAGKLTMGQPLVILAPHAVEALVKQPPDRWLSNARMTHYQAMLLDTDRVQFGPVVALNPATLLPLPEKEAPHDCLEILAETHGTRPDLTDQPIPDADYTWYTDGSSFLQEGQRRAGAAVTTETEVIWARALPAGTSAQRAELIALTQALKMAEGKKLNVYTDSRYAFATAHVHGEIYRRRGWLTSEGREIKNKNEILALLKALFLPKRLSIIHCPGHQKGNSAEARGNRMADQAAREAAMKAVLETSTLLAGKRTADGSEFEKRTADGSEFESPKKKAKVE

SEQ ID NO: 1020 - protein, 2098 aa, synthetic construct
MPAAKRVKLDGGDKKYSIGLDIGTNSVGWAVITDEYKVPSKKFKVLGNTDRHSIKKNLIGALLFDSGETAEATRLKRTARRRYTRRKNRICYLQEIFSNEMAKVDDSFFHRLEESFLVEEDKKHERHPIFGNIVDEVAYHEKYPTIYHLRKKLVDSTDKADLRLIYLALAHMIKFRGHFLIEGDLNPDNSDVDKLFIQLVQTYNQLFEENPINASGVDAKAILSARLSKSRRLENLIAQLPGEKKNGLFGNLIALSLGLTPNFKSNFDLAEDAKLQLSKDTYDDDLDNLLAQIGDQYADLFLAAKNLSDAILLSDILRVNTEITKAPLSASMIKRYDEHHQDLTLLKALVRQQLPEKYKEIFFDQSKNGYAGYIDGGASQEEFYKFIKPILEKMDGTEELLVKLNREDLLRKQRTFDNGSIPHQIHLGELHAILRRQEDFYPFLKDNREKIEKILTFRIPYYVGPLARGNSRFAWMTRKSEETITPWNFEEVVDKGASAQSFIERMTNFDKNLPNEKVLPKHSLLYEYFTVYNELTKVKYVTEGMRKPAFLSGEQKKAIVDLLFKTNRKVTVKQLKEDYFKKIECFDSVEISGVEDRFNASLGTYHDLLKIIKDKDFLDNEENEDILEDIVLTLTLFEDREMIEERLKTYAHLFDDKVMKQLKRRRYTGWGRLSRKLINGIRDKQSGKTILDFLKSDGFANRNFMQLIHDDSLTFKEDIQKAQVSGQGDSLHEHIANLAGSPAIKKGILQTVKVVDELVKVMGRHKPENIVIEMARENQTTQKGQKNSRERMKRIEEGIKELGSQILKEHPVENTQLQNEKLYLYYLQNGRDMYVDQELDINRLSDYDVDHIVPQSFLKDDSIDNKVLTRSDKARGKSDNVPSEEVVKKMKNYWRQLLNAKLITQRKFDNLTKAERGGLSELDKAGFIKRQLVETRQITKHVAQILDSRMNTKYDENDKLIREVKVITLKSKLVSDFRKDFQFYKVREINNYHHAHDAYLNAVVGTALIKKYPKLESEFVYGDYKVYDVRKMIAKSEQEIGKATAKYFFYSNIMNFFKTEITLANGEIRKRPLIETNGETGEIVWDKGRDFATVRKVLSMPQVNIVKKTEVQTGGFSKESILPKRNSDKLIARKKDWDPKKYGGFDSPTVAYSVLVVAKVEKGKSKKLKSVKELLGITIMERSSFEKNPIDFLEAKGYKEVKKDLIIKLPKYSLFELENGRKRMLASAGELQKGNELALPSKYVNFLYLASHYEKLKGSPEDNEQKQLFVEQHKHYLDEIIEQISEFSKRVILADANLDKVLSAYNKHRDKPIREQAENIIHLFTLTNLGAPAAFKYFDTTIDRKRYTSTKEVLDATLIHQSITGLYETRIDLSQLGGDGGPAPAPAPAPAPAPGGTLNIEDEYRLHETSKEPDVPLGSTWLSDFPQAWAETGGMGLAVRQAPLIIPLKATSTPVSIKQYPMSQEARLGIKPHIQRLLDQGILVPCQSPWNTPLLPVKKPGTNDYRPVQDLREVNKRVEDIHPTVPNPYNLLSGLPPSHQWYTVLDLKDAFFCLRLHPTSQPLFAFEWRDPEMGISGQLTWTRLPQGFKNSPTLFNEALHRDLADFRIQHPDLILLQYVDDLLLAATSEQDCQRGTRALLQTLGNLGYRASAKKAQICQKQVKYLGYLLKEGQRWLTEARKETVMGQPTPKTPRQLREFLGKAGFCRLFIPGFAEMAAPLYPLTKPGTLFNWGPDQQKAYQEIKQALLTAPALGLPDLTKPFELFVDEKQGYAKGVLTQKLGPWRRPVAYLSKKLDPVAAGWPPCLRMVAAIAVLTKDAGKLTMGQPLVILAPHAVEALVKQPPDRWLSNARMTHYQAMLLDTDRVQFGPVVALNPATLLPLPEKEAPHDCLEILAETHGTRPDLTDQPIPDADYTWYTDGSSFLQEGQRRAGAAVTTETEVIWARALPAGTSAQRAELIALTQALKMAEGKKLNVYTDSRYAFATAHVHGEIYRRRGWLTSEGREIKNKNEILALLKALFLPKRLSIIHCPGHQKGNSAEARGNRMADQAAREAAMKAVLETSTLLAGKRTADGSEFEKRTADGSEFESPKKKAKVE

SEQ ID NO: 1021 - protein, 2115 aa, synthetic construct
MPAAKRVKLDGGDKKYSIGLDIGTNSVGWAVITDEYKVPSKKFKVLGNTDRHSIKKNLIGALLFDSGETAEATRLKRTARRRYTRRKNRICYLQEIFSNEMAKVDDSFFHRLEESFLVEEDKKHERHPIFGNIVDEVAYHEKYPTIYHLRKKLVDSTDKADLRLIYLALAHMIKFRGHFLIEGDLNPDNSDVDKLFIQLVQTYNQLFEENPINASGVDAKAILSARLSKSRRLENLIAQLPGEKKNGLFGNLIALSLGLTPNFKSNFDLAEDAKLQLSKDTYDDDLDNLLAQIGDQYADLFLAAKNLSDAILLSDILRVNTEITKAPLSASMIKRYDEHHQDLTLLKALVRQQLPEKYKEIFFDQSKNGYAGYIDGGASQEEFYKFIKPILEKMDGTEELLVKLNREDLLRKQRTFDNGSIPHQIHLGELHAILRRQEDFYPFLKDNREKIEKILTFRIPYYVGPLARGNSRFAWMTRKSEETITPWNFEEVVDKGASAQSFIERMTNFDKNLPNEKVLPKHSLLYEYFTVYNELTKVKYVTEGMRKPAFLSGEQKKAIVDLLFKTNRKVTVKQLKEDYFKKIECFDSVEISGVEDRFNASLGTYHDLLKIIKDKDFLDNEENEDILEDIVLTLTLFEDREMIEERLKTYAHLFDDKVMKQLKRRRYTGWGRLSRKLINGIRDKQSGKTILDFLKSDGFANRNFMQLIHDDSLTFKEDIQKAQVSGQGDSLHEHIANLAGSPAIKKGILQTVKVVDELVKVMGRHKPENIVIEMARENQTTQKGQKNSRERMKRIEEGIKELGSQILKEHPVENTQLQNEKLYLYYLQNGRDMYVDQELDINRLSDYDVDHIVPQSFLKDDSIDNKVLTRSDKARGKSDNVPSEEVVKKMKNYWRQLLNAKLITQRKFDNLTKAERGGLSELDKAGFIKRQLVETRQITKHVAQILDSRMNTKYDENDKLIREVKVITLKSKLVSDFRKDFQFYKVREINNYHHAHDAYLNAVVGTALIKKYPKLESEFVYGDYKVYDVRKMIAKSEQEIGKATAKYFFYSNIMNFFKTEITLANGEIRKRPLIETNGETGEIVWDKGRDFATVRKVLSMPQVNIVKKTEVQTGGFSKESILPKRNSDKLIARKKDWDPKKYGGFDSPTVAYSVLVVAKVEKGKSKKLKSVKELLGITIMERSSFEKNPIDFLEAKGYKEVKKDLIIKLPKYSLFELENGRKRMLASAGELQKGNELALPSKYVNFLYLASHYEKLKGSPEDNEQKQLFVEQHKHYLDEIIEQISEFSKRVILADANLDKVLSAYNKHRDKPIREQAENIIHLFTLTNLGAPAAFKYFDTTIDRKRYTSTKEVLDATLIHQSITGLYETRIDLSQLGGDGGGGGGSGGGGSGGGGSGGGGSGGGGSGGGGSGGTLNIEDEYRLHETSKEPDVPLGSTWLSDFPQAWAETGGMGLAVRQAPLIIPLKATSTPVSIKQYPMSQEARLGIKPHIQRLLDQGILVPCQSPWNTPLLPVKKPGTNDYRPVQDLREVNKRVEDIHPTVPNPYNLLSGLPPSHQWYTVLDLKDAFFCLRLHPTSQPLFAFEWRDPEMGISGQLTWTRLPQGFKNSPTLFNEALHRDLADFRIQHPDLILLQYVDDLLLAATSEQDCQRGTRALLQTLGNLGYRASAKKAQICQKQVKYLGYLLKEGQRWLTEARKETVMGQPTPKTPRQLREFLGKAGFCRLFIPGFAEMAAPLYPLTKPGTLFNWGPDQQKAYQEIKQALLTAPALGLPDLTKPFELFVDEKQGYAKGVLTQKLGPWRRPVAYLSKKLDPVAAGWPPCLRMVAAIAVLTKDAGKLTMGQPLVILAPHAVEALVKQPPDRWLSNARMTHYQAMLLDTDRVQFGPVVALNPATLLPLPEKEAPHDCLEILAETHGTRPDLTDQPIPDADYTWYTDGSSFLQEGQRRAGAAVTTETEVIWARALPAGTSAQRAELIALTQALKMAEGKKLNVYTDSRYAFATAHVHGEIYRRRGWLTSEGREIKNKNEILALLKALFLPKRLSIIHCPGHQKGNSAEARGNRMADQAAREAAMKAVLETSTLLAGKRTADGSEFEKRTADGSEFESPKKKAKVE

SEQ ID NO: 1022 - protein, 2094 aa, synthetic construct
MPAAKRVKLDGGDKKYSIGLDIGTNSVGWAVITDEYKVPSKKFKVLGNTDRHSIKKNLIGALLFDSGETAEATRLKRTARRRYTRRKNRICYLQEIFSNEMAKVDDSFFHRLEESFLVEEDKKHERHPIFGNIVDEVAYHEKYPTIYHLRKKLVDSTDKADLRLIYLALAHMIKFRGHFLIEGDLNPDNSDVDKLFIQLVQTYNQLFEENPINASGVDAKAILSARLSKSRRLENLIAQLPGEKKNGLFGNLIALSLGLTPNFKSNFDLAEDAKLQLSKDTYDDDLDNLLAQIGDQYADLFLAAKNLSDAILLSDILRVNTEITKAPLSASMIKRYDEHHQDLTLLKALVRQQLPEKYKEIFFDQSKNGYAGYIDGGASQEEFYKFIKPILEKMDGTEELLVKLNREDLLRKQRTFDNGSIPHQIHLGELHAILRRQEDFYPFLKDNREKIEKILTFRIPYYVGPLARGNSRFAWMTRKSEETITPWNFEEVVDKGASAQSFIERMTNFDKNLPNEKVLPKHSLLYEYFTVYNELTKVKYVTEGMRKPAFLSGEQKKAIVDLLFKTNRKVTVKQLKEDYFKKIECFDSVEISGVEDRFNASLGTYHDLLKIIKDKDFLDNEENEDILEDIVLTLTLFEDREMIEERLKTYAHLFDDKVMKQLKRRRYTGWGRLSRKLINGIRDKQSGKTILDFLKSDGFANRNFMQLIHDDSLTFKEDIQKAQVSGQGDSLHEHIANLAGSPAIKKGILQTVKVVDELVKVMGRHKPENIVIEMARENQTTQKGQKNSRERMKRIEEGIKELGSQILKEHPVENTQLQNEKLYLYYLQNGRDMYVDQELDINRLSDYDVDHIVPQSFLKDDSIDNKVLTRSDKARGKSDNVPSEEVVKKMKNYWRQLLNAKLITQRKFDNLTKAERGGLSELDKAGFIKRQLVETRQITKHVAQILDSRMNTKYDENDKLIREVKVITLKSKLVSDFRKDFQFYKVREINNYHHAHDAYLNAVVGTALIKKYPKLESEFVYGDYKVYDVRKMIAKSEQEIGKATAKYFFYSNIMNFFKTEITLANGEIRKRPLIETNGETGEIVWDKGRDFATVRKVLSMPQVNIVKKTEVQTGGFSKESILPKRNSDKLIARKKDWDPKKYGGFDSPTVAYSVLVVAKVEKGKSKKLKSVKELLGITIMERSSFEKNPIDFLEAKGYKEVKKDLIIKLPKYSLFELENGRKRMLASAGELQKGNELALPSKYVNFLYLASHYEKLKGSPEDNEQKQLFVEQHKHYLDEIIEQISEFSKRVILADANLDKVLSAYNKHRDKPIREQAENIIHLFTLTNLGAPAAFKYFDTTIDRKRYTSTKEVLDATLIHQSITGLYETRIDLSQLGGDGGGGSGSSGGGGGTLNIEDEYRLHETSKEPDVPLGSTWLSDFPQAWAETGGMGLAVRQAPLIIPLKATSTPVSIKQYPMSQEARLGIKPHIQRLLDQGILVPCQSPWNTPLLPVKKPGTNDYRPVQDLREVNKRVEDIHPTVPNPYNLLSGLPPSHQWYTVLDLKDAFFCLRLHPTSQPLFAFEWRDPEMGISGQLTWTRLPQGFKNSPTLFNEALHRDLADFRIQHPDLILLQYVDDLLLAATSEQDCQRGTRALLQTLGNLGYRASAKKAQICQKQVKYLGYLLKEGQRWLTEARKETVMGQPTPKTPRQLREFLGKAGFCRLFIPGFAEMAAPLYPLTKPGTLFNWGPDQQKAYQEIKQALLTAPALGLPDLTKPFELFVDEKQGYAKGVLTQKLGPWRRPVAYLSKKLDPVAAGWPPCLRMVAAIAVLTKDAGKLTMGQPLVILAPHAVEALVKQPPDRWLSNARMTHYQAMLLDTDRVQFGPVVALNPATLLPLPEKEAPHDCLEILAETHGTRPDLTDQPIPDADYTWYTDGSSFLQEGQRRAGAAVTTETEVIWARALPAGTSAQRAELIALTQALKMAEGKKLNVYTDSRYAFATAHVHGEIYRRRGWLTSEGREIKNKNEILALLKALFLPKRLSIIHCPGHQKGNSAEARGNRMADQAAREAAMKAVLETSTLLAGKRTADGSEFEKRTADGSEFESPKKKAKVE

SEQ ID NO: 1023 - protein, 2093 aa, synthetic construct
MPAAKRVKLDGGDKKYSIGLDIGTNSVGWAVITDEYKVPSKKFKVLGNTDRHSIKKNLIGALLFDSGETAEATRLKRTARRRYTRRKNRICYLQEIFSNEMAKVDDSFFHRLEESFLVEEDKKHERHPIFGNIVDEVAYHEKYPTIYHLRKKLVDSTDKADLRLIYLALAHMIKFRGHFLIEGDLNPDNSDVDKLFIQLVQTYNQLFEENPINASGVDAKAILSARLSKSRRLENLIAQLPGEKKNGLFGNLIALSLGLTPNFKSNFDLAEDAKLQLSKDTYDDDLDNLLAQIGDQYADLFLAAKNLSDAILLSDILRVNTEITKAPLSASMIKRYDEHHQDLTLLKALVRQQLPEKYKEIFFDQSKNGYAGYIDGGASQEEFYKFIKPILEKMDGTEELLVKLNREDLLRKQRTFDNGSIPHQIHLGELHAILRRQEDFYPFLKDNREKIEKILTFRIPYYVGPLARGNSRFAWMTRKSEETITPWNFEEVVDKGASAQSFIERMTNFDKNLPNEKVLPKHSLLYEYFTVYNELTKVKYVTEGMRKPAFLSGEQKKAIVDLLFKTNRKVTVKQLKEDYFKKIECFDSVEISGVEDRFNASLGTYHDLLKIIKDKDFLDNEENEDILEDIVLTLTLFEDREMIEERLKTYAHLFDDKVMKQLKRRRYTGWGRLSRKLINGIRDKQSGKTILDFLKSDGFANRNFMQLIHDDSLTFKEDIQKAQVSGQGDSLHEHIANLAGSPAIKKGILQTVKVVDELVKVMGRHKPENIVIEMARENQTTQKGQKNSRERMKRIEEGIKELGSQILKEHPVENTQLQNEKLYLYYLQNGRDMYVDQELDINRLSDYDVDHIVPQSFLKDDSIDNKVLTRSDKARGKSDNVPSEEVVKKMKNYWRQLLNAKLITQRKFDNLTKAERGGLSELDKAGFIKRQLVETRQITKHVAQILDSRMNTKYDENDKLIREVKVITLKSKLVSDFRKDFQFYKVREINNYHHAHDAYLNAVVGTALIKKYPKLESEFVYGDYKVYDVRKMIAKSEQEIGKATAKYFFYSNIMNFFKTEITLANGEIRKRPLIETNGETGEIVWDKGRDFATVRKVLSMPQVNIVKKTEVQTGGFSKESILPKRNSDKLIARKKDWDPKKYGGFDSPTVAYSVLVVAKVEKGKSKKLKSVKELLGITIMERSSFEKNPIDFLEAKGYKEVKKDLIIKLPKYSLFELENGRKRMLASAGELQKGNELALPSKYVNFLYLASHYEKLKGSPEDNEQKQLFVEQHKHYLDEIIEQISEFSKRVILADANLDKVLSAYNKHRDKPIREQAENIIHLFTLTNLGAPAAFKYFDTTIDRKRYTSTKEVLDATLIHQSITGLYETRIDLSQLGGDGGEAAAKGGSGGTLNIEDEYRLHETSKEPDVPLGSTWLSDFPQAWAETGGMGLAVRQAPLIIPLKATSTPVSIKQYPMSQEARLGIKPHIQRLLDQGILVPCQSPWNTPLLPVKKPGTNDYRPVQDLREVNKRVEDIHPTVPNPYNLLSGLPPSHQWYTVLDLKDAFFCLRLHPTSQPLFAFEWRDPEMGISGQLTWTRLPQGFKNSPTLFNEALHRDLADFRIQHPDLILLQYVDDLLLAATSEQDCQRGTRALLQTLGNLGYRASAKKAQICQKQVKYLGYLLKEGQRWLTEARKETVMGQPTPKTPRQLREFLGKAGFCRLFIPGFAEMAAPLYPLTKPGTLFNWGPDQQKAYQEIKQALLTAPALGLPDLTKPFELFVDEKQGYAKGVLTQKLGPWRRPVAYLSKKLDPVAAGWPPCLRMVAAIAVLTKDAGKLTMGQPLVILAPHAVEALVKQPPDRWLSNARMTHYQAMLLDTDRVQFGPVVALNPATLLPLPEKEAPHDCLEILAETHGTRPDLTDQPIPDADYTWYTDGSSFLQEGQRRAGAAVTTETEVIWARALPAGTSAQRAELIALTQALKMAEGKKLNVYTDSRYAFATAHVHGEIYRRRGWLTSEGREIKNKNEILALLKALFLPKRLSIIHCPGHQKGNSAEARGNRMADQAAREAAMKAVLETSTLLAGKRTADGSEFEKRTADGSEFESPKKKAKVE

SEQ ID NO: 1024 - protein, 2094 aa, synthetic construct
MPAAKRVKLDGGDKKYSIGLDIGTNSVGWAVITDEYKVPSKKFKVLGNTDRHSIKKNLIGALLFDSGETAEATRLKRTARRRYTRRKNRICYLQEIFSNEMAKVDDSFFHRLEESFLVEEDKKHERHPIFGNIVDEVAYHEKYPTIYHLRKKLVDSTDKADLRLIYLALAHMIKFRGHFLIEGDLNPDNSDVDKLFIQLVQTYNQLFEENPINASGVDAKAILSARLSKSRRLENLIAQLPGEKKNGLFGNLIALSLGLTPNFKSNFDLAEDAKLQLSKDTYDDDLDNLLAQIGDQYADLFLAAKNLSDAILLSDILRVNTEITKAPLSASMIKRYDEHHQDLTLLKALVRQQLPEKYKEIFFDQSKNGYAGYIDGGASQEEFYKFIKPILEKMDGTEELLVKLNREDLLRKQRTFDNGSIPHQIHLGELHAILRRQEDFYPFLKDNREKIEKILTFRIPYYVGPLARGNSRFAWMTRKSEETITPWNFEEVVDKGASAQSFIERMTNFDKNLPNEKVLPKHSLLYEYFTVYNELTKVKYVTEGMRKPAFLSGEQKKAIVDLLFKTNRKVTVKQLKEDYFKKIECFDSVEISGVEDRFNASLGTYHDLLKIIKDKDFLDNEENEDILEDIVLTLTLFEDREMIEERLKTYAHLFDDKVMKQLKRRRYTGWGRLSRKLINGIRDKQSGKTILDFLKSDGFANRNFMQLIHDDSLTFKEDIQKAQVSGQGDSLHEHIANLAGSPAIKKGILQTVKVVDELVKVMGRHKPENIVIEMARENQTTQKGQKNSRERMKRIEEGIKELGSQILKEHPVENTQLQNEKLYLYYLQNGRDMYVDQELDINRLSDYDVDHIVPQSFLKDDSIDNKVLTRSDKARGKSDNVPSEEVVKKMKNYWRQLLNAKLITQRKFDNLTKAERGGLSELDKAGFIKRQLVETRQITKHVAQILDSRMNTKYDENDKLIREVKVITLKSKLVSDFRKDFQFYKVREINNYHHAHDAYLNAVVGTALIKKYPKLESEFVYGDYKVYDVRKMIAKSEQEIGKATAKYFFYSNIMNFFKTEITLANGEIRKRPLIETNGETGEIVWDKGRDFATVRKVLSMPQVNIVKKTEVQTGGFSKESILPKRNSDKLIARKKDWDPKKYGGFDSPTVAYSVLVVAKVEKGKSKKLKSVKELLGITIMERSSFEKNPIDFLEAKGYKEVKKDLIIKLPKYSLFELENGRKRMLASAGELQKGNELALPSKYVNFLYLASHYEKLKGSPEDNEQKQLFVEQHKHYLDEIIEQISEFSKRVILADANLDKVLSAYNKHRDKPIREQAENIIHLFTLTNLGAPAAFKYFDTTIDRKRYTSTKEVLDATLIHQSITGLYETRIDLSQLGGDGGGGGGGSGSSGGTLNIEDEYRLHETSKEPDVPLGSTWLSDFPQAWAETGGMGLAVRQAPLIIPLKATSTPVSIKQYPMSQEARLGIKPHIQRLLDQGILVPCQSPWNTPLLPVKKPGTNDYRPVQDLREVNKRVEDIHPTVPNPYNLLSGLPPSHQWYTVLDLKDAFFCLRLHPTSQPLFAFEWRDPEMGISGQLTWTRLPQGFKNSPTLFNEALHRDLADFRIQHPDLILLQYVDDLLLAATSEQDCQRGTRALLQTLGNLGYRASAKKAQICQKQVKYLGYLLKEGQRWLTEARKETVMGQPTPKTPRQLREFLGKAGFCRLFIPGFAEMAAPLYPLTKPGTLFNWGPDQQKAYQEIKQALLTAPALGLPDLTKPFELFVDEKQGYAKGVLTQKLGPWRRPVAYLSKKLDPVAAGWPPCLRMVAAIAVLTKDAGKLTMGQPLVILAPHAVEALVKQPPDRWLSNARMTHYQAMLLDTDRVQFGPVVALNPATLLPLPEKEAPHDCLEILAETHGTRPDLTDQPIPDADYTWYTDGSSFLQEGQRRAGAAVTTETEVIWARALPAGTSAQRAELIALTQALKMAEGKKLNVYTDSRYAFATAHVHGEIYRRRGWLTSEGREIKNKNEILALLKALFLPKRLSIIHCPGHQKGNSAEARGNRMADQAAREAAMKAVLETSTLLAGKRTADGSEFEKRTADGSEFESPKKKAKVE

SEQ ID NO: 1025 - protein, 2094 aa, synthetic construct
MPAAKRVKLDGGDKKYSIGLDIGTNSVGWAVITDEYKVPSKKFKVLGNTDRHSIKKNLIGALLFDSGETAEATRLKRTARRRYTRRKNRICYLQEIFSNEMAKVDDSFFHRLEESFLVEEDKKHERHPIFGNIVDEVAYHEKYPTIYHLRKKLVDSTDKADLRLIYLALAHMIKFRGHFLIEGDLNPDNSDVDKLFIQLVQTYNQLFEENPINASGVDAKAILSARLSKSRRLENLIAQLPGEKKNGLFGNLIALSLGLTPNFKSNFDLAEDAKLQLSKDTYDDDLDNLLAQIGDQYADLFLAAKNLSDAILLSDILRVNTEITKAPLSASMIKRYDEHHQDLTLLKALVRQQLPEKYKEIFFDQSKNGYAGYIDGGASQEEFYKFIKPILEKMDGTEELLVKLNREDLLRKQRTFDNGSIPHQIHLGELHAILRRQEDFYPFLKDNREKIEKILTFRIPYYVGPLARGNSRFAWMTRKSEETITPWNFEEVVDKGASAQSFIERMTNFDKNLPNEKVLPKHSLLYEYFTVYNELTKVKYVTEGMRKPAFLSGEQKKAIVDLLFKTNRKVTVKQLKEDYFKKIECFDSVEISGVEDRFNASLGTYHDLLKIIKDKDFLDNEENEDILEDIVLTLTLFEDREMIEERLKTYAHLFDDKVMKQLKRRRYTGWGRLSRKLINGIRDKQSGKTILDFLKSDGFANRNFMQLIHDDSLTFKEDIQKAQVSGQGDSLHEHIANLAGSPAIKKGILQTVKVVDELVKVMGRHKPENIVIEMARENQTTQKGQKNSRERMKRIEEGIKELGSQILKEHPVENTQLQNEKLYLYYLQNGRDMYVDQELDINRLSDYDVDHIVPQSFLKDDSIDNKVLTRSDKARGKSDNVPSEEVVKKMKNYWRQLLNAKLITQRKFDNLTKAERGGLSELDKAGFIKRQLVETRQITKHVAQILDSRMNTKYDENDKLIREVKVITLKSKLVSDFRKDFQFYKVREINNYHHAHDAYLNAVVGTALIKKYPKLESEFVYGDYKVYDVRKMIAKSEQEIGKATAKYFFYSNIMNFFKTEITLANGEIRKRPLIETNGETGEIVWDKGRDFATVRKVLSMPQVNIVKKTEVQTGGFSKESILPKRNSDKLIARKKDWDPKKYGGFDSPTVAYSVLVVAKVEKGKSKKLKSVKELLGITIMERSSFEKNPIDFLEAKGYKEVKKDLIIKLPKYSLFELENGRKRMLASAGELQKGNELALPSKYVNFLYLASHYEKLKGSPEDNEQKQLFVEQHKHYLDEIIEQISEFSKRVILADANLDKVLSAYNKHRDKPIREQAENIIHLFTLTNLGAPAAFKYFDTTIDRKRYTSTKEVLDATLIHQSITGLYETRIDLSQLGGDGGGGGPAPGGSGGTLNIEDEYRLHETSKEPDVPLGSTWLSDFPQAWAETGGMGLAVRQAPLIIPLKATSTPVSIKQYPMSQEARLGIKPHIQRLLDQGILVPCQSPWNTPLLPVKKPGTNDYRPVQDLREVNKRVEDIHPTVPNPYNLLSGLPPSHQWYTVLDLKDAFFCLRLHPTSQPLFAFEWRDPEMGISGQLTWTRLPQGFKNSPTLFNEALHRDLADFRIQHPDLILLQYVDDLLLAATSEQDCQRGTRALLQTLGNLGYRASAKKAQICQKQVKYLGYLLKEGQRWLTEARKETVMGQPTPKTPRQLREFLGKAGFCRLFIPGFAEMAAPLYPLTKPGTLFNWGPDQQKAYQEIKQALLTAPALGLPDLTKPFELFVDEKQGYAKGVLTQKLGPWRRPVAYLSKKLDPVAAGWPPCLRMVAAIAVLTKDAGKLTMGQPLVILAPHAVEALVKQPPDRWLSNARMTHYQAMLLDTDRVQFGPVVALNPATLLPLPEKEAPHDCLEILAETHGTRPDLTDQPIPDADYTWYTDGSSFLQEGQRRAGAAVTTETEVIWARALPAGTSAQRAELIALTQALKMAEGKKLNVYTDSRYAFATAHVHGEIYRRRGWLTSEGREIKNKNEILALLKALFLPKRLSIIHCPGHQKGNSAEARGNRMADQAAREAAMKAVLETSTLLAGKRTADGSEFEKRTADGSEFESPKKKAKVE

SEQ ID NO: 1026 - protein, 2110 aa, synthetic construct
MPAAKRVKLDGGDKKYSIGLDIGTNSVGWAVITDEYKVPSKKFKVLGNTDRHSIKKNLIGALLFDSGETAEATRLKRTARRRYTRRKNRICYLQEIFSNEMAKVDDSFFHRLEESFLVEEDKKHERHPIFGNIVDEVAYHEKYPTIYHLRKKLVDSTDKADLRLIYLALAHMIKFRGHFLIEGDLNPDNSDVDKLFIQLVQTYNQLFEENPINASGVDAKAILSARLSKSRRLENLIAQLPGEKKNGLFGNLIALSLGLTPNFKSNFDLAEDAKLQLSKDTYDDDLDNLLAQIGDQYADLFLAAKNLSDAILLSDILRVNTEITKAPLSASMIKRYDEHHQDLTLLKALVRQQLPEKYKEIFFDQSKNGYAGYIDGGASQEEFYKFIKPILEKMDGTEELLVKLNREDLLRKQRTFDNGSIPHQIHLGELHAILRRQEDFYPFLKDNREKIEKILTFRIPYYVGPLARGNSRFAWMTRKSEETITPWNFEEVVDKGASAQSFIERMTNFDKNLPNEKVLPKHSLLYEYFTVYNELTKVKYVTEGMRKPAFLSGEQKKAIVDLLFKTNRKVTVKQLKEDYFKKIECFDSVEISGVEDRFNASLGTYHDLLKIIKDKDFLDNEENEDILEDIVLTLTLFEDREMIEERLKTYAHLFDDKVMKQLKRRRYTGWGRLSRKLINGIRDKQSGKTILDFLKSDGFANRNFMQLIHDDSLTFKEDIQKAQVSGQGDSLHEHIANLAGSPAIKKGILQTVKVVDELVKVMGRHKPENIVIEMARENQTTQKGQKNSRERMKRIEEGIKELGSQILKEHPVENTQLQNEKLYLYYLQNGRDMYVDQELDINRLSDYDVDHIVPQSFLKDDSIDNKVLTRSDKARGKSDNVPSEEVVKKMKNYWRQLLNAKLITQRKFDNLTKAERGGLSELDKAGFIKRQLVETRQITKHVAQILDSRMNTKYDENDKLIREVKVITLKSKLVSDFRKDFQFYKVREINNYHHAHDAYLNAVVGTALIKKYPKLESEFVYGDYKVYDVRKMIAKSEQEIGKATAKYFFYSNIMNFFKTEITLANGEIRKRPLIETNGETGEIVWDKGRDFATVRKVLSMPQVNIVKKTEVQTGGFSKESILPKRNSDKLIARKKDWDPKKYGGFDSPTVAYSVLVVAKVEKGKSKKLKSVKELLGITIMERSSFEKNPIDFLEAKGYKEVKKDLIIKLPKYSLFELENGRKRMLASAGELQKGNELALPSKYVNFLYLASHYEKLKGSPEDNEQKQLFVEQHKHYLDEIIEQISEFSKRVILADANLDKVLSAYNKHRDKPIREQAENIIHLFTLTNLGAPAAFKYFDTTIDRKRYTSTKEVLDATLIHQSITGLYETRIDLSQLGGDGGGGGGSGGGGSGGGGSGGGGSGGGGSGGTLNIEDEYRLHETSKEPDVPLGSTWLSDFPQAWAETGGMGLAVRQAPLIIPLKATSTPVSIKQYPMSQEARLGIKPHIQRLLDQGILVPCQSPWNTPLLPVKKPGTNDYRPVQDLREVNKRVEDIHPTVPNPYNLLSGLPPSHQWYTVLDLKDAFFCLRLHPTSQPLFAFEWRDPEMGISGQLTWTRLPQGFKNSPTLFNEALHRDLADFRIQHPDLILLQYVDDLLLAATSEQDCQRGTRALLQTLGNLGYRASAKKAQICQKQVKYLGYLLKEGQRWLTEARKETVMGQPTPKTPRQLREFLGKAGFCRLFIPGFAEMAAPLYPLTKPGTLFNWGPDQQKAYQEIKQALLTAPALGLPDLTKPFELFVDEKQGYAKGVLTQKLGPWRRPVAYLSKKLDPVAAGWPPCLRMVAAIAVLTKDAGKLTMGQPLVILAPHAVEALVKQPPDRWLSNARMTHYQAMLLDTDRVQFGPVVALNPATLLPLPEKEAPHDCLEILAETHGTRPDLTDQPIPDADYTWYTDGSSFLQEGQRRAGAAVTTETEVIWARALPAGTSAQRAELIALTQALKMAEGKKLNVYTDSRYAFATAHVHGEIYRRRGWLTSEGREIKNKNEILALLKALFLPKRLSIIHCPGHQKGNSAEARGNRMADQAAREAAMKAVLETSTLLAGKRTADGSEFEKRTADGSEFESPKKKAKVE

SEQ ID NO: 1027 - protein, 2096 aa, synthetic construct
MPAAKRVKLDGGDKKYSIGLDIGTNSVGWAVITDEYKVPSKKFKVLGNTDRHSIKKNLIGALLFDSGETAEATRLKRTARRRYTRRKNRICYLQEIFSNEMAKVDDSFFHRLEESFLVEEDKKHERHPIFGNIVDEVAYHEKYPTIYHLRKKLVDSTDKADLRLIYLALAHMIKFRGHFLIEGDLNPDNSDVDKLFIQLVQTYNQLFEENPINASGVDAKAILSARLSKSRRLENLIAQLPGEKKNGLFGNLIALSLGLTPNFKSNFDLAEDAKLQLSKDTYDDDLDNLLAQIGDQYADLFLAAKNLSDAILLSDILRVNTEITKAPLSASMIKRYDEHHQDLTLLKALVRQQLPEKYKEIFFDQSKNGYAGYIDGGASQEEFYKFIKPILEKMDGTEELLVKLNREDLLRKQRTFDNGSIPHQIHLGELHAILRRQEDFYPFLKDNREKIEKILTFRIPYYVGPLARGNSRFAWMTRKSEETITPWNFEEVVDKGASAQSFIERMTNFDKNLPNEKVLPKHSLLYEYFTVYNELTKVKYVTEGMRKPAFLSGEQKKAIVDLLFKTNRKVTVKQLKEDYFKKIECFDSVEISGVEDRFNASLGTYHDLLKIIKDKDFLDNEENEDILEDIVLTLTLFEDREMIEERLKTYAHLFDDKVMKQLKRRRYTGWGRLSRKLINGIRDKQSGKTILDFLKSDGFANRNFMQLIHDDSLTFKEDIQKAQVSGQGDSLHEHIANLAGSPAIKKGILQTVKVVDELVKVMGRHKPENIVIEMARENQTTQKGQKNSRERMKRIEEGIKELGSQILKEHPVENTQLQNEKLYLYYLQNGRDMYVDQELDINRLSDYDVDHIVPQSFLKDDSIDNKVLTRSDKARGKSDNVPSEEVVKKMKNYWRQLLNAKLITQRKFDNLTKAERGGLSELDKAGFIKRQLVETRQITKHVAQILDSRMNTKYDENDKLIREVKVITLKSKLVSDFRKDFQFYKVREINNYHHAHDAYLNAVVGTALIKKYPKLESEFVYGDYKVYDVRKMIAKSEQEIGKATAKYFFYSNIMNFFKTEITLANGEIRKRPLIETNGETGEIVWDKGRDFATVRKVLSMPQVNIVKKTEVQTGGFSKESILPKRNSDKLIARKKDWDPKKYGGFDSPTVAYSVLVVAKVEKGKSKKLKSVKELLGITIMERSSFEKNPIDFLEAKGYKEVKKDLIIKLPKYSLFELENGRKRMLASAGELQKGNELALPSKYVNFLYLASHYEKLKGSPEDNEQKQLFVEQHKHYLDEIIEQISEFSKRVILADANLDKVLSAYNKHRDKPIREQAENIIHLFTLTNLGAPAAFKYFDTTIDRKRYTSTKEVLDATLIHQSITGLYETRIDLSQLGGDGGGSSEAAAKPAPGGTLNIEDEYRLHETSKEPDVPLGSTWLSDFPQAWAETGGMGLAVRQAPLIIPLKATSTPVSIKQYPMSQEARLGIKPHIQRLLDQGILVPCQSPWNTPLLPVKKPGTNDYRPVQDLREVNKRVEDIHPTVPNPYNLLSGLPPSHQWYTVLDLKDAFFCLRLHPTSQPLFAFEWRDPEMGISGQLTWTRLPQGFKNSPTLFNEALHRDLADFRIQHPDLILLQYVDDLLLAATSEQDCQRGTRALLQTLGNLGYRASAKKAQICQKQVKYLGYLLKEGQRWLTEARKETVMGQPTPKTPRQLREFLGKAGFCRLFIPGFAEMAAPLYPLTKPGTLFNWGPDQQKAYQEIKQALLTAPALGLPDLTKPFELFVDEKQGYAKGVLTQKLGPWRRPVAYLSKKLDPVAAGWPPCLRMVAAIAVLTKDAGKLTMGQPLVILAPHAVEALVKQPPDRWLSNARMTHYQAMLLDTDRVQFGPVVALNPATLLPLPEKEAPHDCLEILAETHGTRPDLTDQPIPDADYTWYTDGSSFLQEGQRRAGAAVTTETEVIWARALPAGTSAQRAELIALTQALKMAEGKKLNVYTDSRYAFATAHVHGEIYRRRGWLTSEGREIKNKNEILALLKALFLPKRLSIIHCPGHQKGNSAEARGNRMADQAAREAAMKAVLETSTLLAGKRTADGSEFEKRTADGSEFESPKKKAKVE

SEQ ID NO: 1028 - protein, 2101 aa, synthetic construct
MPAAKRVKLDGGDKKYSIGLDIGTNSVGWAVITDEYKVPSKKFKVLGNTDRHSIKKNLIGALLFDSGETAEATRLKRTARRRYTRRKNRICYLQEIFSNEMAKVDDSFFHRLEESFLVEEDKKHERHPIFGNIVDEVAYHEKYPTIYHLRKKLVDSTDKADLRLIYLALAHMIKFRGHFLIEGDLNPDNSDVDKLFIQLVQTYNQLFEENPINASGVDAKAILSARLSKSRRLENLIAQLPGEKKNGLFGNLIALSLGLTPNFKSNFDLAEDAKLQLSKDTYDDDLDNLLAQIGDQYADLFLAAKNLSDAILLSDILRVNTEITKAPLSASMIKRYDEHHQDLTLLKALVRQQLPEKYKEIFFDQSKNGYAGYIDGGASQEEFYKFIKPILEKMDGTEELLVKLNREDLLRKQRTFDNGSIPHQIHLGELHAILRRQEDFYPFLKDNREKIEKILTFRIPYYVGPLARGNSRFAWMTRKSEETITPWNFEEVVDKGASAQSFIERMTNFDKNLPNEKVLPKHSLLYEYFTVYNELTKVKYVTEGMRKPAFLSGEQKKAIVDLLFKTNRKVTVKQLKEDYFKKIECFDSVEISGVEDRFNASLGTYHDLLKIIKDKDFLDNEENEDILEDIVLTLTLFEDREMIEERLKTYAHLFDDKVMKQLKRRRYTGWGRLSRKLINGIRDKQSGKTILDFLKSDGFANRNFMQLIHDDSLTFKEDIQKAQVSGQGDSLHEHIANLAGSPAIKKGILQTVKVVDELVKVMGRHKPENIVIEMARENQTTQKGQKNSRERMKRIEEGIKELGSQILKEHPVENTQLQNEKLYLYYLQNGRDMYVDQELDINRLSDYDVDHIVPQSFLKDDSIDNKVLTRSDKARGKSDNVPSEEVVKKMKNYWRQLLNAKLITQRKFDNLTKAERGGLSELDKAGFIKRQLVETRQITKHVAQILDSRMNTKYDENDKLIREVKVITLKSKLVSDFRKDFQFYKVREINNYHHAHDAYLNAVVGTALIKKYPKLESEFVYGDYKVYDVRKMIAKSEQEIGKATAKYFFYSNIMNFFKTEITLANGEIRKRPLIETNGETGEIVWDKGRDFATVRKVLSMPQVNIVKKTEVQTGGFSKESILPKRNSDKLIARKKDWDPKKYGGFDSPTVAYSVLVVAKVEKGKSKKLKSVKELLGITIMERSSFEKNPIDFLEAKGYKEVKKDLIIKLPKYSLFELENGRKRMLASAGELQKGNELALPSKYVNFLYLASHYEKLKGSPEDNEQKQLFVEQHKHYLDEIIEQISEFSKRVILADANLDKVLSAYNKHRDKPIREQAENIIHLFTLTNLGAPAAFKYFDTTIDRKRYTSTKEVLDATLIHQSITGLYETRIDLSQLGGDGGSGSETPGTSESATPESGGTLNIEDEYRLHETSKEPDVPLGSTWLSDFPQAWAETGGMGLAVRQAPLIIPLKATSTPVSIKQYPMSQEARLGIKPHIQRLLDQGILVPCQSPWNTPLLPVKKPGTNDYRPVQDLREVNKRVEDIHPTVPNPYNLLSGLPPSHQWYTVLDLKDAFFCLRLHPTSQPLFAFEWRDPEMGISGQLTWTRLPQGFKNSPTLFNEALHRDLADFRIQHPDLILLQYVDDLLLAATSEQDCQRGTRALLQTLGNLGYRASAKKAQICQKQVKYLGYLLKEGQRWLTEARKETVMGQPTPKTPRQLREFLGKAGFCRLFIPGFAEMAAPLYPLTKPGTLFNWGPDQQKAYQEIKQALLTAPALGLPDLTKPFELFVDEKQGYAKGVLTQKLGPWRRPVAYLSKKLDPVAAGWPPCLRMVAAIAVLTKDAGKLTMGQPLVILAPHAVEALVKQPPDRWLSNARMTHYQAMLLDTDRVQFGPVVALNPATLLPLPEKEAPHDCLEILAETHGTRPDLTDQPIPDADYTWYTDGSSFLQEGQRRAGAAVTTETEVIWARALPAGTSAQRAELIALTQALKMAEGKKLNVYTDSRYAFATAHVHGEIYRRRGWLTSEGREIKNKNEILALLKALFLPKRLSIIHCPGHQKGNSAEARGNRMADQAAREAAMKAVLETSTLLAGKRTADGSEFEKRTADGSEFESPKKKAKVE

SEQ ID NO: 1029 - protein, 2110 aa, synthetic construct
MPAAKRVKLDGGDKKYSIGLDIGTNSVGWAVITDEYKVPSKKFKVLGNTDRHSIKKNLIGALLFDSGETAEATRLKRTARRRYTRRKNRICYLQEIFSNEMAKVDDSFFHRLEESFLVEEDKKHERHPIFGNIVDEVAYHEKYPTIYHLRKKLVDSTDKADLRLIYLALAHMIKFRGHFLIEGDLNPDNSDVDKLFIQLVQTYNQLFEENPINASGVDAKAILSARLSKSRRLENLIAQLPGEKKNGLFGNLIALSLGLTPNFKSNFDLAEDAKLQLSKDTYDDDLDNLLAQIGDQYADLFLAAKNLSDAILLSDILRVNTEITKAPLSASMIKRYDEHHQDLTLLKALVRQQLPEKYKEIFFDQSKNGYAGYIDGGASQEEFYKFIKPILEKMDGTEELLVKLNREDLLRKQRTFDNGSIPHQIHLGELHAILRRQEDFYPFLKDNREKIEKILTFRIPYYVGPLARGNSRFAWMTRKSEETITPWNFEEVVDKGASAQSFIERMTNFDKNLPNEKVLPKHSLLYEYFTVYNELTKVKYVTEGMRKPAFLSGEQKKAIVDLLFKTNRKVTVKQLKEDYFKKIECFDSVEISGVEDRFNASLGTYHDLLKIIKDKDFLDNEENEDILEDIVLTLTLFEDREMIEERLKTYAHLFDDKVMKQLKRRRYTGWGRLSRKLINGIRDKQSGKTILDFLKSDGFANRNFMQLIHDDSLTFKEDIQKAQVSGQGDSLHEHIANLAGSPAIKKGILQTVKVVDELVKVMGRHKPENIVIEMARENQTTQKGQKNSRERMKRIEEGIKELGSQILKEHPVENTQLQNEKLYLYYLQNGRDMYVDQELDINRLSDYDVDHIVPQSFLKDDSIDNKVLTRSDKARGKSDNVPSEEVVKKMKNYWRQLLNAKLITQRKFDNLTKAERGGLSELDKAGFIKRQLVETRQITKHVAQILDSRMNTKYDENDKLIREVKVITLKSKLVSDFRKDFQFYKVREINNYHHAHDAYLNAVVGTALIKKYPKLESEFVYGDYKVYDVRKMIAKSEQEIGKATAKYFFYSNIMNFFKTEITLANGEIRKRPLIETNGETGEIVWDKGRDFATVRKVLSMPQVNIVKKTEVQTGGFSKESILPKRNSDKLIARKKDWDPKKYGGFDSPTVAYSVLVVAKVEKGKSKKLKSVKELLGITIMERSSFEKNPIDFLEAKGYKEVKKDLIIKLPKYSLFELENGRKRMLASAGELQKGNELALPSKYVNFLYLASHYEKLKGSPEDNEQKQLFVEQHKHYLDEIIEQISEFSKRVILADANLDKVLSAYNKHRDKPIREQAENIIHLFTLTNLGAPAAFKYFDTTIDRKRYTSTKEVLDATLIHQSITGLYETRIDLSQLGGDGGEAAAKEAAAKEAAAKEAAAKEAAAKGGTLNIEDEYRLHETSKEPDVPLGSTWLSDFPQAWAETGGMGLAVRQAPLIIPLKATSTPVSIKQYPMSQEARLGIKPHIQRLLDQGILVPCQSPWNTPLLPVKKPGTNDYRPVQDLREVNKRVEDIHPTVPNPYNLLSGLPPSHQWYTVLDLKDAFFCLRLHPTSQPLFAFEWRDPEMGISGQLTWTRLPQGFKNSPTLFNEALHRDLADFRIQHPDLILLQYVDDLLLAATSEQDCQRGTRALLQTLGNLGYRASAKKAQICQKQVKYLGYLLKEGQRWLTEARKETVMGQPTPKTPRQLREFLGKAGFCRLFIPGFAEMAAPLYPLTKPGTLFNWGPDQQKAYQEIKQALLTAPALGLPDLTKPFELFVDEKQGYAKGVLTQKLGPWRRPVAYLSKKLDPVAAGWPPCLRMVAAIAVLTKDAGKLTMGQPLVILAPHAVEALVKQPPDRWLSNARMTHYQAMLLDTDRVQFGPVVALNPATLLPLPEKEAPHDCLEILAETHGTRPDLTDQPIPDADYTWYTDGSSFLQEGQRRAGAAVTTETEVIWARALPAGTSAQRAELIALTQALKMAEGKKLNVYTDSRYAFATAHVHGEIYRRRGWLTSEGREIKNKNEILALLKALFLPKRLSIIHCPGHQKGNSAEARGNRMADQAAREAAMKAVLETSTLLAGKRTADGSEFEKRTADGSEFESPKKKAKVE

SEQ ID NO: 1030 - protein, 2091 aa, synthetic construct
MPAAKRVKLDGGDKKYSIGLDIGTNSVGWAVITDEYKVPSKKFKVLGNTDRHSIKKNLIGALLFDSGETAEATRLKRTARRRYTRRKNRICYLQEIFSNEMAKVDDSFFHRLEESFLVEEDKKHERHPIFGNIVDEVAYHEKYPTIYHLRKKLVDSTDKADLRLIYLALAHMIKFRGHFLIEGDLNPDNSDVDKLFIQLVQTYNQLFEENPINASGVDAKAILSARLSKSRRLENLIAQLPGEKKNGLFGNLIALSLGLTPNFKSNFDLAEDAKLQLSKDTYDDDLDNLLAQIGDQYADLFLAAKNLSDAILLSDILRVNTEITKAPLSASMIKRYDEHHQDLTLLKALVRQQLPEKYKEIFFDQSKNGYAGYIDGGASQEEFYKFIKPILEKMDGTEELLVKLNREDLLRKQRTFDNGSIPHQIHLGELHAILRRQEDFYPFLKDNREKIEKILTFRIPYYVGPLARGNSRFAWMTRKSEETITPWNFEEVVDKGASAQSFIERMTNFDKNLPNEKVLPKHSLLYEYFTVYNELTKVKYVTEGMRKPAFLSGEQKKAIVDLLFKTNRKVTVKQLKEDYFKKIECFDSVEISGVEDRFNASLGTYHDLLKIIKDKDFLDNEENEDILEDIVLTLTLFEDREMIEERLKTYAHLFDDKVMKQLKRRRYTGWGRLSRKLINGIRDKQSGKTILDFLKSDGFANRNFMQLIHDDSLTFKEDIQKAQVSGQGDSLHEHIANLAGSPAIKKGILQTVKVVDELVKVMGRHKPENIVIEMARENQTTQKGQKNSRERMKRIEEGIKELGSQILKEHPVENTQLQNEKLYLYYLQNGRDMYVDQELDINRLSDYDVDHIVPQSFLKDDSIDNKVLTRSDKARGKSDNVPSEEVVKKMKNYWRQLLNAKLITQRKFDNLTKAERGGLSELDKAGFIKRQLVETRQITKHVAQILDSRMNTKYDENDKLIREVKVITLKSKLVSDFRKDFQFYKVREINNYHHAHDAYLNAVVGTALIKKYPKLESEFVYGDYKVYDVRKMIAKSEQEIGKATAKYFFYSNIMNFFKTEITLANGEIRKRPLIETNGETGEIVWDKGRDFATVRKVLSMPQVNIVKKTEVQTGGFSKESILPKRNSDKLIARKKDWDPKKYGGFDSPTVAYSVLVVAKVEKGKSKKLKSVKELLGITIMERSSFEKNPIDFLEAKGYKEVKKDLIIKLPKYSLFELENGRKRMLASAGELQKGNELALPSKYVNFLYLASHYEKLKGSPEDNEQKQLFVEQHKHYLDEIIEQISEFSKRVILADANLDKVLSAYNKHRDKPIREQAENIIHLFTLTNLGAPAAFKYFDTTIDRKRYTSTKEVLDATLIHQSITGLYETRIDLSQLGGDGGPAPGGSGGTLNIEDEYRLHETSKEPDVPLGSTWLSDFPQAWAETGGMGLAVRQAPLIIPLKATSTPVSIKQYPMSQEARLGIKPHIQRLLDQGILVPCQSPWNTPLLPVKKPGTNDYRPVQDLREVNKRVEDIHPTVPNPYNLLSGLPPSHQWYTVLDLKDAFFCLRLHPTSQPLFAFEWRDPEMGISGQLTWTRLPQGFKNSPTLFNEALHRDLADFRIQHPDLILLQYVDDLLLAATSEQDCQRGTRALLQTLGNLGYRASAKKAQICQKQVKYLGYLLKEGQRWLTEARKETVMGQPTPKTPRQLREFLGKAGFCRLFIPGFAEMAAPLYPLTKPGTLFNWGPDQQKAYQEIKQALLTAPALGLPDLTKPFELFVDEKQGYAKGVLTQKLGPWRRPVAYLSKKLDPVAAGWPPCLRMVAAIAVLTKDAGKLTMGQPLVILAPHAVEALVKQPPDRWLSNARMTHYQAMLLDTDRVQFGPVVALNPATLLPLPEKEAPHDCLEILAETHGTRPDLTDQPIPDADYTWYTDGSSFLQEGQRRAGAAVTTETEVIWARALPAGTSAQRAELIALTQALKMAEGKKLNVYTDSRYAFATAHVHGEIYRRRGWLTSEGREIKNKNEILALLKALFLPKRLSIIHCPGHQKGNSAEARGNRMADQAAREAAMKAVLETSTLLAGKRTADGSEFEKRTADGSEFESPKKKAKVE

SEQ ID NO: 1031 - protein, 2091 aa, synthetic construct
MPAAKRVKLDGGDKKYSIGLDIGTNSVGWAVITDEYKVPSKKFKVLGNTDRHSIKKNLIGALLFDSGETAEATRLKRTARRRYTRRKNRICYLQEIFSNEMAKVDDSFFHRLEESFLVEEDKKHERHPIFGNIVDEVAYHEKYPTIYHLRKKLVDSTDKADLRLIYLALAHMIKFRGHFLIEGDLNPDNSDVDKLFIQLVQTYNQLFEENPINASGVDAKAILSARLSKSRRLENLIAQLPGEKKNGLFGNLIALSLGLTPNFKSNFDLAEDAKLQLSKDTYDDDLDNLLAQIGDQYADLFLAAKNLSDAILLSDILRVNTEITKAPLSASMIKRYDEHHQDLTLLKALVRQQLPEKYKEIFFDQSKNGYAGYIDGGASQEEFYKFIKPILEKMDGTEELLVKLNREDLLRKQRTFDNGSIPHQIHLGELHAILRRQEDFYPFLKDNREKIEKILTFRIPYYVGPLARGNSRFAWMTRKSEETITPWNFEEVVDKGASAQSFIERMTNFDKNLPNEKVLPKHSLLYEYFTVYNELTKVKYVTEGMRKPAFLSGEQKKAIVDLLFKTNRKVTVKQLKEDYFKKIECFDSVEISGVEDRFNASLGTYHDLLKIIKDKDFLDNEENEDILEDIVLTLTLFEDREMIEERLKTYAHLFDDKVMKQLKRRRYTGWGRLSRKLINGIRDKQSGKTILDFLKSDGFANRNFMQLIHDDSLTFKEDIQKAQVSGQGDSLHEHIANLAGSPAIKKGILQTVKVVDELVKVMGRHKPENIVIEMARENQTTQKGQKNSRERMKRIEEGIKELGSQILKEHPVENTQLQNEKLYLYYLQNGRDMYVDQELDINRLSDYDVDHIVPQSFLKDDSIDNKVLTRSDKARGKSDNVPSEEVVKKMKNYWRQLLNAKLITQRKFDNLTKAERGGLSELDKAGFIKRQLVETRQITKHVAQILDSRMNTKYDENDKLIREVKVITLKSKLVSDFRKDFQFYKVREINNYHHAHDAYLNAVVGTALIKKYPKLESEFVYGDYKVYDVRKMIAKSEQEIGKATAKYFFYSNIMNFFKTEITLANGEIRKRPLIETNGETGEIVWDKGRDFATVRKVLSMPQVNIVKKTEVQTGGFSKESILPKRNSDKLIARKKDWDPKKYGGFDSPTVAYSVLVVAKVEKGKSKKLKSVKELLGITIMERSSFEKNPIDFLEAKGYKEVKKDLIIKLPKYSLFELENGRKRMLASAGELQKGNELALPSKYVNFLYLASHYEKLKGSPEDNEQKQLFVEQHKHYLDEIIEQISEFSKRVILADANLDKVLSAYNKHRDKPIREQAENIIHLFTLTNLGAPAAFKYFDTTIDRKRYTSTKEVLDATLIHQSITGLYETRIDLSQLGGDGGGGGGSSGGTLNIEDEYRLHETSKEPDVPLGSTWLSDFPQAWAETGGMGLAVRQAPLIIPLKATSTPVSIKQYPMSQEARLGIKPHIQRLLDQGILVPCQSPWNTPLLPVKKPGTNDYRPVQDLREVNKRVEDIHPTVPNPYNLLSGLPPSHQWYTVLDLKDAFFCLRLHPTSQPLFAFEWRDPEMGISGQLTWTRLPQGFKNSPTLFNEALHRDLADFRIQHPDLILLQYVDDLLLAATSEQDCQRGTRALLQTLGNLGYRASAKKAQICQKQVKYLGYLLKEGQRWLTEARKETVMGQPTPKTPRQLREFLGKAGFCRLFIPGFAEMAAPLYPLTKPGTLFNWGPDQQKAYQEIKQALLTAPALGLPDLTKPFELFVDEKQGYAKGVLTQKLGPWRRPVAYLSKKLDPVAAGWPPCLRMVAAIAVLTKDAGKLTMGQPLVILAPHAVEALVKQPPDRWLSNARMTHYQAMLLDTDRVQFGPVVALNPATLLPLPEKEAPHDCLEILAETHGTRPDLTDQPIPDADYTWYTDGSSFLQEGQRRAGAAVTTETEVIWARALPAGTSAQRAELIALTQALKMAEGKKLNVYTDSRYAFATAHVHGEIYRRRGWLTSEGREIKNKNEILALLKALFLPKRLSIIHCPGHQKGNSAEARGNRMADQAAREAAMKAVLETSTLLAGKRTADGSEFEKRTADGSEFESPKKKAKVE

SEQ ID NO: 1032 - protein, 2094 aa, synthetic construct
MPAAKRVKLDGGDKKYSIGLDIGTNSVGWAVITDEYKVPSKKFKVLGNTDRHSIKKNLIGALLFDSGETAEATRLKRTARRRYTRRKNRICYLQEIFSNEMAKVDDSFFHRLEESFLVEEDKKHERHPIFGNIVDEVAYHEKYPTIYHLRKKLVDSTDKADLRLIYLALAHMIKFRGHFLIEGDLNPDNSDVDKLFIQLVQTYNQLFEENPINASGVDAKAILSARLSKSRRLENLIAQLPGEKKNGLFGNLIALSLGLTPNFKSNFDLAEDAKLQLSKDTYDDDLDNLLAQIGDQYADLFLAAKNLSDAILLSDILRVNTEITKAPLSASMIKRYDEHHQDLTLLKALVRQQLPEKYKEIFFDQSKNGYAGYIDGGASQEEFYKFIKPILEKMDGTEELLVKLNREDLLRKQRTFDNGSIPHQIHLGELHAILRRQEDFYPFLKDNREKIEKILTFRIPYYVGPLARGNSRFAWMTRKSEETITPWNFEEVVDKGASAQSFIERMTNFDKNLPNEKVLPKHSLLYEYFTVYNELTKVKYVTEGMRKPAFLSGEQKKAIVDLLFKTNRKVTVKQLKEDYFKKIECFDSVEISGVEDRFNASLGTYHDLLKIIKDKDFLDNEENEDILEDIVLTLTLFEDREMIEERLKTYAHLFDDKVMKQLKRRRYTGWGRLSRKLINGIRDKQSGKTILDFLKSDGFANRNFMQLIHDDSLTFKEDIQKAQVSGQGDSLHEHIANLAGSPAIKKGILQTVKVVDELVKVMGRHKPENIVIEMARENQTTQKGQKNSRERMKRIEEGIKELGSQILKEHPVENTQLQNEKLYLYYLQNGRDMYVDQELDINRLSDYDVDHIVPQSFLKDDSIDNKVLTRSDKARGKSDNVPSEEVVKKMKNYWRQLLNAKLITQRKFDNLTKAERGGLSELDKAGFIKRQLVETRQITKHVAQILDSRMNTKYDENDKLIREVKVITLKSKLVSDFRKDFQFYKVREINNYHHAHDAYLNAVVGTALIKKYPKLESEFVYGDYKVYDVRKMIAKSEQEIGKATAKYFFYSNIMNFFKTEITLANGEIRKRPLIETNGETGEIVWDKGRDFATVRKVLSMPQVNIVKKTEVQTGGFSKESILPKRNSDKLIARKKDWDPKKYGGFDSPTVAYSVLVVAKVEKGKSKKLKSVKELLGITIMERSSFEKNPIDFLEAKGYKEVKKDLIIKLPKYSLFELENGRKRMLASAGELQKGNELALPSKYVNFLYLASHYEKLKGSPEDNEQKQLFVEQHKHYLDEIIEQISEFSKRVILADANLDKVLSAYNKHRDKPIREQAENIIHLFTLTNLGAPAAFKYFDTTIDRKRYTSTKEVLDATLIHQSITGLYETRIDLSQLGGDGGPAPAPAPAPGGTLNIEDEYRLHETSKEPDVPLGSTWLSDFPQAWAETGGMGLAVRQAPLIIPLKATSTPVSIKQYPMSQEARLGIKPHIQRLLDQGILVPCQSPWNTPLLPVKKPGTNDYRPVQDLREVNKRVEDIHPTVPNPYNLLSGLPPSHQWYTVLDLKDAFFCLRLHPTSQPLFAFEWRDPEMGISGQLTWTRLPQGFKNSPTLFNEALHRDLADFRIQHPDLILLQYVDDLLLAATSEQDCQRGTRALLQTLGNLGYRASAKKAQICQKQVKYLGYLLKEGQRWLTEARKETVMGQPTPKTPRQLREFLGKAGFCRLFIPGFAEMAAPLYPLTKPGTLFNWGPDQQKAYQEIKQALLTAPALGLPDLTKPFELFVDEKQGYAKGVLTQKLGPWRRPVAYLSKKLDPVAAGWPPCLRMVAAIAVLTKDAGKLTMGQPLVILAPHAVEALVKQPPDRWLSNARMTHYQAMLLDTDRVQFGPVVALNPATLLPLPEKEAPHDCLEILAETHGTRPDLTDQPIPDADYTWYTDGSSFLQEGQRRAGAAVTTETEVIWARALPAGTSAQRAELIALTQALKMAEGKKLNVYTDSRYAFATAHVHGEIYRRRGWLTSEGREIKNKNEILALLKALFLPKRLSIIHCPGHQKGNSAEARGNRMADQAAREAAMKAVLETSTLLAGKRTADGSEFEKRTADGSEFESPKKKAKVE

SEQ ID NO: 1033 - protein, 2094 aa, synthetic construct
MPAAKRVKLDGGDKKYSIGLDIGTNSVGWAVITDEYKVPSKKFKVLGNTDRHSIKKNLIGALLFDSGETAEATRLKRTARRRYTRRKNRICYLQEIFSNEMAKVDDSFFHRLEESFLVEEDKKHERHPIFGNIVDEVAYHEKYPTIYHLRKKLVDSTDKADLRLIYLALAHMIKFRGHFLIEGDLNPDNSDVDKLFIQLVQTYNQLFEENPINASGVDAKAILSARLSKSRRLENLIAQLPGEKKNGLFGNLIALSLGLTPNFKSNFDLAEDAKLQLSKDTYDDDLDNLLAQIGDQYADLFLAAKNLSDAILLSDILRVNTEITKAPLSASMIKRYDEHHQDLTLLKALVRQQLPEKYKEIFFDQSKNGYAGYIDGGASQEEFYKFIKPILEKMDGTEELLVKLNREDLLRKQRTFDNGSIPHQIHLGELHAILRRQEDFYPFLKDNREKIEKILTFRIPYYVGPLARGNSRFAWMTRKSEETITPWNFEEVVDKGASAQSFIERMTNFDKNLPNEKVLPKHSLLYEYFTVYNELTKVKYVTEGMRKPAFLSGEQKKAIVDLLFKTNRKVTVKQLKEDYFKKIECFDSVEISGVEDRFNASLGTYHDLLKIIKDKDFLDNEENEDILEDIVLTLTLFEDREMIEERLKTYAHLFDDKVMKQLKRRRYTGWGRLSRKLINGIRDKQSGKTILDFLKSDGFANRNFMQLIHDDSLTFKEDIQKAQVSGQGDSLHEHIANLAGSPAIKKGILQTVKVVDELVKVMGRHKPENIVIEMARENQTTQKGQKNSRERMKRIEEGIKELGSQILKEHPVENTQLQNEKLYLYYLQNGRDMYVDQELDINRLSDYDVDHIVPQSFLKDDSIDNKVLTRSDKARGKSDNVPSEEVVKKMKNYWRQLLNAKLITQRKFDNLTKAERGGLSELDKAGFIKRQLVETRQITKHVAQILDSRMNTKYDENDKLIREVKVITLKSKLVSDFRKDFQFYKVREINNYHHAHDAYLNAVVGTALIKKYPKLESEFVYGDYKVYDVRKMIAKSEQEIGKATAKYFFYSNIMNFFKTEITLANGEIRKRPLIETNGETGEIVWDKGRDFATVRKVLSMPQVNIVKKTEVQTGGFSKESILPKRNSDKLIARKKDWDPKKYGGFDSPTVAYSVLVVAKVEKGKSKKLKSVKELLGITIMERSSFEKNPIDFLEAKGYKEVKKDLIIKLPKYSLFELENGRKRMLASAGELQKGNELALPSKYVNFLYLASHYEKLKGSPEDNEQKQLFVEQHKHYLDEIIEQISEFSKRVILADANLDKVLSAYNKHRDKPIREQAENIIHLFTLTNLGAPAAFKYFDTTIDRKRYTSTKEVLDATLIHQSITGLYETRIDLSQLGGDGGPAPGSSGGGGGTLNIEDEYRLHETSKEPDVPLGSTWLSDFPQAWAETGGMGLAVRQAPLIIPLKATSTPVSIKQYPMSQEARLGIKPHIQRLLDQGILVPCQSPWNTPLLPVKKPGTNDYRPVQDLREVNKRVEDIHPTVPNPYNLLSGLPPSHQWYTVLDLKDAFFCLRLHPTSQPLFAFEWRDPEMGISGQLTWTRLPQGFKNSPTLFNEALHRDLADFRIQHPDLILLQYVDDLLLAATSEQDCQRGTRALLQTLGNLGYRASAKKAQICQKQVKYLGYLLKEGQRWLTEARKETVMGQPTPKTPRQLREFLGKAGFCRLFIPGFAEMAAPLYPLTKPGTLFNWGPDQQKAYQEIKQALLTAPALGLPDLTKPFELFVDEKQGYAKGVLTQKLGPWRRPVAYLSKKLDPVAAGWPPCLRMVAAIAVLTKDAGKLTMGQPLVILAPHAVEALVKQPPDRWLSNARMTHYQAMLLDTDRVQFGPVVALNPATLLPLPEKEAPHDCLEILAETHGTRPDLTDQPIPDADYTWYTDGSSFLQEGQRRAGAAVTTETEVIWARALPAGTSAQRAELIALTQALKMAEGKKLNVYTDSRYAFATAHVHGEIYRRRGWLTSEGREIKNKNEILALLKALFLPKRLSIIHCPGHQKGNSAEARGNRMADQAAREAAMKAVLETSTLLAGKRTADGSEFEKRTADGSEFESPKKKAKVE

SEQ ID NO: 1034 - protein, 2096 aa, synthetic construct
MPAAKRVKLDGGDKKYSIGLDIGTNSVGWAVITDEYKVPSKKFKVLGNTDRHSIKKNLIGALLFDSGETAEATRLKRTARRRYTRRKNRICYLQEIFSNEMAKVDDSFFHRLEESFLVEEDKKHERHPIFGNIVDEVAYHEKYPTIYHLRKKLVDSTDKADLRLIYLALAHMIKFRGHFLIEGDLNPDNSDVDKLFIQLVQTYNQLFEENPINASGVDAKAILSARLSKSRRLENLIAQLPGEKKNGLFGNLIALSLGLTPNFKSNFDLAEDAKLQLSKDTYDDDLDNLLAQIGDQYADLFLAAKNLSDAILLSDILRVNTEITKAPLSASMIKRYDEHHQDLTLLKALVRQQLPEKYKEIFFDQSKNGYAGYIDGGASQEEFYKFIKPILEKMDGTEELLVKLNREDLLRKQRTFDNGSIPHQIHLGELHAILRRQEDFYPFLKDNREKIEKILTFRIPYYVGPLARGNSRFAWMTRKSEETITPWNFEEVVDKGASAQSFIERMTNFDKNLPNEKVLPKHSLLYEYFTVYNELTKVKYVTEGMRKPAFLSGEQKKAIVDLLFKTNRKVTVKQLKEDYFKKIECFDSVEISGVEDRFNASLGTYHDLLKIIKDKDFLDNEENEDILEDIVLTLTLFEDREMIEERLKTYAHLFDDKVMKQLKRRRYTGWGRLSRKLINGIRDKQSGKTILDFLKSDGFANRNFMQLIHDDSLTFKEDIQKAQVSGQGDSLHEHIANLAGSPAIKKGILQTVKVVDELVKVMGRHKPENIVIEMARENQTTQKGQKNSRERMKRIEEGIKELGSQILKEHPVENTQLQNEKLYLYYLQNGRDMYVDQELDINRLSDYDVDHIVPQSFLKDDSIDNKVLTRSDKARGKSDNVPSEEVVKKMKNYWRQLLNAKLITQRKFDNLTKAERGGLSELDKAGFIKRQLVETRQITKHVAQILDSRMNTKYDENDKLIREVKVITLKSKLVSDFRKDFQFYKVREINNYHHAHDAYLNAVVGTALIKKYPKLESEFVYGDYKVYDVRKMIAKSEQEIGKATAKYFFYSNIMNFFKTEITLANGEIRKRPLIETNGETGEIVWDKGRDFATVRKVLSMPQVNIVKKTEVQTGGFSKESILPKRNSDKLIARKKDWDPKKYGGFDSPTVAYSVLVVAKVEKGKSKKLKSVKELLGITIMERSSFEKNPIDFLEAKGYKEVKKDLIIKLPKYSLFELENGRKRMLASAGELQKGNELALPSKYVNFLYLASHYEKLKGSPEDNEQKQLFVEQHKHYLDEIIEQISEFSKRVILADANLDKVLSAYNKHRDKPIREQAENIIHLFTLTNLGAPAAFKYFDTTIDRKRYTSTKEVLDATLIHQSITGLYETRIDLSQLGGDGGPAPGGSEAAAKGGTLNIEDEYRLHETSKEPDVPLGSTWLSDFPQAWAETGGMGLAVRQAPLIIPLKATSTPVSIKQYPMSQEARLGIKPHIQRLLDQGILVPCQSPWNTPLLPVKKPGTNDYRPVQDLREVNKRVEDIHPTVPNPYNLLSGLPPSHQWYTVLDLKDAFFCLRLHPTSQPLFAFEWRDPEMGISGQLTWTRLPQGFKNSPTLFNEALHRDLADFRIQHPDLILLQYVDDLLLAATSEQDCQRGTRALLQTLGNLGYRASAKKAQICQKQVKYLGYLLKEGQRWLTEARKETVMGQPTPKTPRQLREFLGKAGFCRLFIPGFAEMAAPLYPLTKPGTLFNWGPDQQKAYQEIKQALLTAPALGLPDLTKPFELFVDEKQGYAKGVLTQKLGPWRRPVAYLSKKLDPVAAGWPPCLRMVAAIAVLTKDAGKLTMGQPLVILAPHAVEALVKQPPDRWLSNARMTHYQAMLLDTDRVQFGPVVALNPATLLPLPEKEAPHDCLEILAETHGTRPDLTDQPIPDADYTWYTDGSSFLQEGQRRAGAAVTTETEVIWARALPAGTSAQRAELIALTQALKMAEGKKLNVYTDSRYAFATAHVHGEIYRRRGWLTSEGREIKNKNEILALLKALFLPKRLSIIHCPGHQKGNSAEARGNRMADQAAREAAMKAVLETSTLLAGKRTADGSEFEKRTADGSEFESPKKKAKVE

SEQ ID NO: 1035 - protein, 2096 aa, synthetic construct
MPAAKRVKLDGGDKKYSIGLDIGTNSVGWAVITDEYKVPSKKFKVLGNTDRHSIKKNLIGALLFDSGETAEATRLKRTARRRYTRRKNRICYLQEIFSNEMAKVDDSFFHRLEESFLVEEDKKHERHPIFGNIVDEVAYHEKYPTIYHLRKKLVDSTDKADLRLIYLALAHMIKFRGHFLIEGDLNPDNSDVDKLFIQLVQTYNQLFEENPINASGVDAKAILSARLSKSRRLENLIAQLPGEKKNGLFGNLIALSLGLTPNFKSNFDLAEDAKLQLSKDTYDDDLDNLLAQIGDQYADLFLAAKNLSDAILLSDILRVNTEITKAPLSASMIKRYDEHHQDLTLLKALVRQQLPEKYKEIFFDQSKNGYAGYIDGGASQEEFYKFIKPILEKMDGTEELLVKLNREDLLRKQRTFDNGSIPHQIHLGELHAILRRQEDFYPFLKDNREKIEKILTFRIPYYVGPLARGNSRFAWMTRKSEETITPWNFEEVVDKGASAQSFIERMTNFDKNLPNEKVLPKHSLLYEYFTVYNELTKVKYVTEGMRKPAFLSGEQKKAIVDLLFKTNRKVTVKQLKEDYFKKIECFDSVEISGVEDRFNASLGTYHDLLKIIKDKDFLDNEENEDILEDIVLTLTLFEDREMIEERLKTYAHLFDDKVMKQLKRRRYTGWGRLSRKLINGIRDKQSGKTILDFLKSDGFANRNFMQLIHDDSLTFKEDIQKAQVSGQGDSLHEHIANLAGSPAIKKGILQTVKVVDELVKVMGRHKPENIVIEMARENQTTQKGQKNSRERMKRIEEGIKELGSQILKEHPVENTQLQNEKLYLYYLQNGRDMYVDQELDINRLSDYDVDHIVPQSFLKDDSIDNKVLTRSDKARGKSDNVPSEEVVKKMKNYWRQLLNAKLITQRKFDNLTKAERGGLSELDKAGFIKRQLVETRQITKHVAQILDSRMNTKYDENDKLIREVKVITLKSKLVSDFRKDFQFYKVREINNYHHAHDAYLNAVVGTALIKKYPKLESEFVYGDYKVYDVRKMIAKSEQEIGKATAKYFFYSNIMNFFKTEITLANGEIRKRPLIETNGETGEIVWDKGRDFATVRKVLSMPQVNIVKKTEVQTGGFSKESILPKRNSDKLIARKKDWDPKKYGGFDSPTVAYSVLVVAKVEKGKSKKLKSVKELLGITIMERSSFEKNPIDFLEAKGYKEVKKDLIIKLPKYSLFELENGRKRMLASAGELQKGNELALPSKYVNFLYLASHYEKLKGSPEDNEQKQLFVEQHKHYLDEIIEQISEFSKRVILADANLDKVLSAYNKHRDKPIREQAENIIHLFTLTNLGAPAAFKYFDTTIDRKRYTSTKEVLDATLIHQSITGLYETRIDLSQLGGDGGGGSEAAAKPAPGGTLNIEDEYRLHETSKEPDVPLGSTWLSDFPQAWAETGGMGLAVRQAPLIIPLKATSTPVSIKQYPMSQEARLGIKPHIQRLLDQGILVPCQSPWNTPLLPVKKPGTNDYRPVQDLREVNKRVEDIHPTVPNPYNLLSGLPPSHQWYTVLDLKDAFFCLRLHPTSQPLFAFEWRDPEMGISGQLTWTRLPQGFKNSPTLFNEALHRDLADFRIQHPDLILLQYVDDLLLAATSEQDCQRGTRALLQTLGNLGYRASAKKAQICQKQVKYLGYLLKEGQRWLTEARKETVMGQPTPKTPRQLREFLGKAGFCRLFIPGFAEMAAPLYPLTKPGTLFNWGPDQQKAYQEIKQALLTAPALGLPDLTKPFELFVDEKQGYAKGVLTQKLGPWRRPVAYLSKKLDPVAAGWPPCLRMVAAIAVLTKDAGKLTMGQPLVILAPHAVEALVKQPPDRWLSNARMTHYQAMLLDTDRVQFGPVVALNPATLLPLPEKEAPHDCLEILAETHGTRPDLTDQPIPDADYTWYTDGSSFLQEGQRRAGAAVTTETEVIWARALPAGTSAQRAELIALTQALKMAEGKKLNVYTDSRYAFATAHVHGEIYRRRGWLTSEGREIKNKNEILALLKALFLPKRLSIIHCPGHQKGNSAEARGNRMADQAAREAAMKAVLETSTLLAGKRTADGSEFEKRTADGSEFESPKKKAKVE

SEQ ID NO: 1036 - protein, 2118 aa, synthetic construct
MPAAKRVKLDGGDKKYSIGLDIGTNSVGWAVITDEYKVPSKKFKVLGNTDRHSIKKNLIGALLFDSGETAEATRLKRTARRRYTRRKNRICYLQEIFSNEMAKVDDSFFHRLEESFLVEEDKKHERHPIFGNIVDEVAYHEKYPTIYHLRKKLVDSTDKADLRLIYLALAHMIKFRGHFLIEGDLNPDNSDVDKLFIQLVQTYNQLFEENPINASGVDAKAILSARLSKSRRLENLIAQLPGEKKNGLFGNLIALSLGLTPNFKSNFDLAEDAKLQLSKDTYDDDLDNLLAQIGDQYADLFLAAKNLSDAILLSDILRVNTEITKAPLSASMIKRYDEHHQDLTLLKALVRQQLPEKYKEIFFDQSKNGYAGYIDGGASQEEFYKFIKPILEKMDGTEELLVKLNREDLLRKQRTFDNGSIPHQIHLGELHAILRRQEDFYPFLKDNREKIEKILTFRIPYYVGPLARGNSRFAWMTRKSEETITPWNFEEVVDKGASAQSFIERMTNFDKNLPNEKVLPKHSLLYEYFTVYNELTKVKYVTEGMRKPAFLSGEQKKAIVDLLFKTNRKVTVKQLKEDYFKKIECFDSVEISGVEDRFNASLGTYHDLLKIIKDKDFLDNEENEDILEDIVLTLTLFEDREMIEERLKTYAHLFDDKVMKQLKRRRYTGWGRLSRKLINGIRDKQSGKTILDFLKSDGFANRNFMQLIHDDSLTFKEDIQKAQVSGQGDSLHEHIANLAGSPAIKKGILQTVKVVDELVKVMGRHKPENIVIEMARENQTTQKGQKNSRERMKRIEEGIKELGSQILKEHPVENTQLQNEKLYLYYLQNGRDMYVDQELDINRLSDYDVDHIVPQSFLKDDSIDNKVLTRSDKARGKSDNVPSEEVVKKMKNYWRQLLNAKLITQRKFDNLTKAERGGLSELDKAGFIKRQLVETRQITKHVAQILDSRMNTKYDENDKLIREVKVITLKSKLVSDFRKDFQFYKVREINNYHHAHDAYLNAVVGTALIKKYPKLESEFVYGDYKVYDVRKMIAKSEQEIGKATAKYFFYSNIMNFFKTEITLANGEIRKRPLIETNGETGEIVWDKGRDFATVRKVLSMPQVNIVKKTEVQTGGFSKESILPKRNSDKLIARKKDWDPKKYGGFDSPTVAYSVLVVAKVEKGKSKKLKSVKELLGITIMERSSFEKNPIDFLEAKGYKEVKKDLIIKLPKYSLFELENGRKRMLASAGELQKGNELALPSKYVNFLYLASHYEKLKGSPEDNEQKQLFVEQHKHYLDEIIEQISEFSKRVILADANLDKVLSAYNKHRDKPIREQAENIIHLFTLTNLGAPAAFKYFDTTIDRKRYTSTKEVLDATLIHQSITGLYETRIDLSQLGGDGGSGGSSGGSSGSETPGTSESATPESSGGSSGGSSGGTLNIEDEYRLHETSKEPDVPLGSTWLSDFPQAWAETGGMGLAVRQAPLIIPLKATSTPVSIKQYPMSQEARLGIKPHIQRLLDQGILVPCQSPWNTPLLPVKKPGTNDYRPVQDLREVNKRVEDIHPTVPNPYNLLSGLPPSHQWYTVLDLKDAFFCLRLHPTSQPLFAFEWRDPEMGISGQLTWTRLPQGFKNSPTLFNEALHRDLADFRIQHPDLILLQYVDDLLLAATSEQDCQRGTRALLQTLGNLGYRASAKKAQICQKQVKYLGYLLKEGQRWLTEARKETVMGQPTPKTPRQLREFLGKAGFCRLFIPGFAEMAAPLYPLTKPGTLFNWGPDQQKAYQEIKQALLTAPALGLPDLTKPFELFVDEKQGYAKGVLTQKLGPWRRPVAYLSKKLDPVAAGWPPCLRMVAAIAVLTKDAGKLTMGQPLVILAPHAVEALVKQPPDRWLSNARMTHYQAMLLDTDRVQFGPVVALNPATLLPLPEKEAPHDCLEILAETHGTRPDLTDQPIPDADYTWYTDGSSFLQEGQRRAGAAVTTETEVIWARALPAGTSAQRAELIALTQALKMAEGKKLNVYTDSRYAFATAHVHGEIYRRRGWLTSEGREIKNKNEILALLKALFLPKRLSIIHCPGHQKGNSAEARGNRMADQAAREAAMKAVLETSTLLAGKRTADGSEFEKRTADGSEFESPKKKAKVE

SEQ ID NO: 1037 - protein, 2100 aa, synthetic construct
MPAAKRVKLDGGDKKYSIGLDIGTNSVGWAVITDEYKVPSKKFKVLGNTDRHSIKKNLIGALLFDSGETAEATRLKRTARRRYTRRKNRICYLQEIFSNEMAKVDDSFFHRLEESFLVEEDKKHERHPIFGNIVDEVAYHEKYPTIYHLRKKLVDSTDKADLRLIYLALAHMIKFRGHFLIEGDLNPDNSDVDKLFIQLVQTYNQLFEENPINASGVDAKAILSARLSKSRRLENLIAQLPGEKKNGLFGNLIALSLGLTPNFKSNFDLAEDAKLQLSKDTYDDDLDNLLAQIGDQYADLFLAAKNLSDAILLSDILRVNTEITKAPLSASMIKRYDEHHQDLTLLKALVRQQLPEKYKEIFFDQSKNGYAGYIDGGASQEEFYKFIKPILEKMDGTEELLVKLNREDLLRKQRTFDNGSIPHQIHLGELHAILRRQEDFYPFLKDNREKIEKILTFRIPYYVGPLARGNSRFAWMTRKSEETITPWNFEEVVDKGASAQSFIERMTNFDKNLPNEKVLPKHSLLYEYFTVYNELTKVKYVTEGMRKPAFLSGEQKKAIVDLLFKTNRKVTVKQLKEDYFKKIECFDSVEISGVEDRFNASLGTYHDLLKIIKDKDFLDNEENEDILEDIVLTLTLFEDREMIEERLKTYAHLFDDKVMKQLKRRRYTGWGRLSRKLINGIRDKQSGKTILDFLKSDGFANRNFMQLIHDDSLTFKEDIQKAQVSGQGDSLHEHIANLAGSPAIKKGILQTVKVVDELVKVMGRHKPENIVIEMARENQTTQKGQKNSRERMKRIEEGIKELGSQILKEHPVENTQLQNEKLYLYYLQNGRDMYVDQELDINRLSDYDVDHIVPQSFLKDDSIDNKVLTRSDKARGKSDNVPSEEVVKKMKNYWRQLLNAKLITQRKFDNLTKAERGGLSELDKAGFIKRQLVETRQITKHVAQILDSRMNTKYDENDKLIREVKVITLKSKLVSDFRKDFQFYKVREINNYHHAHDAYLNAVVGTALIKKYPKLESEFVYGDYKVYDVRKMIAKSEQEIGKATAKYFFYSNIMNFFKTEITLANGEIRKRPLIETNGETGEIVWDKGRDFATVRKVLSMPQVNIVKKTEVQTGGFSKESILPKRNSDKLIARKKDWDPKKYGGFDSPTVAYSVLVVAKVEKGKSKKLKSVKELLGITIMERSSFEKNPIDFLEAKGYKEVKKDLIIKLPKYSLFELENGRKRMLASAGELQKGNELALPSKYVNFLYLASHYEKLKGSPEDNEQKQLFVEQHKHYLDEIIEQISEFSKRVILADANLDKVLSAYNKHRDKPIREQAENIIHLFTLTNLGAPAAFKYFDTTIDRKRYTSTKEVLDATLIHQSITGLYETRIDLSQLGGDGGEAAAKGGGGSEAAAKGGTLNIEDEYRLHETSKEPDVPLGSTWLSDFPQAWAETGGMGLAVRQAPLIIPLKATSTPVSIKQYPMSQEARLGIKPHIQRLLDQGILVPCQSPWNTPLLPVKKPGTNDYRPVQDLREVNKRVEDIHPTVPNPYNLLSGLPPSHQWYTVLDLKDAFFCLRLHPTSQPLFAFEWRDPEMGISGQLTWTRLPQGFKNSPTLFNEALHRDLADFRIQHPDLILLQYVDDLLLAATSEQDCQRGTRALLQTLGNLGYRASAKKAQICQKQVKYLGYLLKEGQRWLTEARKETVMGQPTPKTPRQLREFLGKAGFCRLFIPGFAEMAAPLYPLTKPGTLFNWGPDQQKAYQEIKQALLTAPALGLPDLTKPFELFVDEKQGYAKGVLTQKLGPWRRPVAYLSKKLDPVAAGWPPCLRMVAAIAVLTKDAGKLTMGQPLVILAPHAVEALVKQPPDRWLSNARMTHYQAMLLDTDRVQFGPVVALNPATLLPLPEKEAPHDCLEILAETHGTRPDLTDQPIPDADYTWYTDGSSFLQEGQRRAGAAVTTETEVIWARALPAGTSAQRAELIALTQALKMAEGKKLNVYTDSRYAFATAHVHGEIYRRRGWLTSEGREIKNKNEILALLKALFLPKRLSIIHCPGHQKGNSAEARGNRMADQAAREAAMKAVLETSTLLAGKRTADGSEFEKRTADGSEFESPKKKAKVE

SEQ ID NO: 1038 - protein, 2094 aa, synthetic construct
MPAAKRVKLDGGDKKYSIGLDIGTNSVGWAVITDEYKVPSKKFKVLGNTDRHSIKKNLIGALLFDSGETAEATRLKRTARRRYTRRKNRICYLQEIFSNEMAKVDDSFFHRLEESFLVEEDKKHERHPIFGNIVDEVAYHEKYPTIYHLRKKLVDSTDKADLRLIYLALAHMIKFRGHFLIEGDLNPDNSDVDKLFIQLVQTYNQLFEENPINASGVDAKAILSARLSKSRRLENLIAQLPGEKKNGLFGNLIALSLGLTPNFKSNFDLAEDAKLQLSKDTYDDDLDNLLAQIGDQYADLFLAAKNLSDAILLSDILRVNTEITKAPLSASMIKRYDEHHQDLTLLKALVRQQLPEKYKEIFFDQSKNGYAGYIDGGASQEEFYKFIKPILEKMDGTEELLVKLNREDLLRKQRTFDNGSIPHQIHLGELHAILRRQEDFYPFLKDNREKIEKILTFRIPYYVGPLARGNSRFAWMTRKSEETITPWNFEEVVDKGASAQSFIERMTNFDKNLPNEKVLPKHSLLYEYFTVYNELTKVKYVTEGMRKPAFLSGEQKKAIVDLLFKTNRKVTVKQLKEDYFKKIECFDSVEISGVEDRFNASLGTYHDLLKIIKDKDFLDNEENEDILEDIVLTLTLFEDREMIEERLKTYAHLFDDKVMKQLKRRRYTGWGRLSRKLINGIRDKQSGKTILDFLKSDGFANRNFMQLIHDDSLTFKEDIQKAQVSGQGDSLHEHIANLAGSPAIKKGILQTVKVVDELVKVMGRHKPENIVIEMARENQTTQKGQKNSRERMKRIEEGIKELGSQILKEHPVENTQLQNEKLYLYYLQNGRDMYVDQELDINRLSDYDVDHIVPQSFLKDDSIDNKVLTRSDKARGKSDNVPSEEVVKKMKNYWRQLLNAKLITQRKFDNLTKAERGGLSELDKAGFIKRQLVETRQITKHVAQILDSRMNTKYDENDKLIREVKVITLKSKLVSDFRKDFQFYKVREINNYHHAHDAYLNAVVGTALIKKYPKLESEFVYGDYKVYDVRKMIAKSEQEIGKATAKYFFYSNIMNFFKTEITLANGEIRKRPLIETNGETGEIVWDKGRDFATVRKVLSMPQVNIVKKTEVQTGGFSKESILPKRNSDKLIARKKDWDPKKYGGFDSPTVAYSVLVVAKVEKGKSKKLKSVKELLGITIMERSSFEKNPIDFLEAKGYKEVKKDLIIKLPKYSLFELENGRKRMLASAGELQKGNELALPSKYVNFLYLASHYEKLKGSPEDNEQKQLFVEQHKHYLDEIIEQISEFSKRVILADANLDKVLSAYNKHRDKPIREQAENIIHLFTLTNLGAPAAFKYFDTTIDRKRYTSTKEVLDATLIHQSITGLYETRIDLSQLGGDGGGSSPAPGGGGGTLNIEDEYRLHETSKEPDVPLGSTWLSDFPQAWAETGGMGLAVRQAPLIIPLKATSTPVSIKQYPMSQEARLGIKPHIQRLLDQGILVPCQSPWNTPLLPVKKPGTNDYRPVQDLREVNKRVEDIHPTVPNPYNLLSGLPPSHQWYTVLDLKDAFFCLRLHPTSQPLFAFEWRDPEMGISGQLTWTRLPQGFKNSPTLFNEALHRDLADFRIQHPDLILLQYVDDLLLAATSEQDCQRGTRALLQTLGNLGYRASAKKAQICQKQVKYLGYLLKEGQRWLTEARKETVMGQPTPKTPRQLREFLGKAGFCRLFIPGFAEMAAPLYPLTKPGTLFNWGPDQQKAYQEIKQALLTAPALGLPDLTKPFELFVDEKQGYAKGVLTQKLGPWRRPVAYLSKKLDPVAAGWPPCLRMVAAIAVLTKDAGKLTMGQPLVILAPHAVEALVKQPPDRWLSNARMTHYQAMLLDTDRVQFGPVVALNPATLLPLPEKEAPHDCLEILAETHGTRPDLTDQPIPDADYTWYTDGSSFLQEGQRRAGAAVTTETEVIWARALPAGTSAQRAELIALTQALKMAEGKKLNVYTDSRYAFATAHVHGEIYRRRGWLTSEGREIKNKNEILALLKALFLPKRLSIIHCPGHQKGNSAEARGNRMADQAAREAAMKAVLETSTLLAGKRTADGSEFEKRTADGSEFESPKKKAKVE

SEQ ID NO: 1039 - protein, 2096 aa, synthetic construct
MPAAKRVKLDGGDKKYSIGLDIGTNSVGWAVITDEYKVPSKKFKVLGNTDRHSIKKNLIGALLFDSGETAEATRLKRTARRRYTRRKNRICYLQEIFSNEMAKVDDSFFHRLEESFLVEEDKKHERHPIFGNIVDEVAYHEKYPTIYHLRKKLVDSTDKADLRLIYLALAHMIKFRGHFLIEGDLNPDNSDVDKLFIQLVQTYNQLFEENPINASGVDAKAILSARLSKSRRLENLIAQLPGEKKNGLFGNLIALSLGLTPNFKSNFDLAEDAKLQLSKDTYDDDLDNLLAQIGDQYADLFLAAKNLSDAILLSDILRVNTEITKAPLSASMIKRYDEHHQDLTLLKALVRQQLPEKYKEIFFDQSKNGYAGYIDGGASQEEFYKFIKPILEKMDGTEELLVKLNREDLLRKQRTFDNGSIPHQIHLGELHAILRRQEDFYPFLKDNREKIEKILTFRIPYYVGPLARGNSRFAWMTRKSEETITPWNFEEVVDKGASAQSFIERMTNFDKNLPNEKVLPKHSLLYEYFTVYNELTKVKYVTEGMRKPAFLSGEQKKAIVDLLFKTNRKVTVKQLKEDYFKKIECFDSVEISGVEDRFNASLGTYHDLLKIIKDKDFLDNEENEDILEDIVLTLTLFEDREMIEERLKTYAHLFDDKVMKQLKRRRYTGWGRLSRKLINGIRDKQSGKTILDFLKSDGFANRNFMQLIHDDSLTFKEDIQKAQVSGQGDSLHEHIANLAGSPAIKKGILQTVKVVDELVKVMGRHKPENIVIEMARENQTTQKGQKNSRERMKRIEEGIKELGSQILKEHPVENTQLQNEKLYLYYLQNGRDMYVDQELDINRLSDYDVDHIVPQSFLKDDSIDNKVLTRSDKARGKSDNVPSEEVVKKMKNYWRQLLNAKLITQRKFDNLTKAERGGLSELDKAGFIKRQLVETRQITKHVAQILDSRMNTKYDENDKLIREVKVITLKSKLVSDFRKDFQFYKVREINNYHHAHDAYLNAVVGTALIKKYPKLESEFVYGDYKVYDVRKMIAKSEQEIGKATAKYFFYSNIMNFFKTEITLANGEIRKRPLIETNGETGEIVWDKGRDFATVRKVLSMPQVNIVKKTEVQTGGFSKESILPKRNSDKLIARKKDWDPKKYGGFDSPTVAYSVLVVAKVEKGKSKKLKSVKELLGITIMERSSFEKNPIDFLEAKGYKEVKKDLIIKLPKYSLFELENGRKRMLASAGELQKGNELALPSKYVNFLYLASHYEKLKGSPEDNEQKQLFVEQHKHYLDEIIEQISEFSKRVILADANLDKVLSAYNKHRDKPIREQAENIIHLFTLTNLGAPAAFKYFDTTIDRKRYTSTKEVLDATLIHQSITGLYETRIDLSQLGGDGGEAAAKGSSPAPGGTLNIEDEYRLHETSKEPDVPLGSTWLSDFPQAWAETGGMGLAVRQAPLIIPLKATSTPVSIKQYPMSQEARLGIKPHIQRLLDQGILVPCQSPWNTPLLPVKKPGTNDYRPVQDLREVNKRVEDIHPTVPNPYNLLSGLPPSHQWYTVLDLKDAFFCLRLHPTSQPLFAFEWRDPEMGISGQLTWTRLPQGFKNSPTLFNEALHRDLADFRIQHPDLILLQYVDDLLLAATSEQDCQRGTRALLQTLGNLGYRASAKKAQICQKQVKYLGYLLKEGQRWLTEARKETVMGQPTPKTPRQLREFLGKAGFCRLFIPGFAEMAAPLYPLTKPGTLFNWGPDQQKAYQEIKQALLTAPALGLPDLTKPFELFVDEKQGYAKGVLTQKLGPWRRPVAYLSKKLDPVAAGWPPCLRMVAAIAVLTKDAGKLTMGQPLVILAPHAVEALVKQPPDRWLSNARMTHYQAMLLDTDRVQFGPVVALNPATLLPLPEKEAPHDCLEILAETHGTRPDLTDQPIPDADYTWYTDGSSFLQEGQRRAGAAVTTETEVIWARALPAGTSAQRAELIALTQALKMAEGKKLNVYTDSRYAFATAHVHGEIYRRRGWLTSEGREIKNKNEILALLKALFLPKRLSIIHCPGHQKGNSAEARGNRMADQAAREAAMKAVLETSTLLAGKRTADGSEFEKRTADGSEFESPKKKAKVE

SEQ ID NO: 1040 - protein, 2091 aa, synthetic construct
MPAAKRVKLDGGDKKYSIGLDIGTNSVGWAVITDEYKVPSKKFKVLGNTDRHSIKKNLIGALLFDSGETAEATRLKRTARRRYTRRKNRICYLQEIFSNEMAKVDDSFFHRLEESFLVEEDKKHERHPIFGNIVDEVAYHEKYPTIYHLRKKLVDSTDKADLRLIYLALAHMIKFRGHFLIEGDLNPDNSDVDKLFIQLVQTYNQLFEENPINASGVDAKAILSARLSKSRRLENLIAQLPGEKKNGLFGNLIALSLGLTPNFKSNFDLAEDAKLQLSKDTYDDDLDNLLAQIGDQYADLFLAAKNLSDAILLSDILRVNTEITKAPLSASMIKRYDEHHQDLTLLKALVRQQLPEKYKEIFFDQSKNGYAGYIDGGASQEEFYKFIKPILEKMDGTEELLVKLNREDLLRKQRTFDNGSIPHQIHLGELHAILRRQEDFYPFLKDNREKIEKILTFRIPYYVGPLARGNSRFAWMTRKSEETITPWNFEEVVDKGASAQSFIERMTNFDKNLPNEKVLPKHSLLYEYFTVYNELTKVKYVTEGMRKPAFLSGEQKKAIVDLLFKTNRKVTVKQLKEDYFKKIECFDSVEISGVEDRFNASLGTYHDLLKIIKDKDFLDNEENEDILEDIVLTLTLFEDREMIEERLKTYAHLFDDKVMKQLKRRRYTGWGRLSRKLINGIRDKQSGKTILDFLKSDGFANRNFMQLIHDDSLTFKEDIQKAQVSGQGDSLHEHIANLAGSPAIKKGILQTVKVVDELVKVMGRHKPENIVIEMARENQTTQKGQKNSRERMKRIEEGIKELGSQILKEHPVENTQLQNEKLYLYYLQNGRDMYVDQELDINRLSDYDVDHIVPQSFLKDDSIDNKVLTRSDKARGKSDNVPSEEVVKKMKNYWRQLLNAKLITQRKFDNLTKAERGGLSELDKAGFIKRQLVETRQITKHVAQILDSRMNTKYDENDKLIREVKVITLKSKLVSDFRKDFQFYKVREINNYHHAHDAYLNAVVGTALIKKYPKLESEFVYGDYKVYDVRKMIAKSEQEIGKATAKYFFYSNIMNFFKTEITLANGEIRKRPLIETNGETGEIVWDKGRDFATVRKVLSMPQVNIVKKTEVQTGGFSKESILPKRNSDKLIARKKDWDPKKYGGFDSPTVAYSVLVVAKVEKGKSKKLKSVKELLGITIMERSSFEKNPIDFLEAKGYKEVKKDLIIKLPKYSLFELENGRKRMLASAGELQKGNELALPSKYVNFLYLASHYEKLKGSPEDNEQKQLFVEQHKHYLDEIIEQISEFSKRVILADANLDKVLSAYNKHRDKPIREQAENIIHLFTLTNLGAPAAFKYFDTTIDRKRYTSTKEVLDATLIHQSITGLYETRIDLSQLGGDGGGGSGGSGGTLNIEDEYRLHETSKEPDVPLGSTWLSDFPQAWAETGGMGLAVRQAPLIIPLKATSTPVSIKQYPMSQEARLGIKPHIQRLLDQGILVPCQSPWNTPLLPVKKPGTNDYRPVQDLREVNKRVEDIHPTVPNPYNLLSGLPPSHQWYTVLDLKDAFFCLRLHPTSQPLFAFEWRDPEMGISGQLTWTRLPQGFKNSPTLFNEALHRDLADFRIQHPDLILLQYVDDLLLAATSEQDCQRGTRALLQTLGNLGYRASAKKAQICQKQVKYLGYLLKEGQRWLTEARKETVMGQPTPKTPRQLREFLGKAGFCRLFIPGFAEMAAPLYPLTKPGTLFNWGPDQQKAYQEIKQALLTAPALGLPDLTKPFELFVDEKQGYAKGVLTQKLGPWRRPVAYLSKKLDPVAAGWPPCLRMVAAIAVLTKDAGKLTMGQPLVILAPHAVEALVKQPPDRWLSNARMTHYQAMLLDTDRVQFGPVVALNPATLLPLPEKEAPHDCLEILAETHGTRPDLTDQPIPDADYTWYTDGSSFLQEGQRRAGAAVTTETEVIWARALPAGTSAQRAELIALTQALKMAEGKKLNVYTDSRYAFATAHVHGEIYRRRGWLTSEGREIKNKNEILALLKALFLPKRLSIIHCPGHQKGNSAEARGNRMADQAAREAAMKAVLETSTLLAGKRTADGSEFEKRTADGSEFESPKKKAKVE

SEQ ID NO: 1041 - protein, 2096 aa, synthetic construct
MPAAKRVKLDGGDKKYSIGLDIGTNSVGWAVITDEYKVPSKKFKVLGNTDRHSIKKNLIGALLFDSGETAEATRLKRTARRRYTRRKNRICYLQEIFSNEMAKVDDSFFHRLEESFLVEEDKKHERHPIFGNIVDEVAYHEKYPTIYHLRKKLVDSTDKADLRLIYLALAHMIKFRGHFLIEGDLNPDNSDVDKLFIQLVQTYNQLFEENPINASGVDAKAILSARLSKSRRLENLIAQLPGEKKNGLFGNLIALSLGLTPNFKSNFDLAEDAKLQLSKDTYDDDLDNLLAQIGDQYADLFLAAKNLSDAILLSDILRVNTEITKAPLSASMIKRYDEHHQDLTLLKALVRQQLPEKYKEIFFDQSKNGYAGYIDGGASQEEFYKFIKPILEKMDGTEELLVKLNREDLLRKQRTFDNGSIPHQIHLGELHAILRRQEDFYPFLKDNREKIEKILTFRIPYYVGPLARGNSRFAWMTRKSEETITPWNFEEVVDKGASAQSFIERMTNFDKNLPNEKVLPKHSLLYEYFTVYNELTKVKYVTEGMRKPAFLSGEQKKAIVDLLFKTNRKVTVKQLKEDYFKKIECFDSVEISGVEDRFNASLGTYHDLLKIIKDKDFLDNEENEDILEDIVLTLTLFEDREMIEERLKTYAHLFDDKVMKQLKRRRYTGWGRLSRKLINGIRDKQSGKTILDFLKSDGFANRNFMQLIHDDSLTFKEDIQKAQVSGQGDSLHEHIANLAGSPAIKKGILQTVKVVDELVKVMGRHKPENIVIEMARENQTTQKGQKNSRERMKRIEEGIKELGSQILKEHPVENTQLQNEKLYLYYLQNGRDMYVDQELDINRLSDYDVDHIVPQSFLKDDSIDNKVLTRSDKARGKSDNVPSEEVVKKMKNYWRQLLNAKLITQRKFDNLTKAERGGLSELDKAGFIKRQLVETRQITKHVAQILDSRMNTKYDENDKLIREVKVITLKSKLVSDFRKDFQFYKVREINNYHHAHDAYLNAVVGTALIKKYPKLESEFVYGDYKVYDVRKMIAKSEQEIGKATAKYFFYSNIMNFFKTEITLANGEIRKRPLIETNGETGEIVWDKGRDFATVRKVLSMPQVNIVKKTEVQTGGFSKESILPKRNSDKLIARKKDWDPKKYGGFDSPTVAYSVLVVAKVEKGKSKKLKSVKELLGITIMERSSFEKNPIDFLEAKGYKEVKKDLIIKLPKYSLFELENGRKRMLASAGELQKGNELALPSKYVNFLYLASHYEKLKGSPEDNEQKQLFVEQHKHYLDEIIEQISEFSKRVILADANLDKVLSAYNKHRDKPIREQAENIIHLFTLTNLGAPAAFKYFDTTIDRKRYTSTKEVLDATLIHQSITGLYETRIDLSQLGGDGGEAAAKGGSPAPGGTLNIEDEYRLHETSKEPDVPLGSTWLSDFPQAWAETGGMGLAVRQAPLIIPLKATSTPVSIKQYPMSQEARLGIKPHIQRLLDQGILVPCQSPWNTPLLPVKKPGTNDYRPVQDLREVNKRVEDIHPTVPNPYNLLSGLPPSHQWYTVLDLKDAFFCLRLHPTSQPLFAFEWRDPEMGISGQLTWTRLPQGFKNSPTLFNEALHRDLADFRIQHPDLILLQYVDDLLLAATSEQDCQRGTRALLQTLGNLGYRASAKKAQICQKQVKYLGYLLKEGQRWLTEARKETVMGQPTPKTPRQLREFLGKAGFCRLFIPGFAEMAAPLYPLTKPGTLFNWGPDQQKAYQEIKQALLTAPALGLPDLTKPFELFVDEKQGYAKGVLTQKLGPWRRPVAYLSKKLDPVAAGWPPCLRMVAAIAVLTKDAGKLTMGQPLVILAPHAVEALVKQPPDRWLSNARMTHYQAMLLDTDRVQFGPVVALNPATLLPLPEKEAPHDCLEILAETHGTRPDLTDQPIPDADYTWYTDGSSFLQEGQRRAGAAVTTETEVIWARALPAGTSAQRAELIALTQALKMAEGKKLNVYTDSRYAFATAHVHGEIYRRRGWLTSEGREIKNKNEILALLKALFLPKRLSIIHCPGHQKGNSAEARGNRMADQAAREAAMKAVLETSTLLAGKRTADGSEFEKRTADGSEFESPKKKAKVE

SEQ ID NO: 1042 - protein, 2100 aa, synthetic construct
MPAAKRVKLDGGDKKYSIGLDIGTNSVGWAVITDEYKVPSKKFKVLGNTDRHSIKKNLIGALLFDSGETAEATRLKRTARRRYTRRKNRICYLQEIFSNEMAKVDDSFFHRLEESFLVEEDKKHERHPIFGNIVDEVAYHEKYPTIYHLRKKLVDSTDKADLRLIYLALAHMIKFRGHFLIEGDLNPDNSDVDKLFIQLVQTYNQLFEENPINASGVDAKAILSARLSKSRRLENLIAQLPGEKKNGLFGNLIALSLGLTPNFKSNFDLAEDAKLQLSKDTYDDDLDNLLAQIGDQYADLFLAAKNLSDAILLSDILRVNTEITKAPLSASMIKRYDEHHQDLTLLKALVRQQLPEKYKEIFFDQSKNGYAGYIDGGASQEEFYKFIKPILEKMDGTEELLVKLNREDLLRKQRTFDNGSIPHQIHLGELHAILRRQEDFYPFLKDNREKIEKILTFRIPYYVGPLARGNSRFAWMTRKSEETITPWNFEEVVDKGASAQSFIERMTNFDKNLPNEKVLPKHSLLYEYFTVYNELTKVKYVTEGMRKPAFLSGEQKKAIVDLLFKTNRKVTVKQLKEDYFKKIECFDSVEISGVEDRFNASLGTYHDLLKIIKDKDFLDNEENEDILEDIVLTLTLFEDREMIEERLKTYAHLFDDKVMKQLKRRRYTGWGRLSRKLINGIRDKQSGKTILDFLKSDGFANRNFMQLIHDDSLTFKEDIQKAQVSGQGDSLHEHIANLAGSPAIKKGILQTVKVVDELVKVMGRHKPENIVIEMARENQTTQKGQKNSRERMKRIEEGIKELGSQILKEHPVENTQLQNEKLYLYYLQNGRDMYVDQELDINRLSDYDVDHIVPQSFLKDDSIDNKVLTRSDKARGKSDNVPSEEVVKKMKNYWRQLLNAKLITQRKFDNLTKAERGGLSELDKAGFIKRQLVETRQITKHVAQILDSRMNTKYDENDKLIREVKVITLKSKLVSDFRKDFQFYKVREINNYHHAHDAYLNAVVGTALIKKYPKLESEFVYGDYKVYDVRKMIAKSEQEIGKATAKYFFYSNIMNFFKTEITLANGEIRKRPLIETNGETGEIVWDKGRDFATVRKVLSMPQVNIVKKTEVQTGGFSKESILPKRNSDKLIARKKDWDPKKYGGFDSPTVAYSVLVVAKVEKGKSKKLKSVKELLGITIMERSSFEKNPIDFLEAKGYKEVKKDLIIKLPKYSLFELENGRKRMLASAGELQKGNELALPSKYVNFLYLASHYEKLKGSPEDNEQKQLFVEQHKHYLDEIIEQISEFSKRVILADANLDKVLSAYNKHRDKPIREQAENIIHLFTLTNLGAPAAFKYFDTTIDRKRYTSTKEVLDATLIHQSITGLYETRIDLSQLGGDGGGGGGSGGGGSGGGGSGGTLNIEDEYRLHETSKEPDVPLGSTWLSDFPQAWAETGGMGLAVRQAPLIIPLKATSTPVSIKQYPMSQEARLGIKPHIQRLLDQGILVPCQSPWNTPLLPVKKPGTNDYRPVQDLREVNKRVEDIHPTVPNPYNLLSGLPPSHQWYTVLDLKDAFFCLRLHPTSQPLFAFEWRDPEMGISGQLTWTRLPQGFKNSPTLFNEALHRDLADFRIQHPDLILLQYVDDLLLAATSEQDCQRGTRALLQTLGNLGYRASAKKAQICQKQVKYLGYLLKEGQRWLTEARKETVMGQPTPKTPRQLREFLGKAGFCRLFIPGFAEMAAPLYPLTKPGTLFNWGPDQQKAYQEIKQALLTAPALGLPDLTKPFELFVDEKQGYAKGVLTQKLGPWRRPVAYLSKKLDPVAAGWPPCLRMVAAIAVLTKDAGKLTMGQPLVILAPHAVEALVKQPPDRWLSNARMTHYQAMLLDTDRVQFGPVVALNPATLLPLPEKEAPHDCLEILAETHGTRPDLTDQPIPDADYTWYTDGSSFLQEGQRRAGAAVTTETEVIWARALPAGTSAQRAELIALTQALKMAEGKKLNVYTDSRYAFATAHVHGEIYRRRGWLTSEGREIKNKNEILALLKALFLPKRLSIIHCPGHQKGNSAEARGNRMADQAAREAAMKAVLETSTLLAGKRTADGSEFEKRTADGSEFESPKKKAKVE

SEQ ID NO: 1043 - protein, 2094 aa, synthetic construct
MPAAKRVKLDGGDKKYSIGLDIGTNSVGWAVITDEYKVPSKKFKVLGNTDRHSIKKNLIGALLFDSGETAEATRLKRTARRRYTRRKNRICYLQEIFSNEMAKVDDSFFHRLEESFLVEEDKKHERHPIFGNIVDEVAYHEKYPTIYHLRKKLVDSTDKADLRLIYLALAHMIKFRGHFLIEGDLNPDNSDVDKLFIQLVQTYNQLFEENPINASGVDAKAILSARLSKSRRLENLIAQLPGEKKNGLFGNLIALSLGLTPNFKSNFDLAEDAKLQLSKDTYDDDLDNLLAQIGDQYADLFLAAKNLSDAILLSDILRVNTEITKAPLSASMIKRYDEHHQDLTLLKALVRQQLPEKYKEIFFDQSKNGYAGYIDGGASQEEFYKFIKPILEKMDGTEELLVKLNREDLLRKQRTFDNGSIPHQIHLGELHAILRRQEDFYPFLKDNREKIEKILTFRIPYYVGPLARGNSRFAWMTRKSEETITPWNFEEVVDKGASAQSFIERMTNFDKNLPNEKVLPKHSLLYEYFTVYNELTKVKYVTEGMRKPAFLSGEQKKAIVDLLFKTNRKVTVKQLKEDYFKKIECFDSVEISGVEDRFNASLGTYHDLLKIIKDKDFLDNEENEDILEDIVLTLTLFEDREMIEERLKTYAHLFDDKVMKQLKRRRYTGWGRLSRKLINGIRDKQSGKTILDFLKSDGFANRNFMQLIHDDSLTFKEDIQKAQVSGQGDSLHEHIANLAGSPAIKKGILQTVKVVDELVKVMGRHKPENIVIEMARENQTTQKGQKNSRERMKRIEEGIKELGSQILKEHPVENTQLQNEKLYLYYLQNGRDMYVDQELDINRLSDYDVDHIVPQSFLKDDSIDNKVLTRSDKARGKSDNVPSEEVVKKMKNYWRQLLNAKLITQRKFDNLTKAERGGLSELDKAGFIKRQLVETRQITKHVAQILDSRMNTKYDENDKLIREVKVITLKSKLVSDFRKDFQFYKVREINNYHHAHDAYLNAVVGTALIKKYPKLESEFVYGDYKVYDVRKMIAKSEQEIGKATAKYFFYSNIMNFFKTEITLANGEIRKRPLIETNGETGEIVWDKGRDFATVRKVLSMPQVNIVKKTEVQTGGFSKESILPKRNSDKLIARKKDWDPKKYGGFDSPTVAYSVLVVAKVEKGKSKKLKSVKELLGITIMERSSFEKNPIDFLEAKGYKEVKKDLIIKLPKYSLFELENGRKRMLASAGELQKGNELALPSKYVNFLYLASHYEKLKGSPEDNEQKQLFVEQHKHYLDEIIEQISEFSKRVILADANLDKVLSAYNKHRDKPIREQAENIIHLFTLTNLGAPAAFKYFDTTIDRKRYTSTKEVLDATLIHQSITGLYETRIDLSQLGGDGGPAPGSSGGSGGTLNIEDEYRLHETSKEPDVPLGSTWLSDFPQAWAETGGMGLAVRQAPLIIPLKATSTPVSIKQYPMSQEARLGIKPHIQRLLDQGILVPCQSPWNTPLLPVKKPGTNDYRPVQDLREVNKRVEDIHPTVPNPYNLLSGLPPSHQWYTVLDLKDAFFCLRLHPTSQPLFAFEWRDPEMGISGQLTWTRLPQGFKNSPTLFNEALHRDLADFRIQHPDLILLQYVDDLLLAATSEQDCQRGTRALLQTLGNLGYRASAKKAQICQKQVKYLGYLLKEGQRWLTEARKETVMGQPTPKTPRQLREFLGKAGFCRLFIPGFAEMAAPLYPLTKPGTLFNWGPDQQKAYQEIKQALLTAPALGLPDLTKPFELFVDEKQGYAKGVLTQKLGPWRRPVAYLSKKLDPVAAGWPPCLRMVAAIAVLTKDAGKLTMGQPLVILAPHAVEALVKQPPDRWLSNARMTHYQAMLLDTDRVQFGPVVALNPATLLPLPEKEAPHDCLEILAETHGTRPDLTDQPIPDADYTWYTDGSSFLQEGQRRAGAAVTTETEVIWARALPAGTSAQRAELIALTQALKMAEGKKLNVYTDSRYAFATAHVHGEIYRRRGWLTSEGREIKNKNEILALLKALFLPKRLSIIHCPGHQKGNSAEARGNRMADQAAREAAMKAVLETSTLLAGKRTADGSEFEKRTADGSEFESPKKKAKVE

SEQ ID NO: 1044 - protein, 2093 aa, synthetic construct
MPAAKRVKLDGGDKKYSIGLDIGTNSVGWAVITDEYKVPSKKFKVLGNTDRHSIKKNLIGALLFDSGETAEATRLKRTARRRYTRRKNRICYLQEIFSNEMAKVDDSFFHRLEESFLVEEDKKHERHPIFGNIVDEVAYHEKYPTIYHLRKKLVDSTDKADLRLIYLALAHMIKFRGHFLIEGDLNPDNSDVDKLFIQLVQTYNQLFEENPINASGVDAKAILSARLSKSRRLENLIAQLPGEKKNGLFGNLIALSLGLTPNFKSNFDLAEDAKLQLSKDTYDDDLDNLLAQIGDQYADLFLAAKNLSDAILLSDILRVNTEITKAPLSASMIKRYDEHHQDLTLLKALVRQQLPEKYKEIFFDQSKNGYAGYIDGGASQEEFYKFIKPILEKMDGTEELLVKLNREDLLRKQRTFDNGSIPHQIHLGELHAILRRQEDFYPFLKDNREKIEKILTFRIPYYVGPLARGNSRFAWMTRKSEETITPWNFEEVVDKGASAQSFIERMTNFDKNLPNEKVLPKHSLLYEYFTVYNELTKVKYVTEGMRKPAFLSGEQKKAIVDLLFKTNRKVTVKQLKEDYFKKIECFDSVEISGVEDRFNASLGTYHDLLKIIKDKDFLDNEENEDILEDIVLTLTLFEDREMIEERLKTYAHLFDDKVMKQLKRRRYTGWGRLSRKLINGIRDKQSGKTILDFLKSDGFANRNFMQLIHDDSLTFKEDIQKAQVSGQGDSLHEHIANLAGSPAIKKGILQTVKVVDELVKVMGRHKPENIVIEMARENQTTQKGQKNSRERMKRIEEGIKELGSQILKEHPVENTQLQNEKLYLYYLQNGRDMYVDQELDINRLSDYDVDHIVPQSFLKDDSIDNKVLTRSDKARGKSDNVPSEEVVKKMKNYWRQLLNAKLITQRKFDNLTKAERGGLSELDKAGFIKRQLVETRQITKHVAQILDSRMNTKYDENDKLIREVKVITLKSKLVSDFRKDFQFYKVREINNYHHAHDAYLNAVVGTALIKKYPKLESEFVYGDYKVYDVRKMIAKSEQEIGKATAKYFFYSNIMNFFKTEITLANGEIRKRPLIETNGETGEIVWDKGRDFATVRKVLSMPQVNIVKKTEVQTGGFSKESILPKRNSDKLIARKKDWDPKKYGGFDSPTVAYSVLVVAKVEKGKSKKLKSVKELLGITIMERSSFEKNPIDFLEAKGYKEVKKDLIIKLPKYSLFELENGRKRMLASAGELQKGNELALPSKYVNFLYLASHYEKLKGSPEDNEQKQLFVEQHKHYLDEIIEQISEFSKRVILADANLDKVLSAYNKHRDKPIREQAENIIHLFTLTNLGAPAAFKYFDTTIDRKRYTSTKEVLDATLIHQSITGLYETRIDLSQLGGDGGGGGEAAAKGGTLNIEDEYRLHETSKEPDVPLGSTWLSDFPQAWAETGGMGLAVRQAPLIIPLKATSTPVSIKQYPMSQEARLGIKPHIQRLLDQGILVPCQSPWNTPLLPVKKPGTNDYRPVQDLREVNKRVEDIHPTVPNPYNLLSGLPPSHQWYTVLDLKDAFFCLRLHPTSQPLFAFEWRDPEMGISGQLTWTRLPQGFKNSPTLFNEALHRDLADFRIQHPDLILLQYVDDLLLAATSEQDCQRGTRALLQTLGNLGYRASAKKAQICQKQVKYLGYLLKEGQRWLTEARKETVMGQPTPKTPRQLREFLGKAGFCRLFIPGFAEMAAPLYPLTKPGTLFNWGPDQQKAYQEIKQALLTAPALGLPDLTKPFELFVDEKQGYAKGVLTQKLGPWRRPVAYLSKKLDPVAAGWPPCLRMVAAIAVLTKDAGKLTMGQPLVILAPHAVEALVKQPPDRWLSNARMTHYQAMLLDTDRVQFGPVVALNPATLLPLPEKEAPHDCLEILAETHGTRPDLTDQPIPDADYTWYTDGSSFLQEGQRRAGAAVTTETEVIWARALPAGTSAQRAELIALTQALKMAEGKKLNVYTDSRYAFATAHVHGEIYRRRGWLTSEGREIKNKNEILALLKALFLPKRLSIIHCPGHQKGNSAEARGNRMADQAAREAAMKAVLETSTLLAGKRTADGSEFEKRTADGSEFESPKKKAKVE

SEQ ID NO: 1045 - protein, 2100 aa, synthetic construct
MPAAKRVKLDGGDKKYSIGLDIGTNSVGWAVITDEYKVPSKKFKVLGNTDRHSIKKNLIGALLFDSGETAEATRLKRTARRRYTRRKNRICYLQEIFSNEMAKVDDSFFHRLEESFLVEEDKKHERHPIFGNIVDEVAYHEKYPTIYHLRKKLVDSTDKADLRLIYLALAHMIKFRGHFLIEGDLNPDNSDVDKLFIQLVQTYNQLFEENPINASGVDAKAILSARLSKSRRLENLIAQLPGEKKNGLFGNLIALSLGLTPNFKSNFDLAEDAKLQLSKDTYDDDLDNLLAQIGDQYADLFLAAKNLSDAILLSDILRVNTEITKAPLSASMIKRYDEHHQDLTLLKALVRQQLPEKYKEIFFDQSKNGYAGYIDGGASQEEFYKFIKPILEKMDGTEELLVKLNREDLLRKQRTFDNGSIPHQIHLGELHAILRRQEDFYPFLKDNREKIEKILTFRIPYYVGPLARGNSRFAWMTRKSEETITPWNFEEVVDKGASAQSFIERMTNFDKNLPNEKVLPKHSLLYEYFTVYNELTKVKYVTEGMRKPAFLSGEQKKAIVDLLFKTNRKVTVKQLKEDYFKKIECFDSVEISGVEDRFNASLGTYHDLLKIIKDKDFLDNEENEDILEDIVLTLTLFEDREMIEERLKTYAHLFDDKVMKQLKRRRYTGWGRLSRKLINGIRDKQSGKTILDFLKSDGFANRNFMQLIHDDSLTFKEDIQKAQVSGQGDSLHEHIANLAGSPAIKKGILQTVKVVDELVKVMGRHKPENIVIEMARENQTTQKGQKNSRERMKRIEEGIKELGSQILKEHPVENTQLQNEKLYLYYLQNGRDMYVDQELDINRLSDYDVDHIVPQSFLKDDSIDNKVLTRSDKARGKSDNVPSEEVVKKMKNYWRQLLNAKLITQRKFDNLTKAERGGLSELDKAGFIKRQLVETRQITKHVAQILDSRMNTKYDENDKLIREVKVITLKSKLVSDFRKDFQFYKVREINNYHHAHDAYLNAVVGTALIKKYPKLESEFVYGDYKVYDVRKMIAKSEQEIGKATAKYFFYSNIMNFFKTEITLANGEIRKRPLIETNGETGEIVWDKGRDFATVRKVLSMPQVNIVKKTEVQTGGFSKESILPKRNSDKLIARKKDWDPKKYGGFDSPTVAYSVLVVAKVEKGKSKKLKSVKELLGITIMERSSFEKNPIDFLEAKGYKEVKKDLIIKLPKYSLFELENGRKRMLASAGELQKGNELALPSKYVNFLYLASHYEKLKGSPEDNEQKQLFVEQHKHYLDEIIEQISEFSKRVILADANLDKVLSAYNKHRDKPIREQAENIIHLFTLTNLGAPAAFKYFDTTIDRKRYTSTKEVLDATLIHQSITGLYETRIDLSQLGGDGGGSSGSSGSSGSSGSSGGTLNIEDEYRLHETSKEPDVPLGSTWLSDFPQAWAETGGMGLAVRQAPLIIPLKATSTPVSIKQYPMSQEARLGIKPHIQRLLDQGILVPCQSPWNTPLLPVKKPGTNDYRPVQDLREVNKRVEDIHPTVPNPYNLLSGLPPSHQWYTVLDLKDAFFCLRLHPTSQPLFAFEWRDPEMGISGQLTWTRLPQGFKNSPTLFNEALHRDLADFRIQHPDLILLQYVDDLLLAATSEQDCQRGTRALLQTLGNLGYRASAKKAQICQKQVKYLGYLLKEGQRWLTEARKETVMGQPTPKTPRQLREFLGKAGFCRLFIPGFAEMAAPLYPLTKPGTLFNWGPDQQKAYQEIKQALLTAPALGLPDLTKPFELFVDEKQGYAKGVLTQKLGPWRRPVAYLSKKLDPVAAGWPPCLRMVAAIAVLTKDAGKLTMGQPLVILAPHAVEALVKQPPDRWLSNARMTHYQAMLLDTDRVQFGPVVALNPATLLPLPEKEAPHDCLEILAETHGTRPDLTDQPIPDADYTWYTDGSSFLQEGQRRAGAAVTTETEVIWARALPAGTSAQRAELIALTQALKMAEGKKLNVYTDSRYAFATAHVHGEIYRRRGWLTSEGREIKNKNEILALLKALFLPKRLSIIHCPGHQKGNSAEARGNRMADQAAREAAMKAVLETSTLLAGKRTADGSEFEKRTADGSEFESPKKKAKVE

SEQ ID NO: 1046 - protein, 2096 aa, synthetic construct
MPAAKRVKLDGGDKKYSIGLDIGTNSVGWAVITDEYKVPSKKFKVLGNTDRHSIKKNLIGALLFDSGETAEATRLKRTARRRYTRRKNRICYLQEIFSNEMAKVDDSFFHRLEESFLVEEDKKHERHPIFGNIVDEVAYHEKYPTIYHLRKKLVDSTDKADLRLIYLALAHMIKFRGHFLIEGDLNPDNSDVDKLFIQLVQTYNQLFEENPINASGVDAKAILSARLSKSRRLENLIAQLPGEKKNGLFGNLIALSLGLTPNFKSNFDLAEDAKLQLSKDTYDDDLDNLLAQIGDQYADLFLAAKNLSDAILLSDILRVNTEITKAPLSASMIKRYDEHHQDLTLLKALVRQQLPEKYKEIFFDQSKNGYAGYIDGGASQEEFYKFIKPILEKMDGTEELLVKLNREDLLRKQRTFDNGSIPHQIHLGELHAILRRQEDFYPFLKDNREKIEKILTFRIPYYVGPLARGNSRFAWMTRKSEETITPWNFEEVVDKGASAQSFIERMTNFDKNLPNEKVLPKHSLLYEYFTVYNELTKVKYVTEGMRKPAFLSGEQKKAIVDLLFKTNRKVTVKQLKEDYFKKIECFDSVEISGVEDRFNASLGTYHDLLKIIKDKDFLDNEENEDILEDIVLTLTLFEDREMIEERLKTYAHLFDDKVMKQLKRRRYTGWGRLSRKLINGIRDKQSGKTILDFLKSDGFANRNFMQLIHDDSLTFKEDIQKAQVSGQGDSLHEHIANLAGSPAIKKGILQTVKVVDELVKVMGRHKPENIVIEMARENQTTQKGQKNSRERMKRIEEGIKELGSQILKEHPVENTQLQNEKLYLYYLQNGRDMYVDQELDINRLSDYDVDHIVPQSFLKDDSIDNKVLTRSDKARGKSDNVPSEEVVKKMKNYWRQLLNAKLITQRKFDNLTKAERGGLSELDKAGFIKRQLVETRQITKHVAQILDSRMNTKYDENDKLIREVKVITLKSKLVSDFRKDFQFYKVREINNYHHAHDAYLNAVVGTALIKKYPKLESEFVYGDYKVYDVRKMIAKSEQEIGKATAKYFFYSNIMNFFKTEITLANGEIRKRPLIETNGETGEIVWDKGRDFATVRKVLSMPQVNIVKKTEVQTGGFSKESILPKRNSDKLIARKKDWDPKKYGGFDSPTVAYSVLVVAKVEKGKSKKLKSVKELLGITIMERSSFEKNPIDFLEAKGYKEVKKDLIIKLPKYSLFELENGRKRMLASAGELQKGNELALPSKYVNFLYLASHYEKLKGSPEDNEQKQLFVEQHKHYLDEIIEQISEFSKRVILADANLDKVLSAYNKHRDKPIREQAENIIHLFTLTNLGAPAAFKYFDTTIDRKRYTSTKEVLDATLIHQSITGLYETRIDLSQLGGDGGGGSGGGEAAAKGGTLNIEDEYRLHETSKEPDVPLGSTWLSDFPQAWAETGGMGLAVRQAPLIIPLKATSTPVSIKQYPMSQEARLGIKPHIQRLLDQGILVPCQSPWNTPLLPVKKPGTNDYRPVQDLREVNKRVEDIHPTVPNPYNLLSGLPPSHQWYTVLDLKDAFFCLRLHPTSQPLFAFEWRDPEMGISGQLTWTRLPQGFKNSPTLFNEALHRDLADFRIQHPDLILLQYVDDLLLAATSEQDCQRGTRALLQTLGNLGYRASAKKAQICQKQVKYLGYLLKEGQRWLTEARKETVMGQPTPKTPRQLREFLGKAGFCRLFIPGFAEMAAPLYPLTKPGTLFNWGPDQQKAYQEIKQALLTAPALGLPDLTKPFELFVDEKQGYAKGVLTQKLGPWRRPVAYLSKKLDPVAAGWPPCLRMVAAIAVLTKDAGKLTMGQPLVILAPHAVEALVKQPPDRWLSNARMTHYQAMLLDTDRVQFGPVVALNPATLLPLPEKEAPHDCLEILAETHGTRPDLTDQPIPDADYTWYTDGSSFLQEGQRRAGAAVTTETEVIWARALPAGTSAQRAELIALTQALKMAEGKKLNVYTDSRYAFATAHVHGEIYRRRGWLTSEGREIKNKNEILALLKALFLPKRLSIIHCPGHQKGNSAEARGNRMADQAAREAAMKAVLETSTLLAGKRTADGSEFEKRTADGSEFESPKKKAKVE

SEQ ID NO: 1047 - protein, 2091 aa, synthetic construct
MPAAKRVKLDGGDKKYSIGLDIGTNSVGWAVITDEYKVPSKKFKVLGNTDRHSIKKNLIGALLFDSGETAEATRLKRTARRRYTRRKNRICYLQEIFSNEMAKVDDSFFHRLEESFLVEEDKKHERHPIFGNIVDEVAYHEKYPTIYHLRKKLVDSTDKADLRLIYLALAHMIKFRGHFLIEGDLNPDNSDVDKLFIQLVQTYNQLFEENPINASGVDAKAILSARLSKSRRLENLIAQLPGEKKNGLFGNLIALSLGLTPNFKSNFDLAEDAKLQLSKDTYDDDLDNLLAQIGDQYADLFLAAKNLSDAILLSDILRVNTEITKAPLSASMIKRYDEHHQDLTLLKALVRQQLPEKYKEIFFDQSKNGYAGYIDGGASQEEFYKFIKPILEKMDGTEELLVKLNREDLLRKQRTFDNGSIPHQIHLGELHAILRRQEDFYPFLKDNREKIEKILTFRIPYYVGPLARGNSRFAWMTRKSEETITPWNFEEVVDKGASAQSFIERMTNFDKNLPNEKVLPKHSLLYEYFTVYNELTKVKYVTEGMRKPAFLSGEQKKAIVDLLFKTNRKVTVKQLKEDYFKKIECFDSVEISGVEDRFNASLGTYHDLLKIIKDKDFLDNEENEDILEDIVLTLTLFEDREMIEERLKTYAHLFDDKVMKQLKRRRYTGWGRLSRKLINGIRDKQSGKTILDFLKSDGFANRNFMQLIHDDSLTFKEDIQKAQVSGQGDSLHEHIANLAGSPAIKKGILQTVKVVDELVKVMGRHKPENIVIEMARENQTTQKGQKNSRERMKRIEEGIKELGSQILKEHPVENTQLQNEKLYLYYLQNGRDMYVDQELDINRLSDYDVDHIVPQSFLKDDSIDNKVLTRSDKARGKSDNVPSEEVVKKMKNYWRQLLNAKLITQRKFDNLTKAERGGLSELDKAGFIKRQLVETRQITKHVAQILDSRMNTKYDENDKLIREVKVITLKSKLVSDFRKDFQFYKVREINNYHHAHDAYLNAVVGTALIKKYPKLESEFVYGDYKVYDVRKMIAKSEQEIGKATAKYFFYSNIMNFFKTEITLANGEIRKRPLIETNGETGEIVWDKGRDFATVRKVLSMPQVNIVKKTEVQTGGFSKESILPKRNSDKLIARKKDWDPKKYGGFDSPTVAYSVLVVAKVEKGKSKKLKSVKELLGITIMERSSFEKNPIDFLEAKGYKEVKKDLIIKLPKYSLFELENGRKRMLASAGELQKGNELALPSKYVNFLYLASHYEKLKGSPEDNEQKQLFVEQHKHYLDEIIEQISEFSKRVILADANLDKVLSAYNKHRDKPIREQAENIIHLFTLTNLGAPAAFKYFDTTIDRKRYTSTKEVLDATLIHQSITGLYETRIDLSQLGGDGGGSSGSSGGTLNIEDEYRLHETSKEPDVPLGSTWLSDFPQAWAETGGMGLAVRQAPLIIPLKATSTPVSIKQYPMSQEARLGIKPHIQRLLDQGILVPCQSPWNTPLLPVKKPGTNDYRPVQDLREVNKRVEDIHPTVPNPYNLLSGLPPSHQWYTVLDLKDAFFCLRLHPTSQPLFAFEWRDPEMGISGQLTWTRLPQGFKNSPTLFNEALHRDLADFRIQHPDLILLQYVDDLLLAATSEQDCQRGTRALLQTLGNLGYRASAKKAQICQKQVKYLGYLLKEGQRWLTEARKETVMGQPTPKTPRQLREFLGKAGFCRLFIPGFAEMAAPLYPLTKPGTLFNWGPDQQKAYQEIKQALLTAPALGLPDLTKPFELFVDEKQGYAKGVLTQKLGPWRRPVAYLSKKLDPVAAGWPPCLRMVAAIAVLTKDAGKLTMGQPLVILAPHAVEALVKQPPDRWLSNARMTHYQAMLLDTDRVQFGPVVALNPATLLPLPEKEAPHDCLEILAETHGTRPDLTDQPIPDADYTWYTDGSSFLQEGQRRAGAAVTTETEVIWARALPAGTSAQRAELIALTQALKMAEGKKLNVYTDSRYAFATAHVHGEIYRRRGWLTSEGREIKNKNEILALLKALFLPKRLSIIHCPGHQKGNSAEARGNRMADQAAREAAMKAVLETSTLLAGKRTADGSEFEKRTADGSEFESPKKKAKVE

SEQ ID NO: 1048 - protein, 2093 aa, synthetic construct
MPAAKRVKLDGGDKKYSIGLDIGTNSVGWAVITDEYKVPSKKFKVLGNTDRHSIKKNLIGALLFDSGETAEATRLKRTARRRYTRRKNRICYLQEIFSNEMAKVDDSFFHRLEESFLVEEDKKHERHPIFGNIVDEVAYHEKYPTIYHLRKKLVDSTDKADLRLIYLALAHMIKFRGHFLIEGDLNPDNSDVDKLFIQLVQTYNQLFEENPINASGVDAKAILSARLSKSRRLENLIAQLPGEKKNGLFGNLIALSLGLTPNFKSNFDLAEDAKLQLSKDTYDDDLDNLLAQIGDQYADLFLAAKNLSDAILLSDILRVNTEITKAPLSASMIKRYDEHHQDLTLLKALVRQQLPEKYKEIFFDQSKNGYAGYIDGGASQEEFYKFIKPILEKMDGTEELLVKLNREDLLRKQRTFDNGSIPHQIHLGELHAILRRQEDFYPFLKDNREKIEKILTFRIPYYVGPLARGNSRFAWMTRKSEETITPWNFEEVVDKGASAQSFIERMTNFDKNLPNEKVLPKHSLLYEYFTVYNELTKVKYVTEGMRKPAFLSGEQKKAIVDLLFKTNRKVTVKQLKEDYFKKIECFDSVEISGVEDRFNASLGTYHDLLKIIKDKDFLDNEENEDILEDIVLTLTLFEDREMIEERLKTYAHLFDDKVMKQLKRRRYTGWGRLSRKLINGIRDKQSGKTILDFLKSDGFANRNFMQLIHDDSLTFKEDIQKAQVSGQGDSLHEHIANLAGSPAIKKGILQTVKVVDELVKVMGRHKPENIVIEMARENQTTQKGQKNSRERMKRIEEGIKELGSQILKEHPVENTQLQNEKLYLYYLQNGRDMYVDQELDINRLSDYDVDHIVPQSFLKDDSIDNKVLTRSDKARGKSDNVPSEEVVKKMKNYWRQLLNAKLITQRKFDNLTKAERGGLSELDKAGFIKRQLVETRQITKHVAQILDSRMNTKYDENDKLIREVKVITLKSKLVSDFRKDFQFYKVREINNYHHAHDAYLNAVVGTALIKKYPKLESEFVYGDYKVYDVRKMIAKSEQEIGKATAKYFFYSNIMNFFKTEITLANGEIRKRPLIETNGETGEIVWDKGRDFATVRKVLSMPQVNIVKKTEVQTGGFSKESILPKRNSDKLIARKKDWDPKKYGGFDSPTVAYSVLVVAKVEKGKSKKLKSVKELLGITIMERSSFEKNPIDFLEAKGYKEVKKDLIIKLPKYSLFELENGRKRMLASAGELQKGNELALPSKYVNFLYLASHYEKLKGSPEDNEQKQLFVEQHKHYLDEIIEQISEFSKRVILADANLDKVLSAYNKHRDKPIREQAENIIHLFTLTNLGAPAAFKYFDTTIDRKRYTSTKEVLDATLIHQSITGLYETRIDLSQLGGDGGEAAAKPAPGGTLNIEDEYRLHETSKEPDVPLGSTWLSDFPQAWAETGGMGLAVRQAPLIIPLKATSTPVSIKQYPMSQEARLGIKPHIQRLLDQGILVPCQSPWNTPLLPVKKPGTNDYRPVQDLREVNKRVEDIHPTVPNPYNLLSGLPPSHQWYTVLDLKDAFFCLRLHPTSQPLFAFEWRDPEMGISGQLTWTRLPQGFKNSPTLFNEALHRDLADFRIQHPDLILLQYVDDLLLAATSEQDCQRGTRALLQTLGNLGYRASAKKAQICQKQVKYLGYLLKEGQRWLTEARKETVMGQPTPKTPRQLREFLGKAGFCRLFIPGFAEMAAPLYPLTKPGTLFNWGPDQQKAYQEIKQALLTAPALGLPDLTKPFELFVDEKQGYAKGVLTQKLGPWRRPVAYLSKKLDPVAAGWPPCLRMVAAIAVLTKDAGKLTMGQPLVILAPHAVEALVKQPPDRWLSNARMTHYQAMLLDTDRVQFGPVVALNPATLLPLPEKEAPHDCLEILAETHGTRPDLTDQPIPDADYTWYTDGSSFLQEGQRRAGAAVTTETEVIWARALPAGTSAQRAELIALTQALKMAEGKKLNVYTDSRYAFATAHVHGEIYRRRGWLTSEGREIKNKNEILALLKALFLPKRLSIIHCPGHQKGNSAEARGNRMADQAAREAAMKAVLETSTLLAGKRTADGSEFEKRTADGSEFESPKKKAKVE

SEQ ID NO: 1049 - protein, 2105 aa, synthetic construct
MPAAKRVKLDGGDKKYSIGLDIGTNSVGWAVITDEYKVPSKKFKVLGNTDRHSIKKNLIGALLFDSGETAEATRLKRTARRRYTRRKNRICYLQEIFSNEMAKVDDSFFHRLEESFLVEEDKKHERHPIFGNIVDEVAYHEKYPTIYHLRKKLVDSTDKADLRLIYLALAHMIKFRGHFLIEGDLNPDNSDVDKLFIQLVQTYNQLFEENPINASGVDAKAILSARLSKSRRLENLIAQLPGEKKNGLFGNLIALSLGLTPNFKSNFDLAEDAKLQLSKDTYDDDLDNLLAQIGDQYADLFLAAKNLSDAILLSDILRVNTEITKAPLSASMIKRYDEHHQDLTLLKALVRQQLPEKYKEIFFDQSKNGYAGYIDGGASQEEFYKFIKPILEKMDGTEELLVKLNREDLLRKQRTFDNGSIPHQIHLGELHAILRRQEDFYPFLKDNREKIEKILTFRIPYYVGPLARGNSRFAWMTRKSEETITPWNFEEVVDKGASAQSFIERMTNFDKNLPNEKVLPKHSLLYEYFTVYNELTKVKYVTEGMRKPAFLSGEQKKAIVDLLFKTNRKVTVKQLKEDYFKKIECFDSVEISGVEDRFNASLGTYHDLLKIIKDKDFLDNEENEDILEDIVLTLTLFEDREMIEERLKTYAHLFDDKVMKQLKRRRYTGWGRLSRKLINGIRDKQSGKTILDFLKSDGFANRNFMQLIHDDSLTFKEDIQKAQVSGQGDSLHEHIANLAGSPAIKKGILQTVKVVDELVKVMGRHKPENIVIEMARENQTTQKGQKNSRERMKRIEEGIKELGSQILKEHPVENTQLQNEKLYLYYLQNGRDMYVDQELDINRLSDYDVDHIVPQSFLKDDSIDNKVLTRSDKARGKSDNVPSEEVVKKMKNYWRQLLNAKLITQRKFDNLTKAERGGLSELDKAGFIKRQLVETRQITKHVAQILDSRMNTKYDENDKLIREVKVITLKSKLVSDFRKDFQFYKVREINNYHHAHDAYLNAVVGTALIKKYPKLESEFVYGDYKVYDVRKMIAKSEQEIGKATAKYFFYSNIMNFFKTEITLANGEIRKRPLIETNGETGEIVWDKGRDFATVRKVLSMPQVNIVKKTEVQTGGFSKESILPKRNSDKLIARKKDWDPKKYGGFDSPTVAYSVLVVAKVEKGKSKKLKSVKELLGITIMERSSFEKNPIDFLEAKGYKEVKKDLIIKLPKYSLFELENGRKRMLASAGELQKGNELALPSKYVNFLYLASHYEKLKGSPEDNEQKQLFVEQHKHYLDEIIEQISEFSKRVILADANLDKVLSAYNKHRDKPIREQAENIIHLFTLTNLGAPAAFKYFDTTIDRKRYTSTKEVLDATLIHQSITGLYETRIDLSQLGGDGGGGGGSGGGGSGGGGSGGGGSGGTLNIEDEYRLHETSKEPDVPLGSTWLSDFPQAWAETGGMGLAVRQAPLIIPLKATSTPVSIKQYPMSQEARLGIKPHIQRLLDQGILVPCQSPWNTPLLPVKKPGTNDYRPVQDLREVNKRVEDIHPTVPNPYNLLSGLPPSHQWYTVLDLKDAFFCLRLHPTSQPLFAFEWRDPEMGISGQLTWTRLPQGFKNSPTLFNEALHRDLADFRIQHPDLILLQYVDDLLLAATSEQDCQRGTRALLQTLGNLGYRASAKKAQICQKQVKYLGYLLKEGQRWLTEARKETVMGQPTPKTPRQLREFLGKAGFCRLFIPGFAEMAAPLYPLTKPGTLFNWGPDQQKAYQEIKQALLTAPALGLPDLTKPFELFVDEKQGYAKGVLTQKLGPWRRPVAYLSKKLDPVAAGWPPCLRMVAAIAVLTKDAGKLTMGQPLVILAPHAVEALVKQPPDRWLSNARMTHYQAMLLDTDRVQFGPVVALNPATLLPLPEKEAPHDCLEILAETHGTRPDLTDQPIPDADYTWYTDGSSFLQEGQRRAGAAVTTETEVIWARALPAGTSAQRAELIALTQALKMAEGKKLNVYTDSRYAFATAHVHGEIYRRRGWLTSEGREIKNKNEILALLKALFLPKRLSIIHCPGHQKGNSAEARGNRMADQAAREAAMKAVLETSTLLAGKRTADGSEFEKRTADGSEFESPKKKAKVE

SEQ ID NO: 1050 - protein, 2093 aa, synthetic construct
MPAAKRVKLDGGDKKYSIGLDIGTNSVGWAVITDEYKVPSKKFKVLGNTDRHSIKKNLIGALLFDSGETAEATRLKRTARRRYTRRKNRICYLQEIFSNEMAKVDDSFFHRLEESFLVEEDKKHERHPIFGNIVDEVAYHEKYPTIYHLRKKLVDSTDKADLRLIYLALAHMIKFRGHFLIEGDLNPDNSDVDKLFIQLVQTYNQLFEENPINASGVDAKAILSARLSKSRRLENLIAQLPGEKKNGLFGNLIALSLGLTPNFKSNFDLAEDAKLQLSKDTYDDDLDNLLAQIGDQYADLFLAAKNLSDAILLSDILRVNTEITKAPLSASMIKRYDEHHQDLTLLKALVRQQLPEKYKEIFFDQSKNGYAGYIDGGASQEEFYKFIKPILEKMDGTEELLVKLNREDLLRKQRTFDNGSIPHQIHLGELHAILRRQEDFYPFLKDNREKIEKILTFRIPYYVGPLARGNSRFAWMTRKSEETITPWNFEEVVDKGASAQSFIERMTNFDKNLPNEKVLPKHSLLYEYFTVYNELTKVKYVTEGMRKPAFLSGEQKKAIVDLLFKTNRKVTVKQLKEDYFKKIECFDSVEISGVEDRFNASLGTYHDLLKIIKDKDFLDNEENEDILEDIVLTLTLFEDREMIEERLKTYAHLFDDKVMKQLKRRRYTGWGRLSRKLINGIRDKQSGKTILDFLKSDGFANRNFMQLIHDDSLTFKEDIQKAQVSGQGDSLHEHIANLAGSPAIKKGILQTVKVVDELVKVMGRHKPENIVIEMARENQTTQKGQKNSRERMKRIEEGIKELGSQILKEHPVENTQLQNEKLYLYYLQNGRDMYVDQELDINRLSDYDVDHIVPQSFLKDDSIDNKVLTRSDKARGKSDNVPSEEVVKKMKNYWRQLLNAKLITQRKFDNLTKAERGGLSELDKAGFIKRQLVETRQITKHVAQILDSRMNTKYDENDKLIREVKVITLKSKLVSDFRKDFQFYKVREINNYHHAHDAYLNAVVGTALIKKYPKLESEFVYGDYKVYDVRKMIAKSEQEIGKATAKYFFYSNIMNFFKTEITLANGEIRKRPLIETNGETGEIVWDKGRDFATVRKVLSMPQVNIVKKTEVQTGGFSKESILPKRNSDKLIARKKDWDPKKYGGFDSPTVAYSVLVVAKVEKGKSKKLKSVKELLGITIMERSSFEKNPIDFLEAKGYKEVKKDLIIKLPKYSLFELENGRKRMLASAGELQKGNELALPSKYVNFLYLASHYEKLKGSPEDNEQKQLFVEQHKHYLDEIIEQISEFSKRVILADANLDKVLSAYNKHRDKPIREQAENIIHLFTLTNLGAPAAFKYFDTTIDRKRYTSTKEVLDATLIHQSITGLYETRIDLSQLGGDGGEAAAKGGGGGTLNIEDEYRLHETSKEPDVPLGSTWLSDFPQAWAETGGMGLAVRQAPLIIPLKATSTPVSIKQYPMSQEARLGIKPHIQRLLDQGILVPCQSPWNTPLLPVKKPGTNDYRPVQDLREVNKRVEDIHPTVPNPYNLLSGLPPSHQWYTVLDLKDAFFCLRLHPTSQPLFAFEWRDPEMGISGQLTWTRLPQGFKNSPTLFNEALHRDLADFRIQHPDLILLQYVDDLLLAATSEQDCQRGTRALLQTLGNLGYRASAKKAQICQKQVKYLGYLLKEGQRWLTEARKETVMGQPTPKTPRQLREFLGKAGFCRLFIPGFAEMAAPLYPLTKPGTLFNWGPDQQKAYQEIKQALLTAPALGLPDLTKPFELFVDEKQGYAKGVLTQKLGPWRRPVAYLSKKLDPVAAGWPPCLRMVAAIAVLTKDAGKLTMGQPLVILAPHAVEALVKQPPDRWLSNARMTHYQAMLLDTDRVQFGPVVALNPATLLPLPEKEAPHDCLEILAETHGTRPDLTDQPIPDADYTWYTDGSSFLQEGQRRAGAAVTTETEVIWARALPAGTSAQRAELIALTQALKMAEGKKLNVYTDSRYAFATAHVHGEIYRRRGWLTSEGREIKNKNEILALLKALFLPKRLSIIHCPGHQKGNSAEARGNRMADQAAREAAMKAVLETSTLLAGKRTADGSEFEKRTADGSEFESPKKKAKVE

SEQ ID NO: 1051 - protein, 2096 aa, synthetic construct
MPAAKRVKLDGGDKKYSIGLDIGTNSVGWAVITDEYKVPSKKFKVLGNTDRHSIKKNLIGALLFDSGETAEATRLKRTARRRYTRRKNRICYLQEIFSNEMAKVDDSFFHRLEESFLVEEDKKHERHPIFGNIVDEVAYHEKYPTIYHLRKKLVDSTDKADLRLIYLALAHMIKFRGHFLIEGDLNPDNSDVDKLFIQLVQTYNQLFEENPINASGVDAKAILSARLSKSRRLENLIAQLPGEKKNGLFGNLIALSLGLTPNFKSNFDLAEDAKLQLSKDTYDDDLDNLLAQIGDQYADLFLAAKNLSDAILLSDILRVNTEITKAPLSASMIKRYDEHHQDLTLLKALVRQQLPEKYKEIFFDQSKNGYAGYIDGGASQEEFYKFIKPILEKMDGTEELLVKLNREDLLRKQRTFDNGSIPHQIHLGELHAILRRQEDFYPFLKDNREKIEKILTFRIPYYVGPLARGNSRFAWMTRKSEETITPWNFEEVVDKGASAQSFIERMTNFDKNLPNEKVLPKHSLLYEYFTVYNELTKVKYVTEGMRKPAFLSGEQKKAIVDLLFKTNRKVTVKQLKEDYFKKIECFDSVEISGVEDRFNASLGTYHDLLKIIKDKDFLDNEENEDILEDIVLTLTLFEDREMIEERLKTYAHLFDDKVMKQLKRRRYTGWGRLSRKLINGIRDKQSGKTILDFLKSDGFANRNFMQLIHDDSLTFKEDIQKAQVSGQGDSLHEHIANLAGSPAIKKGILQTVKVVDELVKVMGRHKPENIVIEMARENQTTQKGQKNSRERMKRIEEGIKELGSQILKEHPVENTQLQNEKLYLYYLQNGRDMYVDQELDINRLSDYDVDHIVPQSFLKDDSIDNKVLTRSDKARGKSDNVPSEEVVKKMKNYWRQLLNAKLITQRKFDNLTKAERGGLSELDKAGFIKRQLVETRQITKHVAQILDSRMNTKYDENDKLIREVKVITLKSKLVSDFRKDFQFYKVREINNYHHAHDAYLNAVVGTALIKKYPKLESEFVYGDYKVYDVRKMIAKSEQEIGKATAKYFFYSNIMNFFKTEITLANGEIRKRPLIETNGETGEIVWDKGRDFATVRKVLSMPQVNIVKKTEVQTGGFSKESILPKRNSDKLIARKKDWDPKKYGGFDSPTVAYSVLVVAKVEKGKSKKLKSVKELLGITIMERSSFEKNPIDFLEAKGYKEVKKDLIIKLPKYSLFELENGRKRMLASAGELQKGNELALPSKYVNFLYLASHYEKLKGSPEDNEQKQLFVEQHKHYLDEIIEQISEFSKRVILADANLDKVLSAYNKHRDKPIREQAENIIHLFTLTNLGAPAAFKYFDTTIDRKRYTSTKEVLDATLIHQSITGLYETRIDLSQLGGDGGEAAAKGGSGGGGGTLNIEDEYRLHETSKEPDVPLGSTWLSDFPQAWAETGGMGLAVRQAPLIIPLKATSTPVSIKQYPMSQEARLGIKPHIQRLLDQGILVPCQSPWNTPLLPVKKPGTNDYRPVQDLREVNKRVEDIHPTVPNPYNLLSGLPPSHQWYTVLDLKDAFFCLRLHPTSQPLFAFEWRDPEMGISGQLTWTRLPQGFKNSPTLFNEALHRDLADFRIQHPDLILLQYVDDLLLAATSEQDCQRGTRALLQTLGNLGYRASAKKAQICQKQVKYLGYLLKEGQRWLTEARKETVMGQPTPKTPRQLREFLGKAGFCRLFIPGFAEMAAPLYPLTKPGTLFNWGPDQQKAYQEIKQALLTAPALGLPDLTKPFELFVDEKQGYAKGVLTQKLGPWRRPVAYLSKKLDPVAAGWPPCLRMVAAIAVLTKDAGKLTMGQPLVILAPHAVEALVKQPPDRWLSNARMTHYQAMLLDTDRVQFGPVVALNPATLLPLPEKEAPHDCLEILAETHGTRPDLTDQPIPDADYTWYTDGSSFLQEGQRRAGAAVTTETEVIWARALPAGTSAQRAELIALTQALKMAEGKKLNVYTDSRYAFATAHVHGEIYRRRGWLTSEGREIKNKNEILALLKALFLPKRLSIIHCPGHQKGNSAEARGNRMADQAAREAAMKAVLETSTLLAGKRTADGSEFEKRTADGSEFESPKKKAKVE

SEQ ID NO: 1052 - protein, 2115 aa, synthetic construct
MPAAKRVKLDGGDKKYSIGLDIGTNSVGWAVITDEYKVPSKKFKVLGNTDRHSIKKNLIGALLFDSGETAEATRLKRTARRRYTRRKNRICYLQEIFSNEMAKVDDSFFHRLEESFLVEEDKKHERHPIFGNIVDEVAYHEKYPTIYHLRKKLVDSTDKADLRLIYLALAHMIKFRGHFLIEGDLNPDNSDVDKLFIQLVQTYNQLFEENPINASGVDAKAILSARLSKSRRLENLIAQLPGEKKNGLFGNLIALSLGLTPNFKSNFDLAEDAKLQLSKDTYDDDLDNLLAQIGDQYADLFLAAKNLSDAILLSDILRVNTEITKAPLSASMIKRYDEHHQDLTLLKALVRQQLPEKYKEIFFDQSKNGYAGYIDGGASQEEFYKFIKPILEKMDGTEELLVKLNREDLLRKQRTFDNGSIPHQIHLGELHAILRRQEDFYPFLKDNREKIEKILTFRIPYYVGPLARGNSRFAWMTRKSEETITPWNFEEVVDKGASAQSFIERMTNFDKNLPNEKVLPKHSLLYEYFTVYNELTKVKYVTEGMRKPAFLSGEQKKAIVDLLFKTNRKVTVKQLKEDYFKKIECFDSVEISGVEDRFNASLGTYHDLLKIIKDKDFLDNEENEDILEDIVLTLTLFEDREMIEERLKTYAHLFDDKVMKQLKRRRYTGWGRLSRKLINGIRDKQSGKTILDFLKSDGFANRNFMQLIHDDSLTFKEDIQKAQVSGQGDSLHEHIANLAGSPAIKKGILQTVKVVDELVKVMGRHKPENIVIEMARENQTTQKGQKNSRERMKRIEEGIKELGSQILKEHPVENTQLQNEKLYLYYLQNGRDMYVDQELDINRLSDYDVDHIVPQSFLKDDSIDNKVLTRSDKARGKSDNVPSEEVVKKMKNYWRQLLNAKLITQRKFDNLTKAERGGLSELDKAGFIKRQLVETRQITKHVAQILDSRMNTKYDENDKLIREVKVITLKSKLVSDFRKDFQFYKVREINNYHHAHDAYLNAVVGTALIKKYPKLESEFVYGDYKVYDVRKMIAKSEQEIGKATAKYFFYSNIMNFFKTEITLANGEIRKRPLIETNGETGEIVWDKGRDFATVRKVLSMPQVNIVKKTEVQTGGFSKESILPKRNSDKLIARKKDWDPKKYGGFDSPTVAYSVLVVAKVEKGKSKKLKSVKELLGITIMERSSFEKNPIDFLEAKGYKEVKKDLIIKLPKYSLFELENGRKRMLASAGELQKGNELALPSKYVNFLYLASHYEKLKGSPEDNEQKQLFVEQHKHYLDEIIEQISEFSKRVILADANLDKVLSAYNKHRDKPIREQAENIIHLFTLTNLGAPAAFKYFDTTIDRKRYTSTKEVLDATLIHQSITGLYETRIDLSQLGGDGGEAAAKEAAAKEAAAKEAAAKEAAAKEAAAKGGTLNIEDEYRLHETSKEPDVPLGSTWLSDFPQAWAETGGMGLAVRQAPLIIPLKATSTPVSIKQYPMSQEARLGIKPHIQRLLDQGILVPCQSPWNTPLLPVKKPGTNDYRPVQDLREVNKRVEDIHPTVPNPYNLLSGLPPSHQWYTVLDLKDAFFCLRLHPTSQPLFAFEWRDPEMGISGQLTWTRLPQGFKNSPTLFNEALHRDLADFRIQHPDLILLQYVDDLLLAATSEQDCQRGTRALLQTLGNLGYRASAKKAQICQKQVKYLGYLLKEGQRWLTEARKETVMGQPTPKTPRQLREFLGKAGFCRLFIPGFAEMAAPLYPLTKPGTLFNWGPDQQKAYQEIKQALLTAPALGLPDLTKPFELFVDEKQGYAKGVLTQKLGPWRRPVAYLSKKLDPVAAGWPPCLRMVAAIAVLTKDAGKLTMGQPLVILAPHAVEALVKQPPDRWLSNARMTHYQAMLLDTDRVQFGPVVALNPATLLPLPEKEAPHDCLEILAETHGTRPDLTDQPIPDADYTWYTDGSSFLQEGQRRAGAAVTTETEVIWARALPAGTSAQRAELIALTQALKMAEGKKLNVYTDSRYAFATAHVHGEIYRRRGWLTSEGREIKNKNEILALLKALFLPKRLSIIHCPGHQKGNSAEARGNRMADQAAREAAMKAVLETSTLLAGKRTADGSEFEKRTADGSEFESPKKKAKVE

SEQ ID NO: 1053 - protein, 2096 aa, synthetic construct
MPAAKRVKLDGGDKKYSIGLDIGTNSVGWAVITDEYKVPSKKFKVLGNTDRHSIKKNLIGALLFDSGETAEATRLKRTARRRYTRRKNRICYLQEIFSNEMAKVDDSFFHRLEESFLVEEDKKHERHPIFGNIVDEVAYHEKYPTIYHLRKKLVDSTDKADLRLIYLALAHMIKFRGHFLIEGDLNPDNSDVDKLFIQLVQTYNQLFEENPINASGVDAKAILSARLSKSRRLENLIAQLPGEKKNGLFGNLIALSLGLTPNFKSNFDLAEDAKLQLSKDTYDDDLDNLLAQIGDQYADLFLAAKNLSDAILLSDILRVNTEITKAPLSASMIKRYDEHHQDLTLLKALVRQQLPEKYKEIFFDQSKNGYAGYIDGGASQEEFYKFIKPILEKMDGTEELLVKLNREDLLRKQRTFDNGSIPHQIHLGELHAILRRQEDFYPFLKDNREKIEKILTFRIPYYVGPLARGNSRFAWMTRKSEETITPWNFEEVVDKGASAQSFIERMTNFDKNLPNEKVLPKHSLLYEYFTVYNELTKVKYVTEGMRKPAFLSGEQKKAIVDLLFKTNRKVTVKQLKEDYFKKIECFDSVEISGVEDRFNASLGTYHDLLKIIKDKDFLDNEENEDILEDIVLTLTLFEDREMIEERLKTYAHLFDDKVMKQLKRRRYTGWGRLSRKLINGIRDKQSGKTILDFLKSDGFANRNFMQLIHDDSLTFKEDIQKAQVSGQGDSLHEHIANLAGSPAIKKGILQTVKVVDELVKVMGRHKPENIVIEMARENQTTQKGQKNSRERMKRIEEGIKELGSQILKEHPVENTQLQNEKLYLYYLQNGRDMYVDQELDINRLSDYDVDHIVPQSFLKDDSIDNKVLTRSDKARGKSDNVPSEEVVKKMKNYWRQLLNAKLITQRKFDNLTKAERGGLSELDKAGFIKRQLVETRQITKHVAQILDSRMNTKYDENDKLIREVKVITLKSKLVSDFRKDFQFYKVREINNYHHAHDAYLNAVVGTALIKKYPKLESEFVYGDYKVYDVRKMIAKSEQEIGKATAKYFFYSNIMNFFKTEITLANGEIRKRPLIETNGETGEIVWDKGRDFATVRKVLSMPQVNIVKKTEVQTGGFSKESILPKRNSDKLIARKKDWDPKKYGGFDSPTVAYSVLVVAKVEKGKSKKLKSVKELLGITIMERSSFEKNPIDFLEAKGYKEVKKDLIIKLPKYSLFELENGRKRMLASAGELQKGNELALPSKYVNFLYLASHYEKLKGSPEDNEQKQLFVEQHKHYLDEIIEQISEFSKRVILADANLDKVLSAYNKHRDKPIREQAENIIHLFTLTNLGAPAAFKYFDTTIDRKRYTSTKEVLDATLIHQSITGLYETRIDLSQLGGDGGGGGGSSEAAAKGGTLNIEDEYRLHETSKEPDVPLGSTWLSDFPQAWAETGGMGLAVRQAPLIIPLKATSTPVSIKQYPMSQEARLGIKPHIQRLLDQGILVPCQSPWNTPLLPVKKPGTNDYRPVQDLREVNKRVEDIHPTVPNPYNLLSGLPPSHQWYTVLDLKDAFFCLRLHPTSQPLFAFEWRDPEMGISGQLTWTRLPQGFKNSPTLFNEALHRDLADFRIQHPDLILLQYVDDLLLAATSEQDCQRGTRALLQTLGNLGYRASAKKAQICQKQVKYLGYLLKEGQRWLTEARKETVMGQPTPKTPRQLREFLGKAGFCRLFIPGFAEMAAPLYPLTKPGTLFNWGPDQQKAYQEIKQALLTAPALGLPDLTKPFELFVDEKQGYAKGVLTQKLGPWRRPVAYLSKKLDPVAAGWPPCLRMVAAIAVLTKDAGKLTMGQPLVILAPHAVEALVKQPPDRWLSNARMTHYQAMLLDTDRVQFGPVVALNPATLLPLPEKEAPHDCLEILAETHGTRPDLTDQPIPDADYTWYTDGSSFLQEGQRRAGAAVTTETEVIWARALPAGTSAQRAELIALTQALKMAEGKKLNVYTDSRYAFATAHVHGEIYRRRGWLTSEGREIKNKNEILALLKALFLPKRLSIIHCPGHQKGNSAEARGNRMADQAAREAAMKAVLETSTLLAGKRTADGSEFEKRTADGSEFESPKKKAKVE

SEQ ID NO: 1054 - protein, 2096 aa, synthetic construct
MPAAKRVKLDGGDKKYSIGLDIGTNSVGWAVITDEYKVPSKKFKVLGNTDRHSIKKNLIGALLFDSGETAEATRLKRTARRRYTRRKNRICYLQEIFSNEMAKVDDSFFHRLEESFLVEEDKKHERHPIFGNIVDEVAYHEKYPTIYHLRKKLVDSTDKADLRLIYLALAHMIKFRGHFLIEGDLNPDNSDVDKLFIQLVQTYNQLFEENPINASGVDAKAILSARLSKSRRLENLIAQLPGEKKNGLFGNLIALSLGLTPNFKSNFDLAEDAKLQLSKDTYDDDLDNLLAQIGDQYADLFLAAKNLSDAILLSDILRVNTEITKAPLSASMIKRYDEHHQDLTLLKALVRQQLPEKYKEIFFDQSKNGYAGYIDGGASQEEFYKFIKPILEKMDGTEELLVKLNREDLLRKQRTFDNGSIPHQIHLGELHAILRRQEDFYPFLKDNREKIEKILTFRIPYYVGPLARGNSRFAWMTRKSEETITPWNFEEVVDKGASAQSFIERMTNFDKNLPNEKVLPKHSLLYEYFTVYNELTKVKYVTEGMRKPAFLSGEQKKAIVDLLFKTNRKVTVKQLKEDYFKKIECFDSVEISGVEDRFNASLGTYHDLLKIIKDKDFLDNEENEDILEDIVLTLTLFEDREMIEERLKTYAHLFDDKVMKQLKRRRYTGWGRLSRKLINGIRDKQSGKTILDFLKSDGFANRNFMQLIHDDSLTFKEDIQKAQVSGQGDSLHEHIANLAGSPAIKKGILQTVKVVDELVKVMGRHKPENIVIEMARENQTTQKGQKNSRERMKRIEEGIKELGSQILKEHPVENTQLQNEKLYLYYLQNGRDMYVDQELDINRLSDYDVDHIVPQSFLKDDSIDNKVLTRSDKARGKSDNVPSEEVVKKMKNYWRQLLNAKLITQRKFDNLTKAERGGLSELDKAGFIKRQLVETRQITKHVAQILDSRMNTKYDENDKLIREVKVITLKSKLVSDFRKDFQFYKVREINNYHHAHDAYLNAVVGTALIKKYPKLESEFVYGDYKVYDVRKMIAKSEQEIGKATAKYFFYSNIMNFFKTEITLANGEIRKRPLIETNGETGEIVWDKGRDFATVRKVLSMPQVNIVKKTEVQTGGFSKESILPKRNSDKLIARKKDWDPKKYGGFDSPTVAYSVLVVAKVEKGKSKKLKSVKELLGITIMERSSFEKNPIDFLEAKGYKEVKKDLIIKLPKYSLFELENGRKRMLASAGELQKGNELALPSKYVNFLYLASHYEKLKGSPEDNEQKQLFVEQHKHYLDEIIEQISEFSKRVILADANLDKVLSAYNKHRDKPIREQAENIIHLFTLTNLGAPAAFKYFDTTIDRKRYTSTKEVLDATLIHQSITGLYETRIDLSQLGGDGGGSSGGGEAAAKGGTLNIEDEYRLHETSKEPDVPLGSTWLSDFPQAWAETGGMGLAVRQAPLIIPLKATSTPVSIKQYPMSQEARLGIKPHIQRLLDQGILVPCQSPWNTPLLPVKKPGTNDYRPVQDLREVNKRVEDIHPTVPNPYNLLSGLPPSHQWYTVLDLKDAFFCLRLHPTSQPLFAFEWRDPEMGISGQLTWTRLPQGFKNSPTLFNEALHRDLADFRIQHPDLILLQYVDDLLLAATSEQDCQRGTRALLQTLGNLGYRASAKKAQICQKQVKYLGYLLKEGQRWLTEARKETVMGQPTPKTPRQLREFLGKAGFCRLFIPGFAEMAAPLYPLTKPGTLFNWGPDQQKAYQEIKQALLTAPALGLPDLTKPFELFVDEKQGYAKGVLTQKLGPWRRPVAYLSKKLDPVAAGWPPCLRMVAAIAVLTKDAGKLTMGQPLVILAPHAVEALVKQPPDRWLSNARMTHYQAMLLDTDRVQFGPVVALNPATLLPLPEKEAPHDCLEILAETHGTRPDLTDQPIPDADYTWYTDGSSFLQEGQRRAGAAVTTETEVIWARALPAGTSAQRAELIALTQALKMAEGKKLNVYTDSRYAFATAHVHGEIYRRRGWLTSEGREIKNKNEILALLKALFLPKRLSIIHCPGHQKGNSAEARGNRMADQAAREAAMKAVLETSTLLAGKRTADGSEFEKRTADGSEFESPKKKAKVE

SEQ ID NO: 1055 - protein, 2094 aa, synthetic construct
MPAAKRVKLDGGDKKYSIGLDIGTNSVGWAVITDEYKVPSKKFKVLGNTDRHSIKKNLIGALLFDSGETAEATRLKRTARRRYTRRKNRICYLQEIFSNEMAKVDDSFFHRLEESFLVEEDKKHERHPIFGNIVDEVAYHEKYPTIYHLRKKLVDSTDKADLRLIYLALAHMIKFRGHFLIEGDLNPDNSDVDKLFIQLVQTYNQLFEENPINASGVDAKAILSARLSKSRRLENLIAQLPGEKKNGLFGNLIALSLGLTPNFKSNFDLAEDAKLQLSKDTYDDDLDNLLAQIGDQYADLFLAAKNLSDAILLSDILRVNTEITKAPLSASMIKRYDEHHQDLTLLKALVRQQLPEKYKEIFFDQSKNGYAGYIDGGASQEEFYKFIKPILEKMDGTEELLVKLNREDLLRKQRTFDNGSIPHQIHLGELHAILRRQEDFYPFLKDNREKIEKILTFRIPYYVGPLARGNSRFAWMTRKSEETITPWNFEEVVDKGASAQSFIERMTNFDKNLPNEKVLPKHSLLYEYFTVYNELTKVKYVTEGMRKPAFLSGEQKKAIVDLLFKTNRKVTVKQLKEDYFKKIECFDSVEISGVEDRFNASLGTYHDLLKIIKDKDFLDNEENEDILEDIVLTLTLFEDREMIEERLKTYAHLFDDKVMKQLKRRRYTGWGRLSRKLINGIRDKQSGKTILDFLKSDGFANRNFMQLIHDDSLTFKEDIQKAQVSGQGDSLHEHIANLAGSPAIKKGILQTVKVVDELVKVMGRHKPENIVIEMARENQTTQKGQKNSRERMKRIEEGIKELGSQILKEHPVENTQLQNEKLYLYYLQNGRDMYVDQELDINRLSDYDVDHIVPQSFLKDDSIDNKVLTRSDKARGKSDNVPSEEVVKKMKNYWRQLLNAKLITQRKFDNLTKAERGGLSELDKAGFIKRQLVETRQITKHVAQILDSRMNTKYDENDKLIREVKVITLKSKLVSDFRKDFQFYKVREINNYHHAHDAYLNAVVGTALIKKYPKLESEFVYGDYKVYDVRKMIAKSEQEIGKATAKYFFYSNIMNFFKTEITLANGEIRKRPLIETNGETGEIVWDKGRDFATVRKVLSMPQVNIVKKTEVQTGGFSKESILPKRNSDKLIARKKDWDPKKYGGFDSPTVAYSVLVVAKVEKGKSKKLKSVKELLGITIMERSSFEKNPIDFLEAKGYKEVKKDLIIKLPKYSLFELENGRKRMLASAGELQKGNELALPSKYVNFLYLASHYEKLKGSPEDNEQKQLFVEQHKHYLDEIIEQISEFSKRVILADANLDKVLSAYNKHRDKPIREQAENIIHLFTLTNLGAPAAFKYFDTTIDRKRYTSTKEVLDATLIHQSITGLYETRIDLSQLGGDGGGGSPAPGGGGGTLNIEDEYRLHETSKEPDVPLGSTWLSDFPQAWAETGGMGLAVRQAPLIIPLKATSTPVSIKQYPMSQEARLGIKPHIQRLLDQGILVPCQSPWNTPLLPVKKPGTNDYRPVQDLREVNKRVEDIHPTVPNPYNLLSGLPPSHQWYTVLDLKDAFFCLRLHPTSQPLFAFEWRDPEMGISGQLTWTRLPQGFKNSPTLFNEALHRDLADFRIQHPDLILLQYVDDLLLAATSEQDCQRGTRALLQTLGNLGYRASAKKAQICQKQVKYLGYLLKEGQRWLTEARKETVMGQPTPKTPRQLREFLGKAGFCRLFIPGFAEMAAPLYPLTKPGTLFNWGPDQQKAYQEIKQALLTAPALGLPDLTKPFELFVDEKQGYAKGVLTQKLGPWRRPVAYLSKKLDPVAAGWPPCLRMVAAIAVLTKDAGKLTMGQPLVILAPHAVEALVKQPPDRWLSNARMTHYQAMLLDTDRVQFGPVVALNPATLLPLPEKEAPHDCLEILAETHGTRPDLTDQPIPDADYTWYTDGSSFLQEGQRRAGAAVTTETEVIWARALPAGTSAQRAELIALTQALKMAEGKKLNVYTDSRYAFATAHVHGEIYRRRGWLTSEGREIKNKNEILALLKALFLPKRLSIIHCPGHQKGNSAEARGNRMADQAAREAAMKAVLETSTLLAGKRTADGSEFEKRTADGSEFESPKKKAKVE

SEQ ID NO: 1056 - protein, 2096 aa, synthetic construct
MPAAKRVKLDGGDKKYSIGLDIGTNSVGWAVITDEYKVPSKKFKVLGNTDRHSIKKNLIGALLFDSGETAEATRLKRTARRRYTRRKNRICYLQEIFSNEMAKVDDSFFHRLEESFLVEEDKKHERHPIFGNIVDEVAYHEKYPTIYHLRKKLVDSTDKADLRLIYLALAHMIKFRGHFLIEGDLNPDNSDVDKLFIQLVQTYNQLFEENPINASGVDAKAILSARLSKSRRLENLIAQLPGEKKNGLFGNLIALSLGLTPNFKSNFDLAEDAKLQLSKDTYDDDLDNLLAQIGDQYADLFLAAKNLSDAILLSDILRVNTEITKAPLSASMIKRYDEHHQDLTLLKALVRQQLPEKYKEIFFDQSKNGYAGYIDGGASQEEFYKFIKPILEKMDGTEELLVKLNREDLLRKQRTFDNGSIPHQIHLGELHAILRRQEDFYPFLKDNREKIEKILTFRIPYYVGPLARGNSRFAWMTRKSEETITPWNFEEVVDKGASAQSFIERMTNFDKNLPNEKVLPKHSLLYEYFTVYNELTKVKYVTEGMRKPAFLSGEQKKAIVDLLFKTNRKVTVKQLKEDYFKKIECFDSVEISGVEDRFNASLGTYHDLLKIIKDKDFLDNEENEDILEDIVLTLTLFEDREMIEERLKTYAHLFDDKVMKQLKRRRYTGWGRLSRKLINGIRDKQSGKTILDFLKSDGFANRNFMQLIHDDSLTFKEDIQKAQVSGQGDSLHEHIANLAGSPAIKKGILQTVKVVDELVKVMGRHKPENIVIEMARENQTTQKGQKNSRERMKRIEEGIKELGSQILKEHPVENTQLQNEKLYLYYLQNGRDMYVDQELDINRLSDYDVDHIVPQSFLKDDSIDNKVLTRSDKARGKSDNVPSEEVVKKMKNYWRQLLNAKLITQRKFDNLTKAERGGLSELDKAGFIKRQLVETRQITKHVAQILDSRMNTKYDENDKLIREVKVITLKSKLVSDFRKDFQFYKVREINNYHHAHDAYLNAVVGTALIKKYPKLESEFVYGDYKVYDVRKMIAKSEQEIGKATAKYFFYSNIMNFFKTEITLANGEIRKRPLIETNGETGEIVWDKGRDFATVRKVLSMPQVNIVKKTEVQTGGFSKESILPKRNSDKLIARKKDWDPKKYGGFDSPTVAYSVLVVAKVEKGKSKKLKSVKELLGITIMERSSFEKNPIDFLEAKGYKEVKKDLIIKLPKYSLFELENGRKRMLASAGELQKGNELALPSKYVNFLYLASHYEKLKGSPEDNEQKQLFVEQHKHYLDEIIEQISEFSKRVILADANLDKVLSAYNKHRDKPIREQAENIIHLFTLTNLGAPAAFKYFDTTIDRKRYTSTKEVLDATLIHQSITGLYETRIDLSQLGGDGGEAAAKGGGGSSGGTLNIEDEYRLHETSKEPDVPLGSTWLSDFPQAWAETGGMGLAVRQAPLIIPLKATSTPVSIKQYPMSQEARLGIKPHIQRLLDQGILVPCQSPWNTPLLPVKKPGTNDYRPVQDLREVNKRVEDIHPTVPNPYNLLSGLPPSHQWYTVLDLKDAFFCLRLHPTSQPLFAFEWRDPEMGISGQLTWTRLPQGFKNSPTLFNEALHRDLADFRIQHPDLILLQYVDDLLLAATSEQDCQRGTRALLQTLGNLGYRASAKKAQICQKQVKYLGYLLKEGQRWLTEARKETVMGQPTPKTPRQLREFLGKAGFCRLFIPGFAEMAAPLYPLTKPGTLFNWGPDQQKAYQEIKQALLTAPALGLPDLTKPFELFVDEKQGYAKGVLTQKLGPWRRPVAYLSKKLDPVAAGWPPCLRMVAAIAVLTKDAGKLTMGQPLVILAPHAVEALVKQPPDRWLSNARMTHYQAMLLDTDRVQFGPVVALNPATLLPLPEKEAPHDCLEILAETHGTRPDLTDQPIPDADYTWYTDGSSFLQEGQRRAGAAVTTETEVIWARALPAGTSAQRAELIALTQALKMAEGKKLNVYTDSRYAFATAHVHGEIYRRRGWLTSEGREIKNKNEILALLKALFLPKRLSIIHCPGHQKGNSAEARGNRMADQAAREAAMKAVLETSTLLAGKRTADGSEFEKRTADGSEFESPKKKAKVE

SEQ ID NO: 1057 - protein, 2089 aa, synthetic construct
MPAAKRVKLDGGDKKYSIGLDIGTNSVGWAVITDEYKVPSKKFKVLGNTDRHSIKKNLIGALLFDSGETAEATRLKRTARRRYTRRKNRICYLQEIFSNEMAKVDDSFFHRLEESFLVEEDKKHERHPIFGNIVDEVAYHEKYPTIYHLRKKLVDSTDKADLRLIYLALAHMIKFRGHFLIEGDLNPDNSDVDKLFIQLVQTYNQLFEENPINASGVDAKAILSARLSKSRRLENLIAQLPGEKKNGLFGNLIALSLGLTPNFKSNFDLAEDAKLQLSKDTYDDDLDNLLAQIGDQYADLFLAAKNLSDAILLSDILRVNTEITKAPLSASMIKRYDEHHQDLTLLKALVRQQLPEKYKEIFFDQSKNGYAGYIDGGASQEEFYKFIKPILEKMDGTEELLVKLNREDLLRKQRTFDNGSIPHQIHLGELHAILRRQEDFYPFLKDNREKIEKILTFRIPYYVGPLARGNSRFAWMTRKSEETITPWNFEEVVDKGASAQSFIERMTNFDKNLPNEKVLPKHSLLYEYFTVYNELTKVKYVTEGMRKPAFLSGEQKKAIVDLLFKTNRKVTVKQLKEDYFKKIECFDSVEISGVEDRFNASLGTYHDLLKIIKDKDFLDNEENEDILEDIVLTLTLFEDREMIEERLKTYAHLFDDKVMKQLKRRRYTGWGRLSRKLINGIRDKQSGKTILDFLKSDGFANRNFMQLIHDDSLTFKEDIQKAQVSGQGDSLHEHIANLAGSPAIKKGILQTVKVVDELVKVMGRHKPENIVIEMARENQTTQKGQKNSRERMKRIEEGIKELGSQILKEHPVENTQLQNEKLYLYYLQNGRDMYVDQELDINRLSDYDVDHIVPQSFLKDDSIDNKVLTRSDKARGKSDNVPSEEVVKKMKNYWRQLLNAKLITQRKFDNLTKAERGGLSELDKAGFIKRQLVETRQITKHVAQILDSRMNTKYDENDKLIREVKVITLKSKLVSDFRKDFQFYKVREINNYHHAHDAYLNAVVGTALIKKYPKLESEFVYGDYKVYDVRKMIAKSEQEIGKATAKYFFYSNIMNFFKTEITLANGEIRKRPLIETNGETGEIVWDKGRDFATVRKVLSMPQVNIVKKTEVQTGGFSKESILPKRNSDKLIARKKDWDPKKYGGFDSPTVAYSVLVVAKVEKGKSKKLKSVKELLGITIMERSSFEKNPIDFLEAKGYKEVKKDLIIKLPKYSLFELENGRKRMLASAGELQKGNELALPSKYVNFLYLASHYEKLKGSPEDNEQKQLFVEQHKHYLDEIIEQISEFSKRVILADANLDKVLSAYNKHRDKPIREQAENIIHLFTLTNLGAPAAFKYFDTTIDRKRYTSTKEVLDATLIHQSITGLYETRIDLSQLGGDGGGGGGGGTLNIEDEYRLHETSKEPDVPLGSTWLSDFPQAWAETGGMGLAVRQAPLIIPLKATSTPVSIKQYPMSQEARLGIKPHIQRLLDQGILVPCQSPWNTPLLPVKKPGTNDYRPVQDLREVNKRVEDIHPTVPNPYNLLSGLPPSHQWYTVLDLKDAFFCLRLHPTSQPLFAFEWRDPEMGISGQLTWTRLPQGFKNSPTLFNEALHRDLADFRIQHPDLILLQYVDDLLLAATSEQDCQRGTRALLQTLGNLGYRASAKKAQICQKQVKYLGYLLKEGQRWLTEARKETVMGQPTPKTPRQLREFLGKAGFCRLFIPGFAEMAAPLYPLTKPGTLFNWGPDQQKAYQEIKQALLTAPALGLPDLTKPFELFVDEKQGYAKGVLTQKLGPWRRPVAYLSKKLDPVAAGWPPCLRMVAAIAVLTKDAGKLTMGQPLVILAPHAVEALVKQPPDRWLSNARMTHYQAMLLDTDRVQFGPVVALNPATLLPLPEKEAPHDCLEILAETHGTRPDLTDQPIPDADYTWYTDGSSFLQEGQRRAGAAVTTETEVIWARALPAGTSAQRAELIALTQALKMAEGKKLNVYTDSRYAFATAHVHGEIYRRRGWLTSEGREIKNKNEILALLKALFLPKRLSIIHCPGHQKGNSAEARGNRMADQAAREAAMKAVLETSTLLAGKRTADGSEFEKRTADGSEFESPKKKAKVE

SEQ ID NO: 1058 - protein, 2096 aa, synthetic construct
MPAAKRVKLDGGDKKYSIGLDIGTNSVGWAVITDEYKVPSKKFKVLGNTDRHSIKKNLIGALLFDSGETAEATRLKRTARRRYTRRKNRICYLQEIFSNEMAKVDDSFFHRLEESFLVEEDKKHERHPIFGNIVDEVAYHEKYPTIYHLRKKLVDSTDKADLRLIYLALAHMIKFRGHFLIEGDLNPDNSDVDKLFIQLVQTYNQLFEENPINASGVDAKAILSARLSKSRRLENLIAQLPGEKKNGLFGNLIALSLGLTPNFKSNFDLAEDAKLQLSKDTYDDDLDNLLAQIGDQYADLFLAAKNLSDAILLSDILRVNTEITKAPLSASMIKRYDEHHQDLTLLKALVRQQLPEKYKEIFFDQSKNGYAGYIDGGASQEEFYKFIKPILEKMDGTEELLVKLNREDLLRKQRTFDNGSIPHQIHLGELHAILRRQEDFYPFLKDNREKIEKILTFRIPYYVGPLARGNSRFAWMTRKSEETITPWNFEEVVDKGASAQSFIERMTNFDKNLPNEKVLPKHSLLYEYFTVYNELTKVKYVTEGMRKPAFLSGEQKKAIVDLLFKTNRKVTVKQLKEDYFKKIECFDSVEISGVEDRFNASLGTYHDLLKIIKDKDFLDNEENEDILEDIVLTLTLFEDREMIEERLKTYAHLFDDKVMKQLKRRRYTGWGRLSRKLINGIRDKQSGKTILDFLKSDGFANRNFMQLIHDDSLTFKEDIQKAQVSGQGDSLHEHIANLAGSPAIKKGILQTVKVVDELVKVMGRHKPENIVIEMARENQTTQKGQKNSRERMKRIEEGIKELGSQILKEHPVENTQLQNEKLYLYYLQNGRDMYVDQELDINRLSDYDVDHIVPQSFLKDDSIDNKVLTRSDKARGKSDNVPSEEVVKKMKNYWRQLLNAKLITQRKFDNLTKAERGGLSELDKAGFIKRQLVETRQITKHVAQILDSRMNTKYDENDKLIREVKVITLKSKLVSDFRKDFQFYKVREINNYHHAHDAYLNAVVGTALIKKYPKLESEFVYGDYKVYDVRKMIAKSEQEIGKATAKYFFYSNIMNFFKTEITLANGEIRKRPLIETNGETGEIVWDKGRDFATVRKVLSMPQVNIVKKTEVQTGGFSKESILPKRNSDKLIARKKDWDPKKYGGFDSPTVAYSVLVVAKVEKGKSKKLKSVKELLGITIMERSSFEKNPIDFLEAKGYKEVKKDLIIKLPKYSLFELENGRKRMLASAGELQKGNELALPSKYVNFLYLASHYEKLKGSPEDNEQKQLFVEQHKHYLDEIIEQISEFSKRVILADANLDKVLSAYNKHRDKPIREQAENIIHLFTLTNLGAPAAFKYFDTTIDRKRYTSTKEVLDATLIHQSITGLYETRIDLSQLGGDGGEAAAKGGGPAPGGTLNIEDEYRLHETSKEPDVPLGSTWLSDFPQAWAETGGMGLAVRQAPLIIPLKATSTPVSIKQYPMSQEARLGIKPHIQRLLDQGILVPCQSPWNTPLLPVKKPGTNDYRPVQDLREVNKRVEDIHPTVPNPYNLLSGLPPSHQWYTVLDLKDAFFCLRLHPTSQPLFAFEWRDPEMGISGQLTWTRLPQGFKNSPTLFNEALHRDLADFRIQHPDLILLQYVDDLLLAATSEQDCQRGTRALLQTLGNLGYRASAKKAQICQKQVKYLGYLLKEGQRWLTEARKETVMGQPTPKTPRQLREFLGKAGFCRLFIPGFAEMAAPLYPLTKPGTLFNWGPDQQKAYQEIKQALLTAPALGLPDLTKPFELFVDEKQGYAKGVLTQKLGPWRRPVAYLSKKLDPVAAGWPPCLRMVAAIAVLTKDAGKLTMGQPLVILAPHAVEALVKQPPDRWLSNARMTHYQAMLLDTDRVQFGPVVALNPATLLPLPEKEAPHDCLEILAETHGTRPDLTDQPIPDADYTWYTDGSSFLQEGQRRAGAAVTTETEVIWARALPAGTSAQRAELIALTQALKMAEGKKLNVYTDSRYAFATAHVHGEIYRRRGWLTSEGREIKNKNEILALLKALFLPKRLSIIHCPGHQKGNSAEARGNRMADQAAREAAMKAVLETSTLLAGKRTADGSEFEKRTADGSEFESPKKKAKVE

SEQ ID NO: 1059 - protein, 2096 aa, synthetic construct
MPAAKRVKLDGGDKKYSIGLDIGTNSVGWAVITDEYKVPSKKFKVLGNTDRHSIKKNLIGALLFDSGETAEATRLKRTARRRYTRRKNRICYLQEIFSNEMAKVDDSFFHRLEESFLVEEDKKHERHPIFGNIVDEVAYHEKYPTIYHLRKKLVDSTDKADLRLIYLALAHMIKFRGHFLIEGDLNPDNSDVDKLFIQLVQTYNQLFEENPINASGVDAKAILSARLSKSRRLENLIAQLPGEKKNGLFGNLIALSLGLTPNFKSNFDLAEDAKLQLSKDTYDDDLDNLLAQIGDQYADLFLAAKNLSDAILLSDILRVNTEITKAPLSASMIKRYDEHHQDLTLLKALVRQQLPEKYKEIFFDQSKNGYAGYIDGGASQEEFYKFIKPILEKMDGTEELLVKLNREDLLRKQRTFDNGSIPHQIHLGELHAILRRQEDFYPFLKDNREKIEKILTFRIPYYVGPLARGNSRFAWMTRKSEETITPWNFEEVVDKGASAQSFIERMTNFDKNLPNEKVLPKHSLLYEYFTVYNELTKVKYVTEGMRKPAFLSGEQKKAIVDLLFKTNRKVTVKQLKEDYFKKIECFDSVEISGVEDRFNASLGTYHDLLKIIKDKDFLDNEENEDILEDIVLTLTLFEDREMIEERLKTYAHLFDDKVMKQLKRRRYTGWGRLSRKLINGIRDKQSGKTILDFLKSDGFANRNFMQLIHDDSLTFKEDIQKAQVSGQGDSLHEHIANLAGSPAIKKGILQTVKVVDELVKVMGRHKPENIVIEMARENQTTQKGQKNSRERMKRIEEGIKELGSQILKEHPVENTQLQNEKLYLYYLQNGRDMYVDQELDINRLSDYDVDHIVPQSFLKDDSIDNKVLTRSDKARGKSDNVPSEEVVKKMKNYWRQLLNAKLITQRKFDNLTKAERGGLSELDKAGFIKRQLVETRQITKHVAQILDSRMNTKYDENDKLIREVKVITLKSKLVSDFRKDFQFYKVREINNYHHAHDAYLNAVVGTALIKKYPKLESEFVYGDYKVYDVRKMIAKSEQEIGKATAKYFFYSNIMNFFKTEITLANGEIRKRPLIETNGETGEIVWDKGRDFATVRKVLSMPQVNIVKKTEVQTGGFSKESILPKRNSDKLIARKKDWDPKKYGGFDSPTVAYSVLVVAKVEKGKSKKLKSVKELLGITIMERSSFEKNPIDFLEAKGYKEVKKDLIIKLPKYSLFELENGRKRMLASAGELQKGNELALPSKYVNFLYLASHYEKLKGSPEDNEQKQLFVEQHKHYLDEIIEQISEFSKRVILADANLDKVLSAYNKHRDKPIREQAENIIHLFTLTNLGAPAAFKYFDTTIDRKRYTSTKEVLDATLIHQSITGLYETRIDLSQLGGDGGGGSGSSEAAAKGGTLNIEDEYRLHETSKEPDVPLGSTWLSDFPQAWAETGGMGLAVRQAPLIIPLKATSTPVSIKQYPMSQEARLGIKPHIQRLLDQGILVPCQSPWNTPLLPVKKPGTNDYRPVQDLREVNKRVEDIHPTVPNPYNLLSGLPPSHQWYTVLDLKDAFFCLRLHPTSQPLFAFEWRDPEMGISGQLTWTRLPQGFKNSPTLFNEALHRDLADFRIQHPDLILLQYVDDLLLAATSEQDCQRGTRALLQTLGNLGYRASAKKAQICQKQVKYLGYLLKEGQRWLTEARKETVMGQPTPKTPRQLREFLGKAGFCRLFIPGFAEMAAPLYPLTKPGTLFNWGPDQQKAYQEIKQALLTAPALGLPDLTKPFELFVDEKQGYAKGVLTQKLGPWRRPVAYLSKKLDPVAAGWPPCLRMVAAIAVLTKDAGKLTMGQPLVILAPHAVEALVKQPPDRWLSNARMTHYQAMLLDTDRVQFGPVVALNPATLLPLPEKEAPHDCLEILAETHGTRPDLTDQPIPDADYTWYTDGSSFLQEGQRRAGAAVTTETEVIWARALPAGTSAQRAELIALTQALKMAEGKKLNVYTDSRYAFATAHVHGEIYRRRGWLTSEGREIKNKNEILALLKALFLPKRLSIIHCPGHQKGNSAEARGNRMADQAAREAAMKAVLETSTLLAGKRTADGSEFEKRTADGSEFESPKKKAKVE

SEQ ID NO: 1060 - protein, 2096 aa, synthetic construct
MPAAKRVKLDGGDKKYSIGLDIGTNSVGWAVITDEYKVPSKKFKVLGNTDRHSIKKNLIGALLFDSGETAEATRLKRTARRRYTRRKNRICYLQEIFSNEMAKVDDSFFHRLEESFLVEEDKKHERHPIFGNIVDEVAYHEKYPTIYHLRKKLVDSTDKADLRLIYLALAHMIKFRGHFLIEGDLNPDNSDVDKLFIQLVQTYNQLFEENPINASGVDAKAILSARLSKSRRLENLIAQLPGEKKNGLFGNLIALSLGLTPNFKSNFDLAEDAKLQLSKDTYDDDLDNLLAQIGDQYADLFLAAKNLSDAILLSDILRVNTEITKAPLSASMIKRYDEHHQDLTLLKALVRQQLPEKYKEIFFDQSKNGYAGYIDGGASQEEFYKFIKPILEKMDGTEELLVKLNREDLLRKQRTFDNGSIPHQIHLGELHAILRRQEDFYPFLKDNREKIEKILTFRIPYYVGPLARGNSRFAWMTRKSEETITPWNFEEVVDKGASAQSFIERMTNFDKNLPNEKVLPKHSLLYEYFTVYNELTKVKYVTEGMRKPAFLSGEQKKAIVDLLFKTNRKVTVKQLKEDYFKKIECFDSVEISGVEDRFNASLGTYHDLLKIIKDKDFLDNEENEDILEDIVLTLTLFEDREMIEERLKTYAHLFDDKVMKQLKRRRYTGWGRLSRKLINGIRDKQSGKTILDFLKSDGFANRNFMQLIHDDSLTFKEDIQKAQVSGQGDSLHEHIANLAGSPAIKKGILQTVKVVDELVKVMGRHKPENIVIEMARENQTTQKGQKNSRERMKRIEEGIKELGSQILKEHPVENTQLQNEKLYLYYLQNGRDMYVDQELDINRLSDYDVDHIVPQSFLKDDSIDNKVLTRSDKARGKSDNVPSEEVVKKMKNYWRQLLNAKLITQRKFDNLTKAERGGLSELDKAGFIKRQLVETRQITKHVAQILDSRMNTKYDENDKLIREVKVITLKSKLVSDFRKDFQFYKVREINNYHHAHDAYLNAVVGTALIKKYPKLESEFVYGDYKVYDVRKMIAKSEQEIGKATAKYFFYSNIMNFFKTEITLANGEIRKRPLIETNGETGEIVWDKGRDFATVRKVLSMPQVNIVKKTEVQTGGFSKESILPKRNSDKLIARKKDWDPKKYGGFDSPTVAYSVLVVAKVEKGKSKKLKSVKELLGITIMERSSFEKNPIDFLEAKGYKEVKKDLIIKLPKYSLFELENGRKRMLASAGELQKGNELALPSKYVNFLYLASHYEKLKGSPEDNEQKQLFVEQHKHYLDEIIEQISEFSKRVILADANLDKVLSAYNKHRDKPIREQAENIIHLFTLTNLGAPAAFKYFDTTIDRKRYTSTKEVLDATLIHQSITGLYETRIDLSQLGGDGGGSSGGSEAAAKGGTLNIEDEYRLHETSKEPDVPLGSTWLSDFPQAWAETGGMGLAVRQAPLIIPLKATSTPVSIKQYPMSQEARLGIKPHIQRLLDQGILVPCQSPWNTPLLPVKKPGTNDYRPVQDLREVNKRVEDIHPTVPNPYNLLSGLPPSHQWYTVLDLKDAFFCLRLHPTSQPLFAFEWRDPEMGISGQLTWTRLPQGFKNSPTLFNEALHRDLADFRIQHPDLILLQYVDDLLLAATSEQDCQRGTRALLQTLGNLGYRASAKKAQICQKQVKYLGYLLKEGQRWLTEARKETVMGQPTPKTPRQLREFLGKAGFCRLFIPGFAEMAAPLYPLTKPGTLFNWGPDQQKAYQEIKQALLTAPALGLPDLTKPFELFVDEKQGYAKGVLTQKLGPWRRPVAYLSKKLDPVAAGWPPCLRMVAAIAVLTKDAGKLTMGQPLVILAPHAVEALVKQPPDRWLSNARMTHYQAMLLDTDRVQFGPVVALNPATLLPLPEKEAPHDCLEILAETHGTRPDLTDQPIPDADYTWYTDGSSFLQEGQRRAGAAVTTETEVIWARALPAGTSAQRAELIALTQALKMAEGKKLNVYTDSRYAFATAHVHGEIYRRRGWLTSEGREIKNKNEILALLKALFLPKRLSIIHCPGHQKGNSAEARGNRMADQAAREAAMKAVLETSTLLAGKRTADGSEFEKRTADGSEFESPKKKAKVE

SEQ ID NO: 1061 - protein, 2094 aa, synthetic construct
MPAAKRVKLDGGDKKYSIGLDIGTNSVGWAVITDEYKVPSKKFKVLGNTDRHSIKKNLIGALLFDSGETAEATRLKRTARRRYTRRKNRICYLQEIFSNEMAKVDDSFFHRLEESFLVEEDKKHERHPIFGNIVDEVAYHEKYPTIYHLRKKLVDSTDKADLRLIYLALAHMIKFRGHFLIEGDLNPDNSDVDKLFIQLVQTYNQLFEENPINASGVDAKAILSARLSKSRRLENLIAQLPGEKKNGLFGNLIALSLGLTPNFKSNFDLAEDAKLQLSKDTYDDDLDNLLAQIGDQYADLFLAAKNLSDAILLSDILRVNTEITKAPLSASMIKRYDEHHQDLTLLKALVRQQLPEKYKEIFFDQSKNGYAGYIDGGASQEEFYKFIKPILEKMDGTEELLVKLNREDLLRKQRTFDNGSIPHQIHLGELHAILRRQEDFYPFLKDNREKIEKILTFRIPYYVGPLARGNSRFAWMTRKSEETITPWNFEEVVDKGASAQSFIERMTNFDKNLPNEKVLPKHSLLYEYFTVYNELTKVKYVTEGMRKPAFLSGEQKKAIVDLLFKTNRKVTVKQLKEDYFKKIECFDSVEISGVEDRFNASLGTYHDLLKIIKDKDFLDNEENEDILEDIVLTLTLFEDREMIEERLKTYAHLFDDKVMKQLKRRRYTGWGRLSRKLINGIRDKQSGKTILDFLKSDGFANRNFMQLIHDDSLTFKEDIQKAQVSGQGDSLHEHIANLAGSPAIKKGILQTVKVVDELVKVMGRHKPENIVIEMARENQTTQKGQKNSRERMKRIEEGIKELGSQILKEHPVENTQLQNEKLYLYYLQNGRDMYVDQELDINRLSDYDVDHIVPQSFLKDDSIDNKVLTRSDKARGKSDNVPSEEVVKKMKNYWRQLLNAKLITQRKFDNLTKAERGGLSELDKAGFIKRQLVETRQITKHVAQILDSRMNTKYDENDKLIREVKVITLKSKLVSDFRKDFQFYKVREINNYHHAHDAYLNAVVGTALIKKYPKLESEFVYGDYKVYDVRKMIAKSEQEIGKATAKYFFYSNIMNFFKTEITLANGEIRKRPLIETNGETGEIVWDKGRDFATVRKVLSMPQVNIVKKTEVQTGGFSKESILPKRNSDKLIARKKDWDPKKYGGFDSPTVAYSVLVVAKVEKGKSKKLKSVKELLGITIMERSSFEKNPIDFLEAKGYKEVKKDLIIKLPKYSLFELENGRKRMLASAGELQKGNELALPSKYVNFLYLASHYEKLKGSPEDNEQKQLFVEQHKHYLDEIIEQISEFSKRVILADANLDKVLSAYNKHRDKPIREQAENIIHLFTLTNLGAPAAFKYFDTTIDRKRYTSTKEVLDATLIHQSITGLYETRIDLSQLGGDGGGSSGGSPAPGGTLNIEDEYRLHETSKEPDVPLGSTWLSDFPQAWAETGGMGLAVRQAPLIIPLKATSTPVSIKQYPMSQEARLGIKPHIQRLLDQGILVPCQSPWNTPLLPVKKPGTNDYRPVQDLREVNKRVEDIHPTVPNPYNLLSGLPPSHQWYTVLDLKDAFFCLRLHPTSQPLFAFEWRDPEMGISGQLTWTRLPQGFKNSPTLFNEALHRDLADFRIQHPDLILLQYVDDLLLAATSEQDCQRGTRALLQTLGNLGYRASAKKAQICQKQVKYLGYLLKEGQRWLTEARKETVMGQPTPKTPRQLREFLGKAGFCRLFIPGFAEMAAPLYPLTKPGTLFNWGPDQQKAYQEIKQALLTAPALGLPDLTKPFELFVDEKQGYAKGVLTQKLGPWRRPVAYLSKKLDPVAAGWPPCLRMVAAIAVLTKDAGKLTMGQPLVILAPHAVEALVKQPPDRWLSNARMTHYQAMLLDTDRVQFGPVVALNPATLLPLPEKEAPHDCLEILAETHGTRPDLTDQPIPDADYTWYTDGSSFLQEGQRRAGAAVTTETEVIWARALPAGTSAQRAELIALTQALKMAEGKKLNVYTDSRYAFATAHVHGEIYRRRGWLTSEGREIKNKNEILALLKALFLPKRLSIIHCPGHQKGNSAEARGNRMADQAAREAAMKAVLETSTLLAGKRTADGSEFEKRTADGSEFESPKKKAKVE

SEQ ID NO: 1062 - protein, 2091 aa, synthetic construct
MPAAKRVKLDGGDKKYSIGLDIGTNSVGWAVITDEYKVPSKKFKVLGNTDRHSIKKNLIGALLFDSGETAEATRLKRTARRRYTRRKNRICYLQEIFSNEMAKVDDSFFHRLEESFLVEEDKKHERHPIFGNIVDEVAYHEKYPTIYHLRKKLVDSTDKADLRLIYLALAHMIKFRGHFLIEGDLNPDNSDVDKLFIQLVQTYNQLFEENPINASGVDAKAILSARLSKSRRLENLIAQLPGEKKNGLFGNLIALSLGLTPNFKSNFDLAEDAKLQLSKDTYDDDLDNLLAQIGDQYADLFLAAKNLSDAILLSDILRVNTEITKAPLSASMIKRYDEHHQDLTLLKALVRQQLPEKYKEIFFDQSKNGYAGYIDGGASQEEFYKFIKPILEKMDGTEELLVKLNREDLLRKQRTFDNGSIPHQIHLGELHAILRRQEDFYPFLKDNREKIEKILTFRIPYYVGPLARGNSRFAWMTRKSEETITPWNFEEVVDKGASAQSFIERMTNFDKNLPNEKVLPKHSLLYEYFTVYNELTKVKYVTEGMRKPAFLSGEQKKAIVDLLFKTNRKVTVKQLKEDYFKKIECFDSVEISGVEDRFNASLGTYHDLLKIIKDKDFLDNEENEDILEDIVLTLTLFEDREMIEERLKTYAHLFDDKVMKQLKRRRYTGWGRLSRKLINGIRDKQSGKTILDFLKSDGFANRNFMQLIHDDSLTFKEDIQKAQVSGQGDSLHEHIANLAGSPAIKKGILQTVKVVDELVKVMGRHKPENIVIEMARENQTTQKGQKNSRERMKRIEEGIKELGSQILKEHPVENTQLQNEKLYLYYLQNGRDMYVDQELDINRLSDYDVDHIVPQSFLKDDSIDNKVLTRSDKARGKSDNVPSEEVVKKMKNYWRQLLNAKLITQRKFDNLTKAERGGLSELDKAGFIKRQLVETRQITKHVAQILDSRMNTKYDENDKLIREVKVITLKSKLVSDFRKDFQFYKVREINNYHHAHDAYLNAVVGTALIKKYPKLESEFVYGDYKVYDVRKMIAKSEQEIGKATAKYFFYSNIMNFFKTEITLANGEIRKRPLIETNGETGEIVWDKGRDFATVRKVLSMPQVNIVKKTEVQTGGFSKESILPKRNSDKLIARKKDWDPKKYGGFDSPTVAYSVLVVAKVEKGKSKKLKSVKELLGITIMERSSFEKNPIDFLEAKGYKEVKKDLIIKLPKYSLFELENGRKRMLASAGELQKGNELALPSKYVNFLYLASHYEKLKGSPEDNEQKQLFVEQHKHYLDEIIEQISEFSKRVILADANLDKVLSAYNKHRDKPIREQAENIIHLFTLTNLGAPAAFKYFDTTIDRKRYTSTKEVLDATLIHQSITGLYETRIDLSQLGGDGGGSSGGSGGTLNIEDEYRLHETSKEPDVPLGSTWLSDFPQAWAETGGMGLAVRQAPLIIPLKATSTPVSIKQYPMSQEARLGIKPHIQRLLDQGILVPCQSPWNTPLLPVKKPGTNDYRPVQDLREVNKRVEDIHPTVPNPYNLLSGLPPSHQWYTVLDLKDAFFCLRLHPTSQPLFAFEWRDPEMGISGQLTWTRLPQGFKNSPTLFNEALHRDLADFRIQHPDLILLQYVDDLLLAATSEQDCQRGTRALLQTLGNLGYRASAKKAQICQKQVKYLGYLLKEGQRWLTEARKETVMGQPTPKTPRQLREFLGKAGFCRLFIPGFAEMAAPLYPLTKPGTLFNWGPDQQKAYQEIKQALLTAPALGLPDLTKPFELFVDEKQGYAKGVLTQKLGPWRRPVAYLSKKLDPVAAGWPPCLRMVAAIAVLTKDAGKLTMGQPLVILAPHAVEALVKQPPDRWLSNARMTHYQAMLLDTDRVQFGPVVALNPATLLPLPEKEAPHDCLEILAETHGTRPDLTDQPIPDADYTWYTDGSSFLQEGQRRAGAAVTTETEVIWARALPAGTSAQRAELIALTQALKMAEGKKLNVYTDSRYAFATAHVHGEIYRRRGWLTSEGREIKNKNEILALLKALFLPKRLSIIHCPGHQKGNSAEARGNRMADQAAREAAMKAVLETSTLLAGKRTADGSEFEKRTADGSEFESPKKKAKVE

SEQ ID NO: 1063 - protein, 2094 aa, synthetic construct
MPAAKRVKLDGGDKKYSIGLDIGTNSVGWAVITDEYKVPSKKFKVLGNTDRHSIKKNLIGALLFDSGETAEATRLKRTARRRYTRRKNRICYLQEIFSNEMAKVDDSFFHRLEESFLVEEDKKHERHPIFGNIVDEVAYHEKYPTIYHLRKKLVDSTDKADLRLIYLALAHMIKFRGHFLIEGDLNPDNSDVDKLFIQLVQTYNQLFEENPINASGVDAKAILSARLSKSRRLENLIAQLPGEKKNGLFGNLIALSLGLTPNFKSNFDLAEDAKLQLSKDTYDDDLDNLLAQIGDQYADLFLAAKNLSDAILLSDILRVNTEITKAPLSASMIKRYDEHHQDLTLLKALVRQQLPEKYKEIFFDQSKNGYAGYIDGGASQEEFYKFIKPILEKMDGTEELLVKLNREDLLRKQRTFDNGSIPHQIHLGELHAILRRQEDFYPFLKDNREKIEKILTFRIPYYVGPLARGNSRFAWMTRKSEETITPWNFEEVVDKGASAQSFIERMTNFDKNLPNEKVLPKHSLLYEYFTVYNELTKVKYVTEGMRKPAFLSGEQKKAIVDLLFKTNRKVTVKQLKEDYFKKIECFDSVEISGVEDRFNASLGTYHDLLKIIKDKDFLDNEENEDILEDIVLTLTLFEDREMIEERLKTYAHLFDDKVMKQLKRRRYTGWGRLSRKLINGIRDKQSGKTILDFLKSDGFANRNFMQLIHDDSLTFKEDIQKAQVSGQGDSLHEHIANLAGSPAIKKGILQTVKVVDELVKVMGRHKPENIVIEMARENQTTQKGQKNSRERMKRIEEGIKELGSQILKEHPVENTQLQNEKLYLYYLQNGRDMYVDQELDINRLSDYDVDHIVPQSFLKDDSIDNKVLTRSDKARGKSDNVPSEEVVKKMKNYWRQLLNAKLITQRKFDNLTKAERGGLSELDKAGFIKRQLVETRQITKHVAQILDSRMNTKYDENDKLIREVKVITLKSKLVSDFRKDFQFYKVREINNYHHAHDAYLNAVVGTALIKKYPKLESEFVYGDYKVYDVRKMIAKSEQEIGKATAKYFFYSNIMNFFKTEITLANGEIRKRPLIETNGETGEIVWDKGRDFATVRKVLSMPQVNIVKKTEVQTGGFSKESILPKRNSDKLIARKKDWDPKKYGGFDSPTVAYSVLVVAKVEKGKSKKLKSVKELLGITIMERSSFEKNPIDFLEAKGYKEVKKDLIIKLPKYSLFELENGRKRMLASAGELQKGNELALPSKYVNFLYLASHYEKLKGSPEDNEQKQLFVEQHKHYLDEIIEQISEFSKRVILADANLDKVLSAYNKHRDKPIREQAENIIHLFTLTNLGAPAAFKYFDTTIDRKRYTSTKEVLDATLIHQSITGLYETRIDLSQLGGDGGGGSGSSPAPGGTLNIEDEYRLHETSKEPDVPLGSTWLSDFPQAWAETGGMGLAVRQAPLIIPLKATSTPVSIKQYPMSQEARLGIKPHIQRLLDQGILVPCQSPWNTPLLPVKKPGTNDYRPVQDLREVNKRVEDIHPTVPNPYNLLSGLPPSHQWYTVLDLKDAFFCLRLHPTSQPLFAFEWRDPEMGISGQLTWTRLPQGFKNSPTLFNEALHRDLADFRIQHPDLILLQYVDDLLLAATSEQDCQRGTRALLQTLGNLGYRASAKKAQICQKQVKYLGYLLKEGQRWLTEARKETVMGQPTPKTPRQLREFLGKAGFCRLFIPGFAEMAAPLYPLTKPGTLFNWGPDQQKAYQEIKQALLTAPALGLPDLTKPFELFVDEKQGYAKGVLTQKLGPWRRPVAYLSKKLDPVAAGWPPCLRMVAAIAVLTKDAGKLTMGQPLVILAPHAVEALVKQPPDRWLSNARMTHYQAMLLDTDRVQFGPVVALNPATLLPLPEKEAPHDCLEILAETHGTRPDLTDQPIPDADYTWYTDGSSFLQEGQRRAGAAVTTETEVIWARALPAGTSAQRAELIALTQALKMAEGKKLNVYTDSRYAFATAHVHGEIYRRRGWLTSEGREIKNKNEILALLKALFLPKRLSIIHCPGHQKGNSAEARGNRMADQAAREAAMKAVLETSTLLAGKRTADGSEFEKRTADGSEFESPKKKAKVE

SEQ ID NO: 1064 - protein, 2096 aa, synthetic construct
MPAAKRVKLDGGDKKYSIGLDIGTNSVGWAVITDEYKVPSKKFKVLGNTDRHSIKKNLIGALLFDSGETAEATRLKRTARRRYTRRKNRICYLQEIFSNEMAKVDDSFFHRLEESFLVEEDKKHERHPIFGNIVDEVAYHEKYPTIYHLRKKLVDSTDKADLRLIYLALAHMIKFRGHFLIEGDLNPDNSDVDKLFIQLVQTYNQLFEENPINASGVDAKAILSARLSKSRRLENLIAQLPGEKKNGLFGNLIALSLGLTPNFKSNFDLAEDAKLQLSKDTYDDDLDNLLAQIGDQYADLFLAAKNLSDAILLSDILRVNTEITKAPLSASMIKRYDEHHQDLTLLKALVRQQLPEKYKEIFFDQSKNGYAGYIDGGASQEEFYKFIKPILEKMDGTEELLVKLNREDLLRKQRTFDNGSIPHQIHLGELHAILRRQEDFYPFLKDNREKIEKILTFRIPYYVGPLARGNSRFAWMTRKSEETITPWNFEEVVDKGASAQSFIERMTNFDKNLPNEKVLPKHSLLYEYFTVYNELTKVKYVTEGMRKPAFLSGEQKKAIVDLLFKTNRKVTVKQLKEDYFKKIECFDSVEISGVEDRFNASLGTYHDLLKIIKDKDFLDNEENEDILEDIVLTLTLFEDREMIEERLKTYAHLFDDKVMKQLKRRRYTGWGRLSRKLINGIRDKQSGKTILDFLKSDGFANRNFMQLIHDDSLTFKEDIQKAQVSGQGDSLHEHIANLAGSPAIKKGILQTVKVVDELVKVMGRHKPENIVIEMARENQTTQKGQKNSRERMKRIEEGIKELGSQILKEHPVENTQLQNEKLYLYYLQNGRDMYVDQELDINRLSDYDVDHIVPQSFLKDDSIDNKVLTRSDKARGKSDNVPSEEVVKKMKNYWRQLLNAKLITQRKFDNLTKAERGGLSELDKAGFIKRQLVETRQITKHVAQILDSRMNTKYDENDKLIREVKVITLKSKLVSDFRKDFQFYKVREINNYHHAHDAYLNAVVGTALIKKYPKLESEFVYGDYKVYDVRKMIAKSEQEIGKATAKYFFYSNIMNFFKTEITLANGEIRKRPLIETNGETGEIVWDKGRDFATVRKVLSMPQVNIVKKTEVQTGGFSKESILPKRNSDKLIARKKDWDPKKYGGFDSPTVAYSVLVVAKVEKGKSKKLKSVKELLGITIMERSSFEKNPIDFLEAKGYKEVKKDLIIKLPKYSLFELENGRKRMLASAGELQKGNELALPSKYVNFLYLASHYEKLKGSPEDNEQKQLFVEQHKHYLDEIIEQISEFSKRVILADANLDKVLSAYNKHRDKPIREQAENIIHLFTLTNLGAPAAFKYFDTTIDRKRYTSTKEVLDATLIHQSITGLYETRIDLSQLGGDGGEAAAKPAPGSSGGTLNIEDEYRLHETSKEPDVPLGSTWLSDFPQAWAETGGMGLAVRQAPLIIPLKATSTPVSIKQYPMSQEARLGIKPHIQRLLDQGILVPCQSPWNTPLLPVKKPGTNDYRPVQDLREVNKRVEDIHPTVPNPYNLLSGLPPSHQWYTVLDLKDAFFCLRLHPTSQPLFAFEWRDPEMGISGQLTWTRLPQGFKNSPTLFNEALHRDLADFRIQHPDLILLQYVDDLLLAATSEQDCQRGTRALLQTLGNLGYRASAKKAQICQKQVKYLGYLLKEGQRWLTEARKETVMGQPTPKTPRQLREFLGKAGFCRLFIPGFAEMAAPLYPLTKPGTLFNWGPDQQKAYQEIKQALLTAPALGLPDLTKPFELFVDEKQGYAKGVLTQKLGPWRRPVAYLSKKLDPVAAGWPPCLRMVAAIAVLTKDAGKLTMGQPLVILAPHAVEALVKQPPDRWLSNARMTHYQAMLLDTDRVQFGPVVALNPATLLPLPEKEAPHDCLEILAETHGTRPDLTDQPIPDADYTWYTDGSSFLQEGQRRAGAAVTTETEVIWARALPAGTSAQRAELIALTQALKMAEGKKLNVYTDSRYAFATAHVHGEIYRRRGWLTSEGREIKNKNEILALLKALFLPKRLSIIHCPGHQKGNSAEARGNRMADQAAREAAMKAVLETSTLLAGKRTADGSEFEKRTADGSEFESPKKKAKVE

SEQ ID NO: 1065 - protein, 2094 aa, synthetic construct
MPAAKRVKLDGGDKKYSIGLDIGTNSVGWAVITDEYKVPSKKFKVLGNTDRHSIKKNLIGALLFDSGETAEATRLKRTARRRYTRRKNRICYLQEIFSNEMAKVDDSFFHRLEESFLVEEDKKHERHPIFGNIVDEVAYHEKYPTIYHLRKKLVDSTDKADLRLIYLALAHMIKFRGHFLIEGDLNPDNSDVDKLFIQLVQTYNQLFEENPINASGVDAKAILSARLSKSRRLENLIAQLPGEKKNGLFGNLIALSLGLTPNFKSNFDLAEDAKLQLSKDTYDDDLDNLLAQIGDQYADLFLAAKNLSDAILLSDILRVNTEITKAPLSASMIKRYDEHHQDLTLLKALVRQQLPEKYKEIFFDQSKNGYAGYIDGGASQEEFYKFIKPILEKMDGTEELLVKLNREDLLRKQRTFDNGSIPHQIHLGELHAILRRQEDFYPFLKDNREKIEKILTFRIPYYVGPLARGNSRFAWMTRKSEETITPWNFEEVVDKGASAQSFIERMTNFDKNLPNEKVLPKHSLLYEYFTVYNELTKVKYVTEGMRKPAFLSGEQKKAIVDLLFKTNRKVTVKQLKEDYFKKIECFDSVEISGVEDRFNASLGTYHDLLKIIKDKDFLDNEENEDILEDIVLTLTLFEDREMIEERLKTYAHLFDDKVMKQLKRRRYTGWGRLSRKLINGIRDKQSGKTILDFLKSDGFANRNFMQLIHDDSLTFKEDIQKAQVSGQGDSLHEHIANLAGSPAIKKGILQTVKVVDELVKVMGRHKPENIVIEMARENQTTQKGQKNSRERMKRIEEGIKELGSQILKEHPVENTQLQNEKLYLYYLQNGRDMYVDQELDINRLSDYDVDHIVPQSFLKDDSIDNKVLTRSDKARGKSDNVPSEEVVKKMKNYWRQLLNAKLITQRKFDNLTKAERGGLSELDKAGFIKRQLVETRQITKHVAQILDSRMNTKYDENDKLIREVKVITLKSKLVSDFRKDFQFYKVREINNYHHAHDAYLNAVVGTALIKKYPKLESEFVYGDYKVYDVRKMIAKSEQEIGKATAKYFFYSNIMNFFKTEITLANGEIRKRPLIETNGETGEIVWDKGRDFATVRKVLSMPQVNIVKKTEVQTGGFSKESILPKRNSDKLIARKKDWDPKKYGGFDSPTVAYSVLVVAKVEKGKSKKLKSVKELLGITIMERSSFEKNPIDFLEAKGYKEVKKDLIIKLPKYSLFELENGRKRMLASAGELQKGNELALPSKYVNFLYLASHYEKLKGSPEDNEQKQLFVEQHKHYLDEIIEQISEFSKRVILADANLDKVLSAYNKHRDKPIREQAENIIHLFTLTNLGAPAAFKYFDTTIDRKRYTSTKEVLDATLIHQSITGLYETRIDLSQLGGDGGGGSGGSGGSGGTLNIEDEYRLHETSKEPDVPLGSTWLSDFPQAWAETGGMGLAVRQAPLIIPLKATSTPVSIKQYPMSQEARLGIKPHIQRLLDQGILVPCQSPWNTPLLPVKKPGTNDYRPVQDLREVNKRVEDIHPTVPNPYNLLSGLPPSHQWYTVLDLKDAFFCLRLHPTSQPLFAFEWRDPEMGISGQLTWTRLPQGFKNSPTLFNEALHRDLADFRIQHPDLILLQYVDDLLLAATSEQDCQRGTRALLQTLGNLGYRASAKKAQICQKQVKYLGYLLKEGQRWLTEARKETVMGQPTPKTPRQLREFLGKAGFCRLFIPGFAEMAAPLYPLTKPGTLFNWGPDQQKAYQEIKQALLTAPALGLPDLTKPFELFVDEKQGYAKGVLTQKLGPWRRPVAYLSKKLDPVAAGWPPCLRMVAAIAVLTKDAGKLTMGQPLVILAPHAVEALVKQPPDRWLSNARMTHYQAMLLDTDRVQFGPVVALNPATLLPLPEKEAPHDCLEILAETHGTRPDLTDQPIPDADYTWYTDGSSFLQEGQRRAGAAVTTETEVIWARALPAGTSAQRAELIALTQALKMAEGKKLNVYTDSRYAFATAHVHGEIYRRRGWLTSEGREIKNKNEILALLKALFLPKRLSIIHCPGHQKGNSAEARGNRMADQAAREAAMKAVLETSTLLAGKRTADGSEFEKRTADGSEFESPKKKAKVE

SEQ ID NO: 1066 - protein, 2096 aa, synthetic construct
MPAAKRVKLDGGDKKYSIGLDIGTNSVGWAVITDEYKVPSKKFKVLGNTDRHSIKKNLIGALLFDSGETAEATRLKRTARRRYTRRKNRICYLQEIFSNEMAKVDDSFFHRLEESFLVEEDKKHERHPIFGNIVDEVAYHEKYPTIYHLRKKLVDSTDKADLRLIYLALAHMIKFRGHFLIEGDLNPDNSDVDKLFIQLVQTYNQLFEENPINASGVDAKAILSARLSKSRRLENLIAQLPGEKKNGLFGNLIALSLGLTPNFKSNFDLAEDAKLQLSKDTYDDDLDNLLAQIGDQYADLFLAAKNLSDAILLSDILRVNTEITKAPLSASMIKRYDEHHQDLTLLKALVRQQLPEKYKEIFFDQSKNGYAGYIDGGASQEEFYKFIKPILEKMDGTEELLVKLNREDLLRKQRTFDNGSIPHQIHLGELHAILRRQEDFYPFLKDNREKIEKILTFRIPYYVGPLARGNSRFAWMTRKSEETITPWNFEEVVDKGASAQSFIERMTNFDKNLPNEKVLPKHSLLYEYFTVYNELTKVKYVTEGMRKPAFLSGEQKKAIVDLLFKTNRKVTVKQLKEDYFKKIECFDSVEISGVEDRFNASLGTYHDLLKIIKDKDFLDNEENEDILEDIVLTLTLFEDREMIEERLKTYAHLFDDKVMKQLKRRRYTGWGRLSRKLINGIRDKQSGKTILDFLKSDGFANRNFMQLIHDDSLTFKEDIQKAQVSGQGDSLHEHIANLAGSPAIKKGILQTVKVVDELVKVMGRHKPENIVIEMARENQTTQKGQKNSRERMKRIEEGIKELGSQILKEHPVENTQLQNEKLYLYYLQNGRDMYVDQELDINRLSDYDVDHIVPQSFLKDDSIDNKVLTRSDKARGKSDNVPSEEVVKKMKNYWRQLLNAKLITQRKFDNLTKAERGGLSELDKAGFIKRQLVETRQITKHVAQILDSRMNTKYDENDKLIREVKVITLKSKLVSDFRKDFQFYKVREINNYHHAHDAYLNAVVGTALIKKYPKLESEFVYGDYKVYDVRKMIAKSEQEIGKATAKYFFYSNIMNFFKTEITLANGEIRKRPLIETNGETGEIVWDKGRDFATVRKVLSMPQVNIVKKTEVQTGGFSKESILPKRNSDKLIARKKDWDPKKYGGFDSPTVAYSVLVVAKVEKGKSKKLKSVKELLGITIMERSSFEKNPIDFLEAKGYKEVKKDLIIKLPKYSLFELENGRKRMLASAGELQKGNELALPSKYVNFLYLASHYEKLKGSPEDNEQKQLFVEQHKHYLDEIIEQISEFSKRVILADANLDKVLSAYNKHRDKPIREQAENIIHLFTLTNLGAPAAFKYFDTTIDRKRYTSTKEVLDATLIHQSITGLYETRIDLSQLGGDGGPAPEAAAKGGSGGTLNIEDEYRLHETSKEPDVPLGSTWLSDFPQAWAETGGMGLAVRQAPLIIPLKATSTPVSIKQYPMSQEARLGIKPHIQRLLDQGILVPCQSPWNTPLLPVKKPGTNDYRPVQDLREVNKRVEDIHPTVPNPYNLLSGLPPSHQWYTVLDLKDAFFCLRLHPTSQPLFAFEWRDPEMGISGQLTWTRLPQGFKNSPTLFNEALHRDLADFRIQHPDLILLQYVDDLLLAATSEQDCQRGTRALLQTLGNLGYRASAKKAQICQKQVKYLGYLLKEGQRWLTEARKETVMGQPTPKTPRQLREFLGKAGFCRLFIPGFAEMAAPLYPLTKPGTLFNWGPDQQKAYQEIKQALLTAPALGLPDLTKPFELFVDEKQGYAKGVLTQKLGPWRRPVAYLSKKLDPVAAGWPPCLRMVAAIAVLTKDAGKLTMGQPLVILAPHAVEALVKQPPDRWLSNARMTHYQAMLLDTDRVQFGPVVALNPATLLPLPEKEAPHDCLEILAETHGTRPDLTDQPIPDADYTWYTDGSSFLQEGQRRAGAAVTTETEVIWARALPAGTSAQRAELIALTQALKMAEGKKLNVYTDSRYAFATAHVHGEIYRRRGWLTSEGREIKNKNEILALLKALFLPKRLSIIHCPGHQKGNSAEARGNRMADQAAREAAMKAVLETSTLLAGKRTADGSEFEKRTADGSEFESPKKKAKVE

SEQ ID NO: 1067 - protein, 2103 aa, synthetic construct
MPAAKRVKLDGGDKKYSIGLDIGTNSVGWAVITDEYKVPSKKFKVLGNTDRHSIKKNLIGALLFDSGETAEATRLKRTARRRYTRRKNRICYLQEIFSNEMAKVDDSFFHRLEESFLVEEDKKHERHPIFGNIVDEVAYHEKYPTIYHLRKKLVDSTDKADLRLIYLALAHMIKFRGHFLIEGDLNPDNSDVDKLFIQLVQTYNQLFEENPINASGVDAKAILSARLSKSRRLENLIAQLPGEKKNGLFGNLIALSLGLTPNFKSNFDLAEDAKLQLSKDTYDDDLDNLLAQIGDQYADLFLAAKNLSDAILLSDILRVNTEITKAPLSASMIKRYDEHHQDLTLLKALVRQQLPEKYKEIFFDQSKNGYAGYIDGGASQEEFYKFIKPILEKMDGTEELLVKLNREDLLRKQRTFDNGSIPHQIHLGELHAILRRQEDFYPFLKDNREKIEKILTFRIPYYVGPLARGNSRFAWMTRKSEETITPWNFEEVVDKGASAQSFIERMTNFDKNLPNEKVLPKHSLLYEYFTVYNELTKVKYVTEGMRKPAFLSGEQKKAIVDLLFKTNRKVTVKQLKEDYFKKIECFDSVEISGVEDRFNASLGTYHDLLKIIKDKDFLDNEENEDILEDIVLTLTLFEDREMIEERLKTYAHLFDDKVMKQLKRRRYTGWGRLSRKLINGIRDKQSGKTILDFLKSDGFANRNFMQLIHDDSLTFKEDIQKAQVSGQGDSLHEHIANLAGSPAIKKGILQTVKVVDELVKVMGRHKPENIVIEMARENQTTQKGQKNSRERMKRIEEGIKELGSQILKEHPVENTQLQNEKLYLYYLQNGRDMYVDQELDINRLSDYDVDHIVPQSFLKDDSIDNKVLTRSDKARGKSDNVPSEEVVKKMKNYWRQLLNAKLITQRKFDNLTKAERGGLSELDKAGFIKRQLVETRQITKHVAQILDSRMNTKYDENDKLIREVKVITLKSKLVSDFRKDFQFYKVREINNYHHAHDAYLNAVVGTALIKKYPKLESEFVYGDYKVYDVRKMIAKSEQEIGKATAKYFFYSNIMNFFKTEITLANGEIRKRPLIETNGETGEIVWDKGRDFATVRKVLSMPQVNIVKKTEVQTGGFSKESILPKRNSDKLIARKKDWDPKKYGGFDSPTVAYSVLVVAKVEKGKSKKLKSVKELLGITIMERSSFEKNPIDFLEAKGYKEVKKDLIIKLPKYSLFELENGRKRMLASAGELQKGNELALPSKYVNFLYLASHYEKLKGSPEDNEQKQLFVEQHKHYLDEIIEQISEFSKRVILADANLDKVLSAYNKHRDKPIREQAENIIHLFTLTNLGAPAAFKYFDTTIDRKRYTSTKEVLDATLIHQSITGLYETRIDLSQLGGDGGGSSGSSGSSGSSGSSGSSGGTLNIEDEYRLHETSKEPDVPLGSTWLSDFPQAWAETGGMGLAVRQAPLIIPLKATSTPVSIKQYPMSQEARLGIKPHIQRLLDQGILVPCQSPWNTPLLPVKKPGTNDYRPVQDLREVNKRVEDIHPTVPNPYNLLSGLPPSHQWYTVLDLKDAFFCLRLHPTSQPLFAFEWRDPEMGISGQLTWTRLPQGFKNSPTLFNEALHRDLADFRIQHPDLILLQYVDDLLLAATSEQDCQRGTRALLQTLGNLGYRASAKKAQICQKQVKYLGYLLKEGQRWLTEARKETVMGQPTPKTPRQLREFLGKAGFCRLFIPGFAEMAAPLYPLTKPGTLFNWGPDQQKAYQEIKQALLTAPALGLPDLTKPFELFVDEKQGYAKGVLTQKLGPWRRPVAYLSKKLDPVAAGWPPCLRMVAAIAVLTKDAGKLTMGQPLVILAPHAVEALVKQPPDRWLSNARMTHYQAMLLDTDRVQFGPVVALNPATLLPLPEKEAPHDCLEILAETHGTRPDLTDQPIPDADYTWYTDGSSFLQEGQRRAGAAVTTETEVIWARALPAGTSAQRAELIALTQALKMAEGKKLNVYTDSRYAFATAHVHGEIYRRRGWLTSEGREIKNKNEILALLKALFLPKRLSIIHCPGHQKGNSAEARGNRMADQAAREAAMKAVLETSTLLAGKRTADGSEFEKRTADGSEFESPKKKAKVE

SEQ ID NO: 1068 - protein, 2096 aa, synthetic construct
MPAAKRVKLDGGDKKYSIGLDIGTNSVGWAVITDEYKVPSKKFKVLGNTDRHSIKKNLIGALLFDSGETAEATRLKRTARRRYTRRKNRICYLQEIFSNEMAKVDDSFFHRLEESFLVEEDKKHERHPIFGNIVDEVAYHEKYPTIYHLRKKLVDSTDKADLRLIYLALAHMIKFRGHFLIEGDLNPDNSDVDKLFIQLVQTYNQLFEENPINASGVDAKAILSARLSKSRRLENLIAQLPGEKKNGLFGNLIALSLGLTPNFKSNFDLAEDAKLQLSKDTYDDDLDNLLAQIGDQYADLFLAAKNLSDAILLSDILRVNTEITKAPLSASMIKRYDEHHQDLTLLKALVRQQLPEKYKEIFFDQSKNGYAGYIDGGASQEEFYKFIKPILEKMDGTEELLVKLNREDLLRKQRTFDNGSIPHQIHLGELHAILRRQEDFYPFLKDNREKIEKILTFRIPYYVGPLARGNSRFAWMTRKSEETITPWNFEEVVDKGASAQSFIERMTNFDKNLPNEKVLPKHSLLYEYFTVYNELTKVKYVTEGMRKPAFLSGEQKKAIVDLLFKTNRKVTVKQLKEDYFKKIECFDSVEISGVEDRFNASLGTYHDLLKIIKDKDFLDNEENEDILEDIVLTLTLFEDREMIEERLKTYAHLFDDKVMKQLKRRRYTGWGRLSRKLINGIRDKQSGKTILDFLKSDGFANRNFMQLIHDDSLTFKEDIQKAQVSGQGDSLHEHIANLAGSPAIKKGILQTVKVVDELVKVMGRHKPENIVIEMARENQTTQKGQKNSRERMKRIEEGIKELGSQILKEHPVENTQLQNEKLYLYYLQNGRDMYVDQELDINRLSDYDVDHIVPQSFLKDDSIDNKVLTRSDKARGKSDNVPSEEVVKKMKNYWRQLLNAKLITQRKFDNLTKAERGGLSELDKAGFIKRQLVETRQITKHVAQILDSRMNTKYDENDKLIREVKVITLKSKLVSDFRKDFQFYKVREINNYHHAHDAYLNAVVGTALIKKYPKLESEFVYGDYKVYDVRKMIAKSEQEIGKATAKYFFYSNIMNFFKTEITLANGEIRKRPLIETNGETGEIVWDKGRDFATVRKVLSMPQVNIVKKTEVQTGGFSKESILPKRNSDKLIARKKDWDPKKYGGFDSPTVAYSVLVVAKVEKGKSKKLKSVKELLGITIMERSSFEKNPIDFLEAKGYKEVKKDLIIKLPKYSLFELENGRKRMLASAGELQKGNELALPSKYVNFLYLASHYEKLKGSPEDNEQKQLFVEQHKHYLDEIIEQISEFSKRVILADANLDKVLSAYNKHRDKPIREQAENIIHLFTLTNLGAPAAFKYFDTTIDRKRYTSTKEVLDATLIHQSITGLYETRIDLSQLGGDGGEAAAKGSSGGSGGTLNIEDEYRLHETSKEPDVPLGSTWLSDFPQAWAETGGMGLAVRQAPLIIPLKATSTPVSIKQYPMSQEARLGIKPHIQRLLDQGILVPCQSPWNTPLLPVKKPGTNDYRPVQDLREVNKRVEDIHPTVPNPYNLLSGLPPSHQWYTVLDLKDAFFCLRLHPTSQPLFAFEWRDPEMGISGQLTWTRLPQGFKNSPTLFNEALHRDLADFRIQHPDLILLQYVDDLLLAATSEQDCQRGTRALLQTLGNLGYRASAKKAQICQKQVKYLGYLLKEGQRWLTEARKETVMGQPTPKTPRQLREFLGKAGFCRLFIPGFAEMAAPLYPLTKPGTLFNWGPDQQKAYQEIKQALLTAPALGLPDLTKPFELFVDEKQGYAKGVLTQKLGPWRRPVAYLSKKLDPVAAGWPPCLRMVAAIAVLTKDAGKLTMGQPLVILAPHAVEALVKQPPDRWLSNARMTHYQAMLLDTDRVQFGPVVALNPATLLPLPEKEAPHDCLEILAETHGTRPDLTDQPIPDADYTWYTDGSSFLQEGQRRAGAAVTTETEVIWARALPAGTSAQRAELIALTQALKMAEGKKLNVYTDSRYAFATAHVHGEIYRRRGWLTSEGREIKNKNEILALLKALFLPKRLSIIHCPGHQKGNSAEARGNRMADQAAREAAMKAVLETSTLLAGKRTADGSEFEKRTADGSEFESPKKKAKVE

SEQ ID NO: 1069 - protein, 2096 aa, synthetic construct
MPAAKRVKLDGGDKKYSIGLDIGTNSVGWAVITDEYKVPSKKFKVLGNTDRHSIKKNLIGALLFDSGETAEATRLKRTARRRYTRRKNRICYLQEIFSNEMAKVDDSFFHRLEESFLVEEDKKHERHPIFGNIVDEVAYHEKYPTIYHLRKKLVDSTDKADLRLIYLALAHMIKFRGHFLIEGDLNPDNSDVDKLFIQLVQTYNQLFEENPINASGVDAKAILSARLSKSRRLENLIAQLPGEKKNGLFGNLIALSLGLTPNFKSNFDLAEDAKLQLSKDTYDDDLDNLLAQIGDQYADLFLAAKNLSDAILLSDILRVNTEITKAPLSASMIKRYDEHHQDLTLLKALVRQQLPEKYKEIFFDQSKNGYAGYIDGGASQEEFYKFIKPILEKMDGTEELLVKLNREDLLRKQRTFDNGSIPHQIHLGELHAILRRQEDFYPFLKDNREKIEKILTFRIPYYVGPLARGNSRFAWMTRKSEETITPWNFEEVVDKGASAQSFIERMTNFDKNLPNEKVLPKHSLLYEYFTVYNELTKVKYVTEGMRKPAFLSGEQKKAIVDLLFKTNRKVTVKQLKEDYFKKIECFDSVEISGVEDRFNASLGTYHDLLKIIKDKDFLDNEENEDILEDIVLTLTLFEDREMIEERLKTYAHLFDDKVMKQLKRRRYTGWGRLSRKLINGIRDKQSGKTILDFLKSDGFANRNFMQLIHDDSLTFKEDIQKAQVSGQGDSLHEHIANLAGSPAIKKGILQTVKVVDELVKVMGRHKPENIVIEMARENQTTQKGQKNSRERMKRIEEGIKELGSQILKEHPVENTQLQNEKLYLYYLQNGRDMYVDQELDINRLSDYDVDHIVPQSFLKDDSIDNKVLTRSDKARGKSDNVPSEEVVKKMKNYWRQLLNAKLITQRKFDNLTKAERGGLSELDKAGFIKRQLVETRQITKHVAQILDSRMNTKYDENDKLIREVKVITLKSKLVSDFRKDFQFYKVREINNYHHAHDAYLNAVVGTALIKKYPKLESEFVYGDYKVYDVRKMIAKSEQEIGKATAKYFFYSNIMNFFKTEITLANGEIRKRPLIETNGETGEIVWDKGRDFATVRKVLSMPQVNIVKKTEVQTGGFSKESILPKRNSDKLIARKKDWDPKKYGGFDSPTVAYSVLVVAKVEKGKSKKLKSVKELLGITIMERSSFEKNPIDFLEAKGYKEVKKDLIIKLPKYSLFELENGRKRMLASAGELQKGNELALPSKYVNFLYLASHYEKLKGSPEDNEQKQLFVEQHKHYLDEIIEQISEFSKRVILADANLDKVLSAYNKHRDKPIREQAENIIHLFTLTNLGAPAAFKYFDTTIDRKRYTSTKEVLDATLIHQSITGLYETRIDLSQLGGDGGPAPAPAPAPAPGGTLNIEDEYRLHETSKEPDVPLGSTWLSDFPQAWAETGGMGLAVRQAPLIIPLKATSTPVSIKQYPMSQEARLGIKPHIQRLLDQGILVPCQSPWNTPLLPVKKPGTNDYRPVQDLREVNKRVEDIHPTVPNPYNLLSGLPPSHQWYTVLDLKDAFFCLRLHPTSQPLFAFEWRDPEMGISGQLTWTRLPQGFKNSPTLFNEALHRDLADFRIQHPDLILLQYVDDLLLAATSEQDCQRGTRALLQTLGNLGYRASAKKAQICQKQVKYLGYLLKEGQRWLTEARKETVMGQPTPKTPRQLREFLGKAGFCRLFIPGFAEMAAPLYPLTKPGTLFNWGPDQQKAYQEIKQALLTAPALGLPDLTKPFELFVDEKQGYAKGVLTQKLGPWRRPVAYLSKKLDPVAAGWPPCLRMVAAIAVLTKDAGKLTMGQPLVILAPHAVEALVKQPPDRWLSNARMTHYQAMLLDTDRVQFGPVVALNPATLLPLPEKEAPHDCLEILAETHGTRPDLTDQPIPDADYTWYTDGSSFLQEGQRRAGAAVTTETEVIWARALPAGTSAQRAELIALTQALKMAEGKKLNVYTDSRYAFATAHVHGEIYRRRGWLTSEGREIKNKNEILALLKALFLPKRLSIIHCPGHQKGNSAEARGNRMADQAAREAAMKAVLETSTLLAGKRTADGSEFEKRTADGSEFESPKKKAKVE

SEQ ID NO: 1070 - protein, 2091 aa, synthetic construct
MPAAKRVKLDGGDKKYSIGLDIGTNSVGWAVITDEYKVPSKKFKVLGNTDRHSIKKNLIGALLFDSGETAEATRLKRTARRRYTRRKNRICYLQEIFSNEMAKVDDSFFHRLEESFLVEEDKKHERHPIFGNIVDEVAYHEKYPTIYHLRKKLVDSTDKADLRLIYLALAHMIKFRGHFLIEGDLNPDNSDVDKLFIQLVQTYNQLFEENPINASGVDAKAILSARLSKSRRLENLIAQLPGEKKNGLFGNLIALSLGLTPNFKSNFDLAEDAKLQLSKDTYDDDLDNLLAQIGDQYADLFLAAKNLSDAILLSDILRVNTEITKAPLSASMIKRYDEHHQDLTLLKALVRQQLPEKYKEIFFDQSKNGYAGYIDGGASQEEFYKFIKPILEKMDGTEELLVKLNREDLLRKQRTFDNGSIPHQIHLGELHAILRRQEDFYPFLKDNREKIEKILTFRIPYYVGPLARGNSRFAWMTRKSEETITPWNFEEVVDKGASAQSFIERMTNFDKNLPNEKVLPKHSLLYEYFTVYNELTKVKYVTEGMRKPAFLSGEQKKAIVDLLFKTNRKVTVKQLKEDYFKKIECFDSVEISGVEDRFNASLGTYHDLLKIIKDKDFLDNEENEDILEDIVLTLTLFEDREMIEERLKTYAHLFDDKVMKQLKRRRYTGWGRLSRKLINGIRDKQSGKTILDFLKSDGFANRNFMQLIHDDSLTFKEDIQKAQVSGQGDSLHEHIANLAGSPAIKKGILQTVKVVDELVKVMGRHKPENIVIEMARENQTTQKGQKNSRERMKRIEEGIKELGSQILKEHPVENTQLQNEKLYLYYLQNGRDMYVDQELDINRLSDYDVDHIVPQSFLKDDSIDNKVLTRSDKARGKSDNVPSEEVVKKMKNYWRQLLNAKLITQRKFDNLTKAERGGLSELDKAGFIKRQLVETRQITKHVAQILDSRMNTKYDENDKLIREVKVITLKSKLVSDFRKDFQFYKVREINNYHHAHDAYLNAVVGTALIKKYPKLESEFVYGDYKVYDVRKMIAKSEQEIGKATAKYFFYSNIMNFFKTEITLANGEIRKRPLIETNGETGEIVWDKGRDFATVRKVLSMPQVNIVKKTEVQTGGFSKESILPKRNSDKLIARKKDWDPKKYGGFDSPTVAYSVLVVAKVEKGKSKKLKSVKELLGITIMERSSFEKNPIDFLEAKGYKEVKKDLIIKLPKYSLFELENGRKRMLASAGELQKGNELALPSKYVNFLYLASHYEKLKGSPEDNEQKQLFVEQHKHYLDEIIEQISEFSKRVILADANLDKVLSAYNKHRDKPIREQAENIIHLFTLTNLGAPAAFKYFDTTIDRKRYTSTKEVLDATLIHQSITGLYETRIDLSQLGGDGGGSSGGGGGTLNIEDEYRLHETSKEPDVPLGSTWLSDFPQAWAETGGMGLAVRQAPLIIPLKATSTPVSIKQYPMSQEARLGIKPHIQRLLDQGILVPCQSPWNTPLLPVKKPGTNDYRPVQDLREVNKRVEDIHPTVPNPYNLLSGLPPSHQWYTVLDLKDAFFCLRLHPTSQPLFAFEWRDPEMGISGQLTWTRLPQGFKNSPTLFNEALHRDLADFRIQHPDLILLQYVDDLLLAATSEQDCQRGTRALLQTLGNLGYRASAKKAQICQKQVKYLGYLLKEGQRWLTEARKETVMGQPTPKTPRQLREFLGKAGFCRLFIPGFAEMAAPLYPLTKPGTLFNWGPDQQKAYQEIKQALLTAPALGLPDLTKPFELFVDEKQGYAKGVLTQKLGPWRRPVAYLSKKLDPVAAGWPPCLRMVAAIAVLTKDAGKLTMGQPLVILAPHAVEALVKQPPDRWLSNARMTHYQAMLLDTDRVQFGPVVALNPATLLPLPEKEAPHDCLEILAETHGTRPDLTDQPIPDADYTWYTDGSSFLQEGQRRAGAAVTTETEVIWARALPAGTSAQRAELIALTQALKMAEGKKLNVYTDSRYAFATAHVHGEIYRRRGWLTSEGREIKNKNEILALLKALFLPKRLSIIHCPGHQKGNSAEARGNRMADQAAREAAMKAVLETSTLLAGKRTADGSEFEKRTADGSEFESPKKKAKVE

SEQ ID NO: 1071 - protein, 2094 aa, synthetic construct
MPAAKRVKLDGGDKKYSIGLDIGTNSVGWAVITDEYKVPSKKFKVLGNTDRHSIKKNLIGALLFDSGETAEATRLKRTARRRYTRRKNRICYLQEIFSNEMAKVDDSFFHRLEESFLVEEDKKHERHPIFGNIVDEVAYHEKYPTIYHLRKKLVDSTDKADLRLIYLALAHMIKFRGHFLIEGDLNPDNSDVDKLFIQLVQTYNQLFEENPINASGVDAKAILSARLSKSRRLENLIAQLPGEKKNGLFGNLIALSLGLTPNFKSNFDLAEDAKLQLSKDTYDDDLDNLLAQIGDQYADLFLAAKNLSDAILLSDILRVNTEITKAPLSASMIKRYDEHHQDLTLLKALVRQQLPEKYKEIFFDQSKNGYAGYIDGGASQEEFYKFIKPILEKMDGTEELLVKLNREDLLRKQRTFDNGSIPHQIHLGELHAILRRQEDFYPFLKDNREKIEKILTFRIPYYVGPLARGNSRFAWMTRKSEETITPWNFEEVVDKGASAQSFIERMTNFDKNLPNEKVLPKHSLLYEYFTVYNELTKVKYVTEGMRKPAFLSGEQKKAIVDLLFKTNRKVTVKQLKEDYFKKIECFDSVEISGVEDRFNASLGTYHDLLKIIKDKDFLDNEENEDILEDIVLTLTLFEDREMIEERLKTYAHLFDDKVMKQLKRRRYTGWGRLSRKLINGIRDKQSGKTILDFLKSDGFANRNFMQLIHDDSLTFKEDIQKAQVSGQGDSLHEHIANLAGSPAIKKGILQTVKVVDELVKVMGRHKPENIVIEMARENQTTQKGQKNSRERMKRIEEGIKELGSQILKEHPVENTQLQNEKLYLYYLQNGRDMYVDQELDINRLSDYDVDHIVPQSFLKDDSIDNKVLTRSDKARGKSDNVPSEEVVKKMKNYWRQLLNAKLITQRKFDNLTKAERGGLSELDKAGFIKRQLVETRQITKHVAQILDSRMNTKYDENDKLIREVKVITLKSKLVSDFRKDFQFYKVREINNYHHAHDAYLNAVVGTALIKKYPKLESEFVYGDYKVYDVRKMIAKSEQEIGKATAKYFFYSNIMNFFKTEITLANGEIRKRPLIETNGETGEIVWDKGRDFATVRKVLSMPQVNIVKKTEVQTGGFSKESILPKRNSDKLIARKKDWDPKKYGGFDSPTVAYSVLVVAKVEKGKSKKLKSVKELLGITIMERSSFEKNPIDFLEAKGYKEVKKDLIIKLPKYSLFELENGRKRMLASAGELQKGNELALPSKYVNFLYLASHYEKLKGSPEDNEQKQLFVEQHKHYLDEIIEQISEFSKRVILADANLDKVLSAYNKHRDKPIREQAENIIHLFTLTNLGAPAAFKYFDTTIDRKRYTSTKEVLDATLIHQSITGLYETRIDLSQLGGDGGPAPGGSGGGGGTLNIEDEYRLHETSKEPDVPLGSTWLSDFPQAWAETGGMGLAVRQAPLIIPLKATSTPVSIKQYPMSQEARLGIKPHIQRLLDQGILVPCQSPWNTPLLPVKKPGTNDYRPVQDLREVNKRVEDIHPTVPNPYNLLSGLPPSHQWYTVLDLKDAFFCLRLHPTSQPLFAFEWRDPEMGISGQLTWTRLPQGFKNSPTLFNEALHRDLADFRIQHPDLILLQYVDDLLLAATSEQDCQRGTRALLQTLGNLGYRASAKKAQICQKQVKYLGYLLKEGQRWLTEARKETVMGQPTPKTPRQLREFLGKAGFCRLFIPGFAEMAAPLYPLTKPGTLFNWGPDQQKAYQEIKQALLTAPALGLPDLTKPFELFVDEKQGYAKGVLTQKLGPWRRPVAYLSKKLDPVAAGWPPCLRMVAAIAVLTKDAGKLTMGQPLVILAPHAVEALVKQPPDRWLSNARMTHYQAMLLDTDRVQFGPVVALNPATLLPLPEKEAPHDCLEILAETHGTRPDLTDQPIPDADYTWYTDGSSFLQEGQRRAGAAVTTETEVIWARALPAGTSAQRAELIALTQALKMAEGKKLNVYTDSRYAFATAHVHGEIYRRRGWLTSEGREIKNKNEILALLKALFLPKRLSIIHCPGHQKGNSAEARGNRMADQAAREAAMKAVLETSTLLAGKRTADGSEFEKRTADGSEFESPKKKAKVE

SEQ ID NO: 1072 - protein, 2097 aa, synthetic construct
MPAAKRVKLDGGDKKYSIGLDIGTNSVGWAVITDEYKVPSKKFKVLGNTDRHSIKKNLIGALLFDSGETAEATRLKRTARRRYTRRKNRICYLQEIFSNEMAKVDDSFFHRLEESFLVEEDKKHERHPIFGNIVDEVAYHEKYPTIYHLRKKLVDSTDKADLRLIYLALAHMIKFRGHFLIEGDLNPDNSDVDKLFIQLVQTYNQLFEENPINASGVDAKAILSARLSKSRRLENLIAQLPGEKKNGLFGNLIALSLGLTPNFKSNFDLAEDAKLQLSKDTYDDDLDNLLAQIGDQYADLFLAAKNLSDAILLSDILRVNTEITKAPLSASMIKRYDEHHQDLTLLKALVRQQLPEKYKEIFFDQSKNGYAGYIDGGASQEEFYKFIKPILEKMDGTEELLVKLNREDLLRKQRTFDNGSIPHQIHLGELHAILRRQEDFYPFLKDNREKIEKILTFRIPYYVGPLARGNSRFAWMTRKSEETITPWNFEEVVDKGASAQSFIERMTNFDKNLPNEKVLPKHSLLYEYFTVYNELTKVKYVTEGMRKPAFLSGEQKKAIVDLLFKTNRKVTVKQLKEDYFKKIECFDSVEISGVEDRFNASLGTYHDLLKIIKDKDFLDNEENEDILEDIVLTLTLFEDREMIEERLKTYAHLFDDKVMKQLKRRRYTGWGRLSRKLINGIRDKQSGKTILDFLKSDGFANRNFMQLIHDDSLTFKEDIQKAQVSGQGDSLHEHIANLAGSPAIKKGILQTVKVVDELVKVMGRHKPENIVIEMARENQTTQKGQKNSRERMKRIEEGIKELGSQILKEHPVENTQLQNEKLYLYYLQNGRDMYVDQELDINRLSDYDVDHIVPQSFLKDDSIDNKVLTRSDKARGKSDNVPSEEVVKKMKNYWRQLLNAKLITQRKFDNLTKAERGGLSELDKAGFIKRQLVETRQITKHVAQILDSRMNTKYDENDKLIREVKVITLKSKLVSDFRKDFQFYKVREINNYHHAHDAYLNAVVGTALIKKYPKLESEFVYGDYKVYDVRKMIAKSEQEIGKATAKYFFYSNIMNFFKTEITLANGEIRKRPLIETNGETGEIVWDKGRDFATVRKVLSMPQVNIVKKTEVQTGGFSKESILPKRNSDKLIARKKDWDPKKYGGFDSPTVAYSVLVVAKVEKGKSKKLKSVKELLGITIMERSSFEKNPIDFLEAKGYKEVKKDLIIKLPKYSLFELENGRKRMLASAGELQKGNELALPSKYVNFLYLASHYEKLKGSPEDNEQKQLFVEQHKHYLDEIIEQISEFSKRVILADANLDKVLSAYNKHRDKPIREQAENIIHLFTLTNLGAPAAFKYFDTTIDRKRYTSTKEVLDATLIHQSITGLYETRIDLSQLGGDGGGSAGSAAGSGEFGGTLNIEDEYRLHETSKEPDVPLGSTWLSDFPQAWAETGGMGLAVRQAPLIIPLKATSTPVSIKQYPMSQEARLGIKPHIQRLLDQGILVPCQSPWNTPLLPVKKPGTNDYRPVQDLREVNKRVEDIHPTVPNPYNLLSGLPPSHQWYTVLDLKDAFFCLRLHPTSQPLFAFEWRDPEMGISGQLTWTRLPQGFKNSPTLFNEALHRDLADFRIQHPDLILLQYVDDLLLAATSEQDCQRGTRALLQTLGNLGYRASAKKAQICQKQVKYLGYLLKEGQRWLTEARKETVMGQPTPKTPRQLREFLGKAGFCRLFIPGFAEMAAPLYPLTKPGTLFNWGPDQQKAYQEIKQALLTAPALGLPDLTKPFELFVDEKQGYAKGVLTQKLGPWRRPVAYLSKKLDPVAAGWPPCLRMVAAIAVLTKDAGKLTMGQPLVILAPHAVEALVKQPPDRWLSNARMTHYQAMLLDTDRVQFGPVVALNPATLLPLPEKEAPHDCLEILAETHGTRPDLTDQPIPDADYTWYTDGSSFLQEGQRRAGAAVTTETEVIWARALPAGTSAQRAELIALTQALKMAEGKKLNVYTDSRYAFATAHVHGEIYRRRGWLTSEGREIKNKNEILALLKALFLPKRLSIIHCPGHQKGNSAEARGNRMADQAAREAAMKAVLETSTLLAGKRTADGSEFEKRTADGSEFESPKKKAKVE

SEQ ID NO: 1073 - protein, 2094 aa, synthetic construct
MPAAKRVKLDGGDKKYSIGLDIGTNSVGWAVITDEYKVPSKKFKVLGNTDRHSIKKNLIGALLFDSGETAEATRLKRTARRRYTRRKNRICYLQEIFSNEMAKVDDSFFHRLEESFLVEEDKKHERHPIFGNIVDEVAYHEKYPTIYHLRKKLVDSTDKADLRLIYLALAHMIKFRGHFLIEGDLNPDNSDVDKLFIQLVQTYNQLFEENPINASGVDAKAILSARLSKSRRLENLIAQLPGEKKNGLFGNLIALSLGLTPNFKSNFDLAEDAKLQLSKDTYDDDLDNLLAQIGDQYADLFLAAKNLSDAILLSDILRVNTEITKAPLSASMIKRYDEHHQDLTLLKALVRQQLPEKYKEIFFDQSKNGYAGYIDGGASQEEFYKFIKPILEKMDGTEELLVKLNREDLLRKQRTFDNGSIPHQIHLGELHAILRRQEDFYPFLKDNREKIEKILTFRIPYYVGPLARGNSRFAWMTRKSEETITPWNFEEVVDKGASAQSFIERMTNFDKNLPNEKVLPKHSLLYEYFTVYNELTKVKYVTEGMRKPAFLSGEQKKAIVDLLFKTNRKVTVKQLKEDYFKKIECFDSVEISGVEDRFNASLGTYHDLLKIIKDKDFLDNEENEDILEDIVLTLTLFEDREMIEERLKTYAHLFDDKVMKQLKRRRYTGWGRLSRKLINGIRDKQSGKTILDFLKSDGFANRNFMQLIHDDSLTFKEDIQKAQVSGQGDSLHEHIANLAGSPAIKKGILQTVKVVDELVKVMGRHKPENIVIEMARENQTTQKGQKNSRERMKRIEEGIKELGSQILKEHPVENTQLQNEKLYLYYLQNGRDMYVDQELDINRLSDYDVDHIVPQSFLKDDSIDNKVLTRSDKARGKSDNVPSEEVVKKMKNYWRQLLNAKLITQRKFDNLTKAERGGLSELDKAGFIKRQLVETRQITKHVAQILDSRMNTKYDENDKLIREVKVITLKSKLVSDFRKDFQFYKVREINNYHHAHDAYLNAVVGTALIKKYPKLESEFVYGDYKVYDVRKMIAKSEQEIGKATAKYFFYSNIMNFFKTEITLANGEIRKRPLIETNGETGEIVWDKGRDFATVRKVLSMPQVNIVKKTEVQTGGFSKESILPKRNSDKLIARKKDWDPKKYGGFDSPTVAYSVLVVAKVEKGKSKKLKSVKELLGITIMERSSFEKNPIDFLEAKGYKEVKKDLIIKLPKYSLFELENGRKRMLASAGELQKGNELALPSKYVNFLYLASHYEKLKGSPEDNEQKQLFVEQHKHYLDEIIEQISEFSKRVILADANLDKVLSAYNKHRDKPIREQAENIIHLFTLTNLGAPAAFKYFDTTIDRKRYTSTKEVLDATLIHQSITGLYETRIDLSQLGGDGGGGGGSSPAPGGTLNIEDEYRLHETSKEPDVPLGSTWLSDFPQAWAETGGMGLAVRQAPLIIPLKATSTPVSIKQYPMSQEARLGIKPHIQRLLDQGILVPCQSPWNTPLLPVKKPGTNDYRPVQDLREVNKRVEDIHPTVPNPYNLLSGLPPSHQWYTVLDLKDAFFCLRLHPTSQPLFAFEWRDPEMGISGQLTWTRLPQGFKNSPTLFNEALHRDLADFRIQHPDLILLQYVDDLLLAATSEQDCQRGTRALLQTLGNLGYRASAKKAQICQKQVKYLGYLLKEGQRWLTEARKETVMGQPTPKTPRQLREFLGKAGFCRLFIPGFAEMAAPLYPLTKPGTLFNWGPDQQKAYQEIKQALLTAPALGLPDLTKPFELFVDEKQGYAKGVLTQKLGPWRRPVAYLSKKLDPVAAGWPPCLRMVAAIAVLTKDAGKLTMGQPLVILAPHAVEALVKQPPDRWLSNARMTHYQAMLLDTDRVQFGPVVALNPATLLPLPEKEAPHDCLEILAETHGTRPDLTDQPIPDADYTWYTDGSSFLQEGQRRAGAAVTTETEVIWARALPAGTSAQRAELIALTQALKMAEGKKLNVYTDSRYAFATAHVHGEIYRRRGWLTSEGREIKNKNEILALLKALFLPKRLSIIHCPGHQKGNSAEARGNRMADQAAREAAMKAVLETSTLLAGKRTADGSEFEKRTADGSEFESPKKKAKVE

SEQ ID NO: 1074 - protein, 2095 aa, synthetic construct
MPAAKRVKLDGGDKKYSIGLDIGTNSVGWAVITDEYKVPSKKFKVLGNTDRHSIKKNLIGALLFDSGETAEATRLKRTARRRYTRRKNRICYLQEIFSNEMAKVDDSFFHRLEESFLVEEDKKHERHPIFGNIVDEVAYHEKYPTIYHLRKKLVDSTDKADLRLIYLALAHMIKFRGHFLIEGDLNPDNSDVDKLFIQLVQTYNQLFEENPINASGVDAKAILSARLSKSRRLENLIAQLPGEKKNGLFGNLIALSLGLTPNFKSNFDLAEDAKLQLSKDTYDDDLDNLLAQIGDQYADLFLAAKNLSDAILLSDILRVNTEITKAPLSASMIKRYDEHHQDLTLLKALVRQQLPEKYKEIFFDQSKNGYAGYIDGGASQEEFYKFIKPILEKMDGTEELLVKLNREDLLRKQRTFDNGSIPHQIHLGELHAILRRQEDFYPFLKDNREKIEKILTFRIPYYVGPLARGNSRFAWMTRKSEETITPWNFEEVVDKGASAQSFIERMTNFDKNLPNEKVLPKHSLLYEYFTVYNELTKVKYVTEGMRKPAFLSGEQKKAIVDLLFKTNRKVTVKQLKEDYFKKIECFDSVEISGVEDRFNASLGTYHDLLKIIKDKDFLDNEENEDILEDIVLTLTLFEDREMIEERLKTYAHLFDDKVMKQLKRRRYTGWGRLSRKLINGIRDKQSGKTILDFLKSDGFANRNFMQLIHDDSLTFKEDIQKAQVSGQGDSLHEHIANLAGSPAIKKGILQTVKVVDELVKVMGRHKPENIVIEMARENQTTQKGQKNSRERMKRIEEGIKELGSQILKEHPVENTQLQNEKLYLYYLQNGRDMYVDQELDINRLSDYDVDHIVPQSFLKDDSIDNKVLTRSDKARGKSDNVPSEEVVKKMKNYWRQLLNAKLITQRKFDNLTKAERGGLSELDKAGFIKRQLVETRQITKHVAQILDSRMNTKYDENDKLIREVKVITLKSKLVSDFRKDFQFYKVREINNYHHAHDAYLNAVVGTALIKKYPKLESEFVYGDYKVYDVRKMIAKSEQEIGKATAKYFFYSNIMNFFKTEITLANGEIRKRPLIETNGETGEIVWDKGRDFATVRKVLSMPQVNIVKKTEVQTGGFSKESILPKRNSDKLIARKKDWDPKKYGGFDSPTVAYSVLVVAKVEKGKSKKLKSVKELLGITIMERSSFEKNPIDFLEAKGYKEVKKDLIIKLPKYSLFELENGRKRMLASAGELQKGNELALPSKYVNFLYLASHYEKLKGSPEDNEQKQLFVEQHKHYLDEIIEQISEFSKRVILADANLDKVLSAYNKHRDKPIREQAENIIHLFTLTNLGAPAAFKYFDTTIDRKRYTSTKEVLDATLIHQSITGLYETRIDLSQLGGDGGGGGGSGGGGSGGTLNIEDEYRLHETSKEPDVPLGSTWLSDFPQAWAETGGMGLAVRQAPLIIPLKATSTPVSIKQYPMSQEARLGIKPHIQRLLDQGILVPCQSPWNTPLLPVKKPGTNDYRPVQDLREVNKRVEDIHPTVPNPYNLLSGLPPSHQWYTVLDLKDAFFCLRLHPTSQPLFAFEWRDPEMGISGQLTWTRLPQGFKNSPTLFNEALHRDLADFRIQHPDLILLQYVDDLLLAATSEQDCQRGTRALLQTLGNLGYRASAKKAQICQKQVKYLGYLLKEGQRWLTEARKETVMGQPTPKTPRQLREFLGKAGFCRLFIPGFAEMAAPLYPLTKPGTLFNWGPDQQKAYQEIKQALLTAPALGLPDLTKPFELFVDEKQGYAKGVLTQKLGPWRRPVAYLSKKLDPVAAGWPPCLRMVAAIAVLTKDAGKLTMGQPLVILAPHAVEALVKQPPDRWLSNARMTHYQAMLLDTDRVQFGPVVALNPATLLPLPEKEAPHDCLEILAETHGTRPDLTDQPIPDADYTWYTDGSSFLQEGQRRAGAAVTTETEVIWARALPAGTSAQRAELIALTQALKMAEGKKLNVYTDSRYAFATAHVHGEIYRRRGWLTSEGREIKNKNEILALLKALFLPKRLSIIHCPGHQKGNSAEARGNRMADQAAREAAMKAVLETSTLLAGKRTADGSEFEKRTADGSEFESPKKKAKVE

SEQ ID NO: 1075 - protein, 2096 aa, synthetic construct
MPAAKRVKLDGGDKKYSIGLDIGTNSVGWAVITDEYKVPSKKFKVLGNTDRHSIKKNLIGALLFDSGETAEATRLKRTARRRYTRRKNRICYLQEIFSNEMAKVDDSFFHRLEESFLVEEDKKHERHPIFGNIVDEVAYHEKYPTIYHLRKKLVDSTDKADLRLIYLALAHMIKFRGHFLIEGDLNPDNSDVDKLFIQLVQTYNQLFEENPINASGVDAKAILSARLSKSRRLENLIAQLPGEKKNGLFGNLIALSLGLTPNFKSNFDLAEDAKLQLSKDTYDDDLDNLLAQIGDQYADLFLAAKNLSDAILLSDILRVNTEITKAPLSASMIKRYDEHHQDLTLLKALVRQQLPEKYKEIFFDQSKNGYAGYIDGGASQEEFYKFIKPILEKMDGTEELLVKLNREDLLRKQRTFDNGSIPHQIHLGELHAILRRQEDFYPFLKDNREKIEKILTFRIPYYVGPLARGNSRFAWMTRKSEETITPWNFEEVVDKGASAQSFIERMTNFDKNLPNEKVLPKHSLLYEYFTVYNELTKVKYVTEGMRKPAFLSGEQKKAIVDLLFKTNRKVTVKQLKEDYFKKIECFDSVEISGVEDRFNASLGTYHDLLKIIKDKDFLDNEENEDILEDIVLTLTLFEDREMIEERLKTYAHLFDDKVMKQLKRRRYTGWGRLSRKLINGIRDKQSGKTILDFLKSDGFANRNFMQLIHDDSLTFKEDIQKAQVSGQGDSLHEHIANLAGSPAIKKGILQTVKVVDELVKVMGRHKPENIVIEMARENQTTQKGQKNSRERMKRIEEGIKELGSQILKEHPVENTQLQNEKLYLYYLQNGRDMYVDQELDINRLSDYDVDHIVPQSFLKDDSIDNKVLTRSDKARGKSDNVPSEEVVKKMKNYWRQLLNAKLITQRKFDNLTKAERGGLSELDKAGFIKRQLVETRQITKHVAQILDSRMNTKYDENDKLIREVKVITLKSKLVSDFRKDFQFYKVREINNYHHAHDAYLNAVVGTALIKKYPKLESEFVYGDYKVYDVRKMIAKSEQEIGKATAKYFFYSNIMNFFKTEITLANGEIRKRPLIETNGETGEIVWDKGRDFATVRKVLSMPQVNIVKKTEVQTGGFSKESILPKRNSDKLIARKKDWDPKKYGGFDSPTVAYSVLVVAKVEKGKSKKLKSVKELLGITIMERSSFEKNPIDFLEAKGYKEVKKDLIIKLPKYSLFELENGRKRMLASAGELQKGNELALPSKYVNFLYLASHYEKLKGSPEDNEQKQLFVEQHKHYLDEIIEQISEFSKRVILADANLDKVLSAYNKHRDKPIREQAENIIHLFTLTNLGAPAAFKYFDTTIDRKRYTSTKEVLDATLIHQSITGLYETRIDLSQLGGDGGGSSEAAAKGGSGGTLNIEDEYRLHETSKEPDVPLGSTWLSDFPQAWAETGGMGLAVRQAPLIIPLKATSTPVSIKQYPMSQEARLGIKPHIQRLLDQGILVPCQSPWNTPLLPVKKPGTNDYRPVQDLREVNKRVEDIHPTVPNPYNLLSGLPPSHQWYTVLDLKDAFFCLRLHPTSQPLFAFEWRDPEMGISGQLTWTRLPQGFKNSPTLFNEALHRDLADFRIQHPDLILLQYVDDLLLAATSEQDCQRGTRALLQTLGNLGYRASAKKAQICQKQVKYLGYLLKEGQRWLTEARKETVMGQPTPKTPRQLREFLGKAGFCRLFIPGFAEMAAPLYPLTKPGTLFNWGPDQQKAYQEIKQALLTAPALGLPDLTKPFELFVDEKQGYAKGVLTQKLGPWRRPVAYLSKKLDPVAAGWPPCLRMVAAIAVLTKDAGKLTMGQPLVILAPHAVEALVKQPPDRWLSNARMTHYQAMLLDTDRVQFGPVVALNPATLLPLPEKEAPHDCLEILAETHGTRPDLTDQPIPDADYTWYTDGSSFLQEGQRRAGAAVTTETEVIWARALPAGTSAQRAELIALTQALKMAEGKKLNVYTDSRYAFATAHVHGEIYRRRGWLTSEGREIKNKNEILALLKALFLPKRLSIIHCPGHQKGNSAEARGNRMADQAAREAAMKAVLETSTLLAGKRTADGSEFEKRTADGSEFESPKKKAKVE

SEQ ID NO: 1076 - protein, 2096 aa, synthetic construct
MPAAKRVKLDGGDKKYSIGLDIGTNSVGWAVITDEYKVPSKKFKVLGNTDRHSIKKNLIGALLFDSGETAEATRLKRTARRRYTRRKNRICYLQEIFSNEMAKVDDSFFHRLEESFLVEEDKKHERHPIFGNIVDEVAYHEKYPTIYHLRKKLVDSTDKADLRLIYLALAHMIKFRGHFLIEGDLNPDNSDVDKLFIQLVQTYNQLFEENPINASGVDAKAILSARLSKSRRLENLIAQLPGEKKNGLFGNLIALSLGLTPNFKSNFDLAEDAKLQLSKDTYDDDLDNLLAQIGDQYADLFLAAKNLSDAILLSDILRVNTEITKAPLSASMIKRYDEHHQDLTLLKALVRQQLPEKYKEIFFDQSKNGYAGYIDGGASQEEFYKFIKPILEKMDGTEELLVKLNREDLLRKQRTFDNGSIPHQIHLGELHAILRRQEDFYPFLKDNREKIEKILTFRIPYYVGPLARGNSRFAWMTRKSEETITPWNFEEVVDKGASAQSFIERMTNFDKNLPNEKVLPKHSLLYEYFTVYNELTKVKYVTEGMRKPAFLSGEQKKAIVDLLFKTNRKVTVKQLKEDYFKKIECFDSVEISGVEDRFNASLGTYHDLLKIIKDKDFLDNEENEDILEDIVLTLTLFEDREMIEERLKTYAHLFDDKVMKQLKRRRYTGWGRLSRKLINGIRDKQSGKTILDFLKSDGFANRNFMQLIHDDSLTFKEDIQKAQVSGQGDSLHEHIANLAGSPAIKKGILQTVKVVDELVKVMGRHKPENIVIEMARENQTTQKGQKNSRERMKRIEEGIKELGSQILKEHPVENTQLQNEKLYLYYLQNGRDMYVDQELDINRLSDYDVDHIVPQSFLKDDSIDNKVLTRSDKARGKSDNVPSEEVVKKMKNYWRQLLNAKLITQRKFDNLTKAERGGLSELDKAGFIKRQLVETRQITKHVAQILDSRMNTKYDENDKLIREVKVITLKSKLVSDFRKDFQFYKVREINNYHHAHDAYLNAVVGTALIKKYPKLESEFVYGDYKVYDVRKMIAKSEQEIGKATAKYFFYSNIMNFFKTEITLANGEIRKRPLIETNGETGEIVWDKGRDFATVRKVLSMPQVNIVKKTEVQTGGFSKESILPKRNSDKLIARKKDWDPKKYGGFDSPTVAYSVLVVAKVEKGKSKKLKSVKELLGITIMERSSFEKNPIDFLEAKGYKEVKKDLIIKLPKYSLFELENGRKRMLASAGELQKGNELALPSKYVNFLYLASHYEKLKGSPEDNEQKQLFVEQHKHYLDEIIEQISEFSKRVILADANLDKVLSAYNKHRDKPIREQAENIIHLFTLTNLGAPAAFKYFDTTIDRKRYTSTKEVLDATLIHQSITGLYETRIDLSQLGGDGGGGGPAPEAAAKGGTLNIEDEYRLHETSKEPDVPLGSTWLSDFPQAWAETGGMGLAVRQAPLIIPLKATSTPVSIKQYPMSQEARLGIKPHIQRLLDQGILVPCQSPWNTPLLPVKKPGTNDYRPVQDLREVNKRVEDIHPTVPNPYNLLSGLPPSHQWYTVLDLKDAFFCLRLHPTSQPLFAFEWRDPEMGISGQLTWTRLPQGFKNSPTLFNEALHRDLADFRIQHPDLILLQYVDDLLLAATSEQDCQRGTRALLQTLGNLGYRASAKKAQICQKQVKYLGYLLKEGQRWLTEARKETVMGQPTPKTPRQLREFLGKAGFCRLFIPGFAEMAAPLYPLTKPGTLFNWGPDQQKAYQEIKQALLTAPALGLPDLTKPFELFVDEKQGYAKGVLTQKLGPWRRPVAYLSKKLDPVAAGWPPCLRMVAAIAVLTKDAGKLTMGQPLVILAPHAVEALVKQPPDRWLSNARMTHYQAMLLDTDRVQFGPVVALNPATLLPLPEKEAPHDCLEILAETHGTRPDLTDQPIPDADYTWYTDGSSFLQEGQRRAGAAVTTETEVIWARALPAGTSAQRAELIALTQALKMAEGKKLNVYTDSRYAFATAHVHGEIYRRRGWLTSEGREIKNKNEILALLKALFLPKRLSIIHCPGHQKGNSAEARGNRMADQAAREAAMKAVLETSTLLAGKRTADGSEFEKRTADGSEFESPKKKAKVE

SEQ ID NO: 1077 - protein, 2097 aa, synthetic construct
MPAAKRVKLDGGDKKYSIGLDIGTNSVGWAVITDEYKVPSKKFKVLGNTDRHSIKKNLIGALLFDSGETAEATRLKRTARRRYTRRKNRICYLQEIFSNEMAKVDDSFFHRLEESFLVEEDKKHERHPIFGNIVDEVAYHEKYPTIYHLRKKLVDSTDKADLRLIYLALAHMIKFRGHFLIEGDLNPDNSDVDKLFIQLVQTYNQLFEENPINASGVDAKAILSARLSKSRRLENLIAQLPGEKKNGLFGNLIALSLGLTPNFKSNFDLAEDAKLQLSKDTYDDDLDNLLAQIGDQYADLFLAAKNLSDAILLSDILRVNTEITKAPLSASMIKRYDEHHQDLTLLKALVRQQLPEKYKEIFFDQSKNGYAGYIDGGASQEEFYKFIKPILEKMDGTEELLVKLNREDLLRKQRTFDNGSIPHQIHLGELHAILRRQEDFYPFLKDNREKIEKILTFRIPYYVGPLARGNSRFAWMTRKSEETITPWNFEEVVDKGASAQSFIERMTNFDKNLPNEKVLPKHSLLYEYFTVYNELTKVKYVTEGMRKPAFLSGEQKKAIVDLLFKTNRKVTVKQLKEDYFKKIECFDSVEISGVEDRFNASLGTYHDLLKIIKDKDFLDNEENEDILEDIVLTLTLFEDREMIEERLKTYAHLFDDKVMKQLKRRRYTGWGRLSRKLINGIRDKQSGKTILDFLKSDGFANRNFMQLIHDDSLTFKEDIQKAQVSGQGDSLHEHIANLAGSPAIKKGILQTVKVVDELVKVMGRHKPENIVIEMARENQTTQKGQKNSRERMKRIEEGIKELGSQILKEHPVENTQLQNEKLYLYYLQNGRDMYVDQELDINRLSDYDVDHIVPQSFLKDDSIDNKVLTRSDKARGKSDNVPSEEVVKKMKNYWRQLLNAKLITQRKFDNLTKAERGGLSELDKAGFIKRQLVETRQITKHVAQILDSRMNTKYDENDKLIREVKVITLKSKLVSDFRKDFQFYKVREINNYHHAHDAYLNAVVGTALIKKYPKLESEFVYGDYKVYDVRKMIAKSEQEIGKATAKYFFYSNIMNFFKTEITLANGEIRKRPLIETNGETGEIVWDKGRDFATVRKVLSMPQVNIVKKTEVQTGGFSKESILPKRNSDKLIARKKDWDPKKYGGFDSPTVAYSVLVVAKVEKGKSKKLKSVKELLGITIMERSSFEKNPIDFLEAKGYKEVKKDLIIKLPKYSLFELENGRKRMLASAGELQKGNELALPSKYVNFLYLASHYEKLKGSPEDNEQKQLFVEQHKHYLDEIIEQISEFSKRVILADANLDKVLSAYNKHRDKPIREQAENIIHLFTLTNLGAPAAFKYFDTTIDRKRYTSTKEVLDATLIHQSITGLYETRIDLSQLGGDGGGSSGSSGSSGSSGGTLNIEDEYRLHETSKEPDVPLGSTWLSDFPQAWAETGGMGLAVRQAPLIIPLKATSTPVSIKQYPMSQEARLGIKPHIQRLLDQGILVPCQSPWNTPLLPVKKPGTNDYRPVQDLREVNKRVEDIHPTVPNPYNLLSGLPPSHQWYTVLDLKDAFFCLRLHPTSQPLFAFEWRDPEMGISGQLTWTRLPQGFKNSPTLFNEALHRDLADFRIQHPDLILLQYVDDLLLAATSEQDCQRGTRALLQTLGNLGYRASAKKAQICQKQVKYLGYLLKEGQRWLTEARKETVMGQPTPKTPRQLREFLGKAGFCRLFIPGFAEMAAPLYPLTKPGTLFNWGPDQQKAYQEIKQALLTAPALGLPDLTKPFELFVDEKQGYAKGVLTQKLGPWRRPVAYLSKKLDPVAAGWPPCLRMVAAIAVLTKDAGKLTMGQPLVILAPHAVEALVKQPPDRWLSNARMTHYQAMLLDTDRVQFGPVVALNPATLLPLPEKEAPHDCLEILAETHGTRPDLTDQPIPDADYTWYTDGSSFLQEGQRRAGAAVTTETEVIWARALPAGTSAQRAELIALTQALKMAEGKKLNVYTDSRYAFATAHVHGEIYRRRGWLTSEGREIKNKNEILALLKALFLPKRLSIIHCPGHQKGNSAEARGNRMADQAAREAAMKAVLETSTLLAGKRTADGSEFEKRTADGSEFESPKKKAKVE

SEQ ID NO: 1078 - protein, 2093 aa, synthetic construct
MPAAKRVKLDGGDKKYSIGLDIGTNSVGWAVITDEYKVPSKKFKVLGNTDRHSIKKNLIGALLFDSGETAEATRLKRTARRRYTRRKNRICYLQEIFSNEMAKVDDSFFHRLEESFLVEEDKKHERHPIFGNIVDEVAYHEKYPTIYHLRKKLVDSTDKADLRLIYLALAHMIKFRGHFLIEGDLNPDNSDVDKLFIQLVQTYNQLFEENPINASGVDAKAILSARLSKSRRLENLIAQLPGEKKNGLFGNLIALSLGLTPNFKSNFDLAEDAKLQLSKDTYDDDLDNLLAQIGDQYADLFLAAKNLSDAILLSDILRVNTEITKAPLSASMIKRYDEHHQDLTLLKALVRQQLPEKYKEIFFDQSKNGYAGYIDGGASQEEFYKFIKPILEKMDGTEELLVKLNREDLLRKQRTFDNGSIPHQIHLGELHAILRRQEDFYPFLKDNREKIEKILTFRIPYYVGPLARGNSRFAWMTRKSEETITPWNFEEVVDKGASAQSFIERMTNFDKNLPNEKVLPKHSLLYEYFTVYNELTKVKYVTEGMRKPAFLSGEQKKAIVDLLFKTNRKVTVKQLKEDYFKKIECFDSVEISGVEDRFNASLGTYHDLLKIIKDKDFLDNEENEDILEDIVLTLTLFEDREMIEERLKTYAHLFDDKVMKQLKRRRYTGWGRLSRKLINGIRDKQSGKTILDFLKSDGFANRNFMQLIHDDSLTFKEDIQKAQVSGQGDSLHEHIANLAGSPAIKKGILQTVKVVDELVKVMGRHKPENIVIEMARENQTTQKGQKNSRERMKRIEEGIKELGSQILKEHPVENTQLQNEKLYLYYLQNGRDMYVDQELDINRLSDYDVDHIVPQSFLKDDSIDNKVLTRSDKARGKSDNVPSEEVVKKMKNYWRQLLNAKLITQRKFDNLTKAERGGLSELDKAGFIKRQLVETRQITKHVAQILDSRMNTKYDENDKLIREVKVITLKSKLVSDFRKDFQFYKVREINNYHHAHDAYLNAVVGTALIKKYPKLESEFVYGDYKVYDVRKMIAKSEQEIGKATAKYFFYSNIMNFFKTEITLANGEIRKRPLIETNGETGEIVWDKGRDFATVRKVLSMPQVNIVKKTEVQTGGFSKESILPKRNSDKLIARKKDWDPKKYGGFDSPTVAYSVLVVAKVEKGKSKKLKSVKELLGITIMERSSFEKNPIDFLEAKGYKEVKKDLIIKLPKYSLFELENGRKRMLASAGELQKGNELALPSKYVNFLYLASHYEKLKGSPEDNEQKQLFVEQHKHYLDEIIEQISEFSKRVILADANLDKVLSAYNKHRDKPIREQAENIIHLFTLTNLGAPAAFKYFDTTIDRKRYTSTKEVLDATLIHQSITGLYETRIDLSQLGGDGGEAAAKGSSGGTLNIEDEYRLHETSKEPDVPLGSTWLSDFPQAWAETGGMGLAVRQAPLIIPLKATSTPVSIKQYPMSQEARLGIKPHIQRLLDQGILVPCQSPWNTPLLPVKKPGTNDYRPVQDLREVNKRVEDIHPTVPNPYNLLSGLPPSHQWYTVLDLKDAFFCLRLHPTSQPLFAFEWRDPEMGISGQLTWTRLPQGFKNSPTLFNEALHRDLADFRIQHPDLILLQYVDDLLLAATSEQDCQRGTRALLQTLGNLGYRASAKKAQICQKQVKYLGYLLKEGQRWLTEARKETVMGQPTPKTPRQLREFLGKAGFCRLFIPGFAEMAAPLYPLTKPGTLFNWGPDQQKAYQEIKQALLTAPALGLPDLTKPFELFVDEKQGYAKGVLTQKLGPWRRPVAYLSKKLDPVAAGWPPCLRMVAAIAVLTKDAGKLTMGQPLVILAPHAVEALVKQPPDRWLSNARMTHYQAMLLDTDRVQFGPVVALNPATLLPLPEKEAPHDCLEILAETHGTRPDLTDQPIPDADYTWYTDGSSFLQEGQRRAGAAVTTETEVIWARALPAGTSAQRAELIALTQALKMAEGKKLNVYTDSRYAFATAHVHGEIYRRRGWLTSEGREIKNKNEILALLKALFLPKRLSIIHCPGHQKGNSAEARGNRMADQAAREAAMKAVLETSTLLAGKRTADGSEFEKRTADGSEFESPKKKAKVE

SEQ ID NO: 1079 - protein, 2100 aa, synthetic construct
MPAAKRVKLDGGDKKYSIGLDIGTNSVGWAVITDEYKVPSKKFKVLGNTDRHSIKKNLIGALLFDSGETAEATRLKRTARRRYTRRKNRICYLQEIFSNEMAKVDDSFFHRLEESFLVEEDKKHERHPIFGNIVDEVAYHEKYPTIYHLRKKLVDSTDKADLRLIYLALAHMIKFRGHFLIEGDLNPDNSDVDKLFIQLVQTYNQLFEENPINASGVDAKAILSARLSKSRRLENLIAQLPGEKKNGLFGNLIALSLGLTPNFKSNFDLAEDAKLQLSKDTYDDDLDNLLAQIGDQYADLFLAAKNLSDAILLSDILRVNTEITKAPLSASMIKRYDEHHQDLTLLKALVRQQLPEKYKEIFFDQSKNGYAGYIDGGASQEEFYKFIKPILEKMDGTEELLVKLNREDLLRKQRTFDNGSIPHQIHLGELHAILRRQEDFYPFLKDNREKIEKILTFRIPYYVGPLARGNSRFAWMTRKSEETITPWNFEEVVDKGASAQSFIERMTNFDKNLPNEKVLPKHSLLYEYFTVYNELTKVKYVTEGMRKPAFLSGEQKKAIVDLLFKTNRKVTVKQLKEDYFKKIECFDSVEISGVEDRFNASLGTYHDLLKIIKDKDFLDNEENEDILEDIVLTLTLFEDREMIEERLKTYAHLFDDKVMKQLKRRRYTGWGRLSRKLINGIRDKQSGKTILDFLKSDGFANRNFMQLIHDDSLTFKEDIQKAQVSGQGDSLHEHIANLAGSPAIKKGILQTVKVVDELVKVMGRHKPENIVIEMARENQTTQKGQKNSRERMKRIEEGIKELGSQILKEHPVENTQLQNEKLYLYYLQNGRDMYVDQELDINRLSDYDVDHIVPQSFLKDDSIDNKVLTRSDKARGKSDNVPSEEVVKKMKNYWRQLLNAKLITQRKFDNLTKAERGGLSELDKAGFIKRQLVETRQITKHVAQILDSRMNTKYDENDKLIREVKVITLKSKLVSDFRKDFQFYKVREINNYHHAHDAYLNAVVGTALIKKYPKLESEFVYGDYKVYDVRKMIAKSEQEIGKATAKYFFYSNIMNFFKTEITLANGEIRKRPLIETNGETGEIVWDKGRDFATVRKVLSMPQVNIVKKTEVQTGGFSKESILPKRNSDKLIARKKDWDPKKYGGFDSPTVAYSVLVVAKVEKGKSKKLKSVKELLGITIMERSSFEKNPIDFLEAKGYKEVKKDLIIKLPKYSLFELENGRKRMLASAGELQKGNELALPSKYVNFLYLASHYEKLKGSPEDNEQKQLFVEQHKHYLDEIIEQISEFSKRVILADANLDKVLSAYNKHRDKPIREQAENIIHLFTLTNLGAPAAFKYFDTTIDRKRYTSTKEVLDATLIHQSITGLYETRIDLSQLGGDGGGGGGSEAAAKGGGGSGGTLNIEDEYRLHETSKEPDVPLGSTWLSDFPQAWAETGGMGLAVRQAPLIIPLKATSTPVSIKQYPMSQEARLGIKPHIQRLLDQGILVPCQSPWNTPLLPVKKPGTNDYRPVQDLREVNKRVEDIHPTVPNPYNLLSGLPPSHQWYTVLDLKDAFFCLRLHPTSQPLFAFEWRDPEMGISGQLTWTRLPQGFKNSPTLFNEALHRDLADFRIQHPDLILLQYVDDLLLAATSEQDCQRGTRALLQTLGNLGYRASAKKAQICQKQVKYLGYLLKEGQRWLTEARKETVMGQPTPKTPRQLREFLGKAGFCRLFIPGFAEMAAPLYPLTKPGTLFNWGPDQQKAYQEIKQALLTAPALGLPDLTKPFELFVDEKQGYAKGVLTQKLGPWRRPVAYLSKKLDPVAAGWPPCLRMVAAIAVLTKDAGKLTMGQPLVILAPHAVEALVKQPPDRWLSNARMTHYQAMLLDTDRVQFGPVVALNPATLLPLPEKEAPHDCLEILAETHGTRPDLTDQPIPDADYTWYTDGSSFLQEGQRRAGAAVTTETEVIWARALPAGTSAQRAELIALTQALKMAEGKKLNVYTDSRYAFATAHVHGEIYRRRGWLTSEGREIKNKNEILALLKALFLPKRLSIIHCPGHQKGNSAEARGNRMADQAAREAAMKAVLETSTLLAGKRTADGSEFEKRTADGSEFESPKKKAKVE

SEQ ID NO: 1080 - protein, 2088 aa, synthetic construct
MPAAKRVKLDGGDKKYSIGLDIGTNSVGWAVITDEYKVPSKKFKVLGNTDRHSIKKNLIGALLFDSGETAEATRLKRTARRRYTRRKNRICYLQEIFSNEMAKVDDSFFHRLEESFLVEEDKKHERHPIFGNIVDEVAYHEKYPTIYHLRKKLVDSTDKADLRLIYLALAHMIKFRGHFLIEGDLNPDNSDVDKLFIQLVQTYNQLFEENPINASGVDAKAILSARLSKSRRLENLIAQLPGEKKNGLFGNLIALSLGLTPNFKSNFDLAEDAKLQLSKDTYDDDLDNLLAQIGDQYADLFLAAKNLSDAILLSDILRVNTEITKAPLSASMIKRYDEHHQDLTLLKALVRQQLPEKYKEIFFDQSKNGYAGYIDGGASQEEFYKFIKPILEKMDGTEELLVKLNREDLLRKQRTFDNGSIPHQIHLGELHAILRRQEDFYPFLKDNREKIEKILTFRIPYYVGPLARGNSRFAWMTRKSEETITPWNFEEVVDKGASAQSFIERMTNFDKNLPNEKVLPKHSLLYEYFTVYNELTKVKYVTEGMRKPAFLSGEQKKAIVDLLFKTNRKVTVKQLKEDYFKKIECFDSVEISGVEDRFNASLGTYHDLLKIIKDKDFLDNEENEDILEDIVLTLTLFEDREMIEERLKTYAHLFDDKVMKQLKRRRYTGWGRLSRKLINGIRDKQSGKTILDFLKSDGFANRNFMQLIHDDSLTFKEDIQKAQVSGQGDSLHEHIANLAGSPAIKKGILQTVKVVDELVKVMGRHKPENIVIEMARENQTTQKGQKNSRERMKRIEEGIKELGSQILKEHPVENTQLQNEKLYLYYLQNGRDMYVDQELDINRLSDYDVDHIVPQSFLKDDSIDNKVLTRSDKARGKSDNVPSEEVVKKMKNYWRQLLNAKLITQRKFDNLTKAERGGLSELDKAGFIKRQLVETRQITKHVAQILDSRMNTKYDENDKLIREVKVITLKSKLVSDFRKDFQFYKVREINNYHHAHDAYLNAVVGTALIKKYPKLESEFVYGDYKVYDVRKMIAKSEQEIGKATAKYFFYSNIMNFFKTEITLANGEIRKRPLIETNGETGEIVWDKGRDFATVRKVLSMPQVNIVKKTEVQTGGFSKESILPKRNSDKLIARKKDWDPKKYGGFDSPTVAYSVLVVAKVEKGKSKKLKSVKELLGITIMERSSFEKNPIDFLEAKGYKEVKKDLIIKLPKYSLFELENGRKRMLASAGELQKGNELALPSKYVNFLYLASHYEKLKGSPEDNEQKQLFVEQHKHYLDEIIEQISEFSKRVILADANLDKVLSAYNKHRDKPIREQAENIIHLFTLTNLGAPAAFKYFDTTIDRKRYTSTKEVLDATLIHQSITGLYETRIDLSQLGGDGGGGGGGTLNIEDEYRLHETSKEPDVPLGSTWLSDFPQAWAETGGMGLAVRQAPLIIPLKATSTPVSIKQYPMSQEARLGIKPHIQRLLDQGILVPCQSPWNTPLLPVKKPGTNDYRPVQDLREVNKRVEDIHPTVPNPYNLLSGLPPSHQWYTVLDLKDAFFCLRLHPTSQPLFAFEWRDPEMGISGQLTWTRLPQGFKNSPTLFNEALHRDLADFRIQHPDLILLQYVDDLLLAATSEQDCQRGTRALLQTLGNLGYRASAKKAQICQKQVKYLGYLLKEGQRWLTEARKETVMGQPTPKTPRQLREFLGKAGFCRLFIPGFAEMAAPLYPLTKPGTLFNWGPDQQKAYQEIKQALLTAPALGLPDLTKPFELFVDEKQGYAKGVLTQKLGPWRRPVAYLSKKLDPVAAGWPPCLRMVAAIAVLTKDAGKLTMGQPLVILAPHAVEALVKQPPDRWLSNARMTHYQAMLLDTDRVQFGPVVALNPATLLPLPEKEAPHDCLEILAETHGTRPDLTDQPIPDADYTWYTDGSSFLQEGQRRAGAAVTTETEVIWARALPAGTSAQRAELIALTQALKMAEGKKLNVYTDSRYAFATAHVHGEIYRRRGWLTSEGREIKNKNEILALLKALFLPKRLSIIHCPGHQKGNSAEARGNRMADQAAREAAMKAVLETSTLLAGKRTADGSEFEKRTADGSEFESPKKKAKVE

SEQ ID NO: 1081 - protein, 2096 aa, synthetic construct
MPAAKRVKLDGGDKKYSIGLDIGTNSVGWAVITDEYKVPSKKFKVLGNTDRHSIKKNLIGALLFDSGETAEATRLKRTARRRYTRRKNRICYLQEIFSNEMAKVDDSFFHRLEESFLVEEDKKHERHPIFGNIVDEVAYHEKYPTIYHLRKKLVDSTDKADLRLIYLALAHMIKFRGHFLIEGDLNPDNSDVDKLFIQLVQTYNQLFEENPINASGVDAKAILSARLSKSRRLENLIAQLPGEKKNGLFGNLIALSLGLTPNFKSNFDLAEDAKLQLSKDTYDDDLDNLLAQIGDQYADLFLAAKNLSDAILLSDILRVNTEITKAPLSASMIKRYDEHHQDLTLLKALVRQQLPEKYKEIFFDQSKNGYAGYIDGGASQEEFYKFIKPILEKMDGTEELLVKLNREDLLRKQRTFDNGSIPHQIHLGELHAILRRQEDFYPFLKDNREKIEKILTFRIPYYVGPLARGNSRFAWMTRKSEETITPWNFEEVVDKGASAQSFIERMTNFDKNLPNEKVLPKHSLLYEYFTVYNELTKVKYVTEGMRKPAFLSGEQKKAIVDLLFKTNRKVTVKQLKEDYFKKIECFDSVEISGVEDRFNASLGTYHDLLKIIKDKDFLDNEENEDILEDIVLTLTLFEDREMIEERLKTYAHLFDDKVMKQLKRRRYTGWGRLSRKLINGIRDKQSGKTILDFLKSDGFANRNFMQLIHDDSLTFKEDIQKAQVSGQGDSLHEHIANLAGSPAIKKGILQTVKVVDELVKVMGRHKPENIVIEMARENQTTQKGQKNSRERMKRIEEGIKELGSQILKEHPVENTQLQNEKLYLYYLQNGRDMYVDQELDINRLSDYDVDHIVPQSFLKDDSIDNKVLTRSDKARGKSDNVPSEEVVKKMKNYWRQLLNAKLITQRKFDNLTKAERGGLSELDKAGFIKRQLVETRQITKHVAQILDSRMNTKYDENDKLIREVKVITLKSKLVSDFRKDFQFYKVREINNYHHAHDAYLNAVVGTALIKKYPKLESEFVYGDYKVYDVRKMIAKSEQEIGKATAKYFFYSNIMNFFKTEITLANGEIRKRPLIETNGETGEIVWDKGRDFATVRKVLSMPQVNIVKKTEVQTGGFSKESILPKRNSDKLIARKKDWDPKKYGGFDSPTVAYSVLVVAKVEKGKSKKLKSVKELLGITIMERSSFEKNPIDFLEAKGYKEVKKDLIIKLPKYSLFELENGRKRMLASAGELQKGNELALPSKYVNFLYLASHYEKLKGSPEDNEQKQLFVEQHKHYLDEIIEQISEFSKRVILADANLDKVLSAYNKHRDKPIREQAENIIHLFTLTNLGAPAAFKYFDTTIDRKRYTSTKEVLDATLIHQSITGLYETRIDLSQLGGDGGGGSEAAAKGGGGGTLNIEDEYRLHETSKEPDVPLGSTWLSDFPQAWAETGGMGLAVRQAPLIIPLKATSTPVSIKQYPMSQEARLGIKPHIQRLLDQGILVPCQSPWNTPLLPVKKPGTNDYRPVQDLREVNKRVEDIHPTVPNPYNLLSGLPPSHQWYTVLDLKDAFFCLRLHPTSQPLFAFEWRDPEMGISGQLTWTRLPQGFKNSPTLFNEALHRDLADFRIQHPDLILLQYVDDLLLAATSEQDCQRGTRALLQTLGNLGYRASAKKAQICQKQVKYLGYLLKEGQRWLTEARKETVMGQPTPKTPRQLREFLGKAGFCRLFIPGFAEMAAPLYPLTKPGTLFNWGPDQQKAYQEIKQALLTAPALGLPDLTKPFELFVDEKQGYAKGVLTQKLGPWRRPVAYLSKKLDPVAAGWPPCLRMVAAIAVLTKDAGKLTMGQPLVILAPHAVEALVKQPPDRWLSNARMTHYQAMLLDTDRVQFGPVVALNPATLLPLPEKEAPHDCLEILAETHGTRPDLTDQPIPDADYTWYTDGSSFLQEGQRRAGAAVTTETEVIWARALPAGTSAQRAELIALTQALKMAEGKKLNVYTDSRYAFATAHVHGEIYRRRGWLTSEGREIKNKNEILALLKALFLPKRLSIIHCPGHQKGNSAEARGNRMADQAAREAAMKAVLETSTLLAGKRTADGSEFEKRTADGSEFESPKKKAKVE

(The sequence listing continues in the following parts.)